United States Patent Application Publication US 2008/0114160 A1 - sequence listing, part 41

SEQ ID NO: 9957 - DNA, 88371 bp, Oryza sativa
taatgcatctttaattaaaatgaagggtgggctgtgtcaagtgtcaacaataggatgaacaggcatatcggaaagaaaaaaaaattaaaaagtcattaaggccctatttgattcagcttaggattattataaactggattattaggagtaaactgaaacaaacaagtagataattatgatttataagccagattagtataatctaataatctcctctggaggagcattttccaaattattggtggctaaagacccactacccttagatgcctccaataatctagagaaacaaatagctcacagcttattctatgtcagcttattataatccagcttatagtaatctgatttaataatatagattacaataatcttaagttaaaacaaacagggcctaaataagatgcttaccagctctgctgacgtccgcaatactgcagccaatgcggatctctcactaactaactcccggatcttcctaaaagatgcaactacagacattggcactggaaaacagaagacatgtcaatgccatcagaaaatatgagccaacaaatatcatgtgtaggaaagcatgtgctaaattcatgtacaccacttaatgatatgatgcaactcaaaagtatcaactgttgtttggtgaacagtagttatatcaagcaagtatatgcagattccaatagtggtacaacaaaaggtgcaaatatattagaatgcttcaacataatattcgcccatttctaaatgtgccagtagtctttttacagcagaacattgtcaaacatcaatgctggtgcaacagtcatgcataactgcagtaatatcaatgtgcatcaattcatacggaagaatgcattcccaggttaaagatatctatatcagtagaatacaattaaaaatagcctaattagcaatacgtagtgcagtagttcacaggaattttatcatcatatattgcatgacaaatttgaaattatcgctggcaccaaacatttaaagaaaaatatagacatgaaggtggacagcgatttttgtcgtaggtttgttaaggtataagtgagaataaccctaaaacattatggtggttctcatttcaaaaggaaaataggaaggtggaaagcacaatcaggcggtctatttgaaattgaacagttgactcaccaaatccctctggatctctaatcatgaatttcatcaaatgttctgttgtagccagattgacatcactgaagtaaaattccacctgtcaaggttttaaaatacaatcaaaccaagggtgtaccacttatataggtgcaaatcaagcatcccataacagcttgattgcactaataaacaacaaaaaaaggaattaatataagacgaagttaatatcatactttcaatgatcagagaaaaggtaaactaataagaaagtaaaaagatgcagaaggtaaacaatacaaaagaagagaattgatttctctctccatttctccccttcagaaagatgcaaagagaaacaatcataaaatagatggagagctgcactatttctatttcctaagttattatcctcaaaaaagaaaacagtataactcctcatggtactatgcatgcagcaattacgagcttcagcaagacgacatgatatggttttgtcgtttttacaccgtgtcgctaataaatcatactgaggcccatcatgtttgccaaacatcacaaacatgcatatcttgttattccatatttgctcgttggcaggcatgagacatgtcactcgacccaaaccccacacacacgtaaatgcagcagaccgcgccatgtggaaagacaacatgcacccttcccgccatccccaccctatctgatttgtatagactataaaccctatagtgttctccaagaaaagaagtgcagaattacagtgcattttctaaaaatagcaatctctaacagacattccctgttttactcgtcctagattccaccttagccccttactagtgcacacaggacaatcaaggtgccagtgatctgtgaagtaatattttttatcctcatagtttcagaaatacaagaataagcaaaataataggcaataaacagttttaaggaacaaatatctatagacatcatccctctagtgcatacatctgtaactaaagatcaaacttgcagacaaatcaacagaagtgtaaagtcacactaattccatcgtttcacttgcaatcactgggttaagctacacttcctacatgcctatttctactccatagacgacccaatctaacccttgcgttgatcaaaagatcaagctttatcggttgaaacttgagattccacaccaaaccaatcctcataatcagcaccaaacagcatggcaaaaggcagtaaacacatcatccatcaggtgggtgggggggagcgctacctgcttgacgacccgacgagccacatcctccgggatccctccttctcccaccgccccggccgccgcggcgtccccctcatcctccccgtagtgttgccagtgctggtggtgctggtggtggtggtgcggctggtagtgctgctggtggtggtggtaggccccacccccgcccccgcggtgctggcggcgagggttggcgtggtggtggtggtggtgggcgccggatcgaggggtgaactccggggcggcggcgttgaggcgggcggcggagggggcgggggcggaggcggatgaggcggatgaggaggaggtggtggagtccggggcgtcgtcctgcgccatggatggatggagagagagaggagcggccgcgagcgaagcgtgagaggagagagagagagagagaagaagggtttgcttggggggactctggagagaagaggagaagacggcaaaagggaagagagacaagaggagacgagtcgggtggtgacgtgtactctacccggagagcgagttgggcttcggcccaaaagcccaacatatcccagcctgttactgctgtaccagtactccccccccccctcacggtggtgtttgaatctcctatatatgaagataaaaattaaatgtttcacgccaagtgaggtaataataacgtgtaactaattgagttttaatgattacaaacttaaaaaatagattaatctgatattttacaacaattttcatatagaaagttttcgcacgaaacacaccgtttagcagtttgaaaaacgtgccacaagtatctaaattttcatccacgagtatctctatctcttctctactctctactgttaacaaattgaagatgtttttgccggtattttgatatgtcatctgtgtatgagttggttctaagttcgttcgcttttagaaatatacaatatacgtatttgagtcggtttttaagtttgttttagaaatgcatatccgtataagaaatctttttacaaaaactcgcatgctaacttgagatgaacaaactcctaactacagctcatgattttctaaaagtatatatatccaagtgaattctcacagtaaatttcaccttaactaaatcatataacaacagccttcactcgttgcaacgcacgatcattttttctagcaagctaatagtaatcggttgggggccatcacatcctaaaacacgtcagggagaacaaggattcctaacacccccggttgtgtctgttccccgcaatgtaccgatgtatggatgtagtttctctgaatgactcgtatacttcagacttcagagacgcaaccagtcacttggtcacacattgctgtgacctggtatgatgttttttttttctaaatatttcaatcctgcagaaagagacaataagaaaccttgtgaagttttggtatattgcagcaagcaatgcccttgctcatttcagtggctaattgtgaatgatttctctcagaatttttcactcttcttttgttgccagtattttcagtcccttgcaacaaagactgaccgccacagaaaaagttcagaacataaacttcacttgtttttatcagagggaacaacaacattctcaagagaacactaccaaaaaaaaatgaattcagaaaattcagacattctcttctcagcagaaggcacgatgtacaattacaaaaaggatagtggagcagcgtagagaactaattatccaagtcgccgatccttgaaggtgattgcgcagcggagagcgatcgaggagaacctagggccttgggggttcggagttttcttctccgacccctcccacaaacaaaaacaaactgttgaatcaaaacatatgtccaagatccaacatttctcgatccttctttattgccggcactcgaccgacctcaccgccgttgtcctctacgacgtacggcgacatggccatgatcagctgctgaaattctaaagtactccctccgtacttaaaaatcgaatctaagactggatgtgatatattctagtacaacgactctggacaaatatatgttgagaggaaggaatcttttacaacctgcatttaaatcccttgcactaagggcctgtttagatctcattctaaaattttacaccatgtcacatcgaacgtttgaacacatgtataaagtattaaatacatgctaaaaaaataactagtttcacatattgcgactacttcgcgagatgaatcttttaagtctaattgctccatgatttaacaatgtggtgctacaataaatatgtgttaatgacagactaattagacaataaattcgtctcacggtttactgacggatattgtaattagtttttttgttagtgcccgaacaccccatacgacactctatataatatccgatgtgacagaccaaaactttgcactcctgaatctaaacacccctaagaggaaagccctgaactgaagtttttatttgcctgctttcagtttctctcaacgaagaagcaaactggtgttgggatcatattcatagggaatgaaatgatctctctgttaaggagaatcgagattatatatatgtggtacaacatcatcataaaatgcaggcatcccatgcactgaagggtgaagactgatcggccactgaaaataattccgaatgcgaccttcattctatcataaaatggaaagaaacataatcaccatagatgaaatttgaggcctcgtttttcagaagaaagtacgcaggcatccacggcggcgatggtgcccaaagcagaggagttttcttctccgtacccccatcaggtcgttgtattgacgaggccgccggcaaggcaatcctgcctgggcttaagtcggttcatgggccgtggcccgtatgtaccacaggtccaggtcgcaacatttgtctcggatcctagccgcacgtcttaatccaacggttcgtgaggccctgagggagttcggagaagaaaactccgaacccctccgtagtccgtacccttcgtctcggttgtgaccgtcgtcaagatcggtgaccgtacggccgatctccgacgaaccttaaacccttacaccggcttgttttctcgattttgcttgctctctgtttgttcttggctgttttctcttaggagaattcctccagtgcgaaaacggcaatttggagaaagaggcgatcgtttcttcaatcctgagtcgttatgatgtttttaatgatgatttcggtgcctaatattgctgctgcaacgtttctgaagatattggtgcttagctcgttcttgagtattgcccaattggcatgtctgcatacagcacatggctatatgacgattagttttgcctttttatcagctatgcattaattcatagatgatgggttgctgatggccatgcctcgttgtttttgcagtttgaacgagccagaatgcctgattgtctctgcacatttgcaaatggcaaattttgttctttcaggcatggttgtagattccagtgaaccctcaactgtttatgacaacgtcgaaatcaggatggtaaaagaaaggaaatacgaagtattttctagctcatcgagcaacaacatgcagcagacatgtccaaggtatgtgacagagcatagtatttttcttttcctagtacagtctacaaatcgtattgttgccctcactattgacctttttttagcaacaacaaaacaattttagcaggtgttcattcgctgacacgagaccacagctccaggtaaacaccaggaacaaattcagcagccagtgtgaggtttcttcagttaacttcctttgttttggcagttcagttaacttgctttgcattgcagtaaggtgccttcagttaatatagctggcaccttgctctgaacaaagacttccatgtcaattccattcttcttgttgcctcgggtaaaaaaaaacagcactctcgtgtacatggattccatcatcatgtaactattatcctatagtgcatacattttcttatattcactgttgagtagatctggatctgagtcaactgtttgagaccatgagcgagattggcttgtagacgccttcctgatcttcctctcatccatcctatgagcaatgatacagtagcacatggaaccaagagttgtaagcatgatcactgcaccgattgccattgtgcaccaagctagccaccagtcgtcgcgcccgacaacaacataggttagtgctatgaaggccaccgagataaagaggcatgccagccacatcagcttgttcatcacaaagaccatccttctcttggctttctgctcaacaacaattagcgaggtctggacgacgacgacagcaagtgagatgaagagagccaaggcatcaaagaccaaaaatactaggaaggccgggttgcttgctacatatgcctgccccaaggacatgcctggaggtgcctgagtgatatcttccacaaaattgccaggaacggtgaaaatggcagcaaaggcgacggtggcaataagcactgcaaccacagtattggagttgatggcattgtttagaccaccaatgtggagtttttcgagtctcttcttgattttctggacttgcatcttggtctgtttagtttgcttgatctgggactggacatcatgtctgatatcactaactgtttgcttaagttgctttgccggattgggtggatgtacttgctcttttgcagttactccaccagcctctctcaagatgttaacaagttcttcattgttgagttgctcagcaatggcaagagcggtgtgccctgatctgttaactgcatttacttcaattccctcaactgatagtagagtctgcactatctgtaaggaattacacatatatcagtcaaagcaaaccttcttgtttctatatgtttgaaatatgatatgcttctttattctttttaaaacttatgtacaggcacctgcatttgttttgaatttgttcataaagaaagcattatcaccattccaatcaaatagaggtatcctacagtaaagttatgataatctctgttctcaaaatactgacataattaaactcagtaaacaggatagcaagtgatttggcaaacaaatagtcatctaaaaagatcgacaaaaacatatagtagcaaggaggtaaaataaaacaaatgaaattcccaatataagatcacctacaacgatattggccttccgtgttgcaacatgcaatggtctgtttcccttgttgtcttccagatgaattactgagatatcaggcttcaacagctcgataacaatttcagcattttgtccttttgaagccatatgtagtgctgtttgccccttcttgtcagttcttaaaccaattcctggatccctacttaataatgatcttacaatttccacatggcccagtcttgcagctgaatgcagaactgtcttcccattatttcttgcaattctcgcaaggtttgcatcagattccagtaggaggttaacaatttcagtgtgacccagaattgcagcagtatccaaagctgtagcatttacagaatttgtagtcattgcaagagcaggaaaagcctgcaacagctccttcagaacttctgaaaaaccaagaaacaaaagaaacgtatgagccaggatttcttttttcttcgttagcaaaatacttaactaaaccatatcttgtacaaatcattgtgatcatgactatagctgtggtttgctggctactagatataactccatgactaaaatgacatgaatttcagtctttcacaagtagaaaacagaatgagatcataaggtcataaaactaataatggttgcacaaaatccaccatcgcgcgaaaggaatactaccatttttttcattgtatatattcttaaataaaccattcaatgtagacacatcgtgaaagcttctttgggtacagaatttgtcaaccctcactaaacaagaccataaatccataatgaaaaactcagcttgcctatcacctaaaaagaaggtatttgcttccttgctggacatgaggtctaaatcaaaccagatgtgagatatgcactagtctcagacatttatgtaaaaaaaagagagaagaaggtaaccacaacgattcatgttagcaatgcacgttgtgaagaaaagaaatgaacaaaagcaaaagcacttgtatatttccataagtcaaatcagacaagttcagcataggatttttcaaagccctacacaatgacacatgcaaattagattaagtcaatgcaaaatcctaatgccataaacctctaatcatcagctcattgacttggcactggcaggctgagatcgaagtcagtcatcactaataacagaaatcaggttcagaaaatgaacaaaaaaaaagaacaaacaaaaaagaagaagaagaagaaagaactgacctagatggccttgcttcgccgcaatatggaacgcgtcgaagctgttgttcgccttgacgccggccgtctgcacgtcggagaccttgaggatctcgcgcaccacgtcggtgtgccccctctcggcggcgacgtacagcggcgtctcgccgtcgtggttggcctgcgcggcgcgctccgccgccacctccgggtcgaactcggcgatgatccgctgcgcgccggcggcgttcccggacctcgcggcgaggtggagcggcgtgtcgccgcgcttcccggggctgtccctgtgcctccggaagttgtccgtggacatcatcttgaagctcttctgcttctccatccccctgaagctcttgagcttctccagcgcgcccaatcggaagctcgtctgcctctccatctccaaatcagaacagattcttcaaaaccgcggaatccaaggtaaatttctgttgcttttggttggtgtggagagatcaaaagcgctcagagattgcaacttgtggagaaagcgctgtgattgatattgcaatctaagaaaagaattcctcactttccagaaatctcctggctttgattcacaagaacattagcagcaagattcgcgcatccccttgggaaaaaaaaactggaatggggggtctgtgaaaatctgcccaccaatcaaaatcattgggccatgaacagagtgcctgataggtgatactccaactgaggaaaaaaaatcagcattttgaccacatgttagaacttagaacacagttgattataacatctcgaagaagcgaaaatggagaagtgaactccaaaccaacaaactaaaaaggacaagaagaagaagaacatgacacttacaaattctatccaccccttagaacgattggaaggcaagaagaaccaatggagccaaagaaaagaaacaaaagaaaccaagtgattgactctagaccttccaatcagccaaagaaaaagaagagaaccaagaaagggtcctagtgggaatcttggacctctcctagctttgatttcttcttcttctttggccctcttctctctctatctccctagagagctcactttcaggctaaactcccctctgcctggcttctcagcacaactgccagaagacaaatatgctgccgcctagcagcagcccaagttggtagagtttggtccctggttttattttttttcctatcttttcttttgtgggggagaaataaattaatgggtcataaataattgtacaacttgccagtccattgttgctattttcactggactgctcatcgttttgttcagtggtagctctatcattaattggtacgggttgattgctttcgtccagcaaatccaggttcgacctcttaacctgctcatattccatctggattaaacgaaatgaagggttggaaaaaatgtggcttctcctatcttaataccattaaatggctagtttcttctagctatcccaacatttgagttctatctttaattcaatcggggggcaataaattacagtactaggtgagagaattattatttttgcatattgttcataagtttttttattgtgcatcttgtagtatttcgctaactactcattttgttgtgtggtgactctatgattaattcaatcaagggcattagatggcacctactaagtgagaaaaaggcaaggatttttttatggtttatattgtccgttacctaaaaaatttgtacctctctgtaaatagttatatttttatgaataaattatggaataatcaacattatatttttataaataccattcgattaagtgcaaaatgatacaagggcacacatgccacgacaaacatgataaacatagtattaattgcagcacattccactgaaaaaggcaagttttcttaaaggcataaaaaagtcaagttacaacgtatactccatccgccaaaaaaaaaaactcaatctagaagcatcccctcctaatataatgaatctaggcaatctagatttgttgtatgtgaccctcttagattgagttttttgggactaggagagtcagactctctccgtcaaaaaatataagagattttaggtgaatatgacacatcatagtaatatgatatatcacatttatctgaaatcccttatattttaaaatgaaagaaatattagcaactaatattaactagtaaacaaaatatagttatcaattaaattgtgcctataagtagacattttcacctaaaatgttaaagaaatattttgcttttctaatgaaagatgcatttctcatgctatatgctttagaacaattttactctgctttatctcttagtgtctgtttttacaatttgtcggcactctcaccatagtggagttagttagtctctcctttatatctctttactttcacaatagtttctctttttttatggtccaatggggcgccaaggcggccatcaaaaaaatcactggttagagtgaaagcaaattaaagcagataaacattttttgctttcctaaaataattcagatcgccatacattacacgtggatggtgtcgacgttttgatttctgccttatccaggacccacctgtctggtatatgtggcactgtcttgtttgatctacgtgtatctgttgccatgtgtgggctcctgcagccgaaagcctccaaaagcataatcacttgagagtagggatgaacatggccatcatcttctcctcttttggatgaaagaatacaaacttgcatgtggctagcatatccctttggcattaaatgataaatatcagaaaataaacataacttttcttctagaaatgactattatctctgatattttgcaataaagttgtgtaaattacggagtaaaagggcctgttcactttgatgaaaaaaaacttaccaatgctaaaattttggcatagttgtcaaaattttggtaacttgataaaattttggcaggatttcttatatagttatcaaaatttgacagcaaactaaatgtagccatttttttagtaactttattaaaactcggtaaagttgaaaatagcatgaagaggcccaaaatctatgtagtttgatgtggtgtgtttgtataagcaacatacaagttaatggtgcagtggacatcatgggagggacttctcttgtcttgtagtaagttcaacaattgatctgccttagagtacattttctcttccctgatttcaacattgttttactaagagcaagtttaattgtgtagctgactattgattccaaaaggatacacatcagcaaagagtaagtgaagagctagaaggatttgtacaatagctggatattgatactgtatttggacaactatcaaaattatattttagctgaattggcaacttactcaccagcaagatgaaggcttgttggtcagccataggttgagcactagtggaccccatggcatgcatgggagcttgtattagcactggcgacaaaataagcgcctacatttctctcttttccatctcaacacaaatataacttatttgttgctatagtttgtttacatagaattattgtgcctgctctaaggctcctatcatttttggtgaaaaattcccacgtgcgaaattaagcctttgttgagcaaacaaattaagaatgcccggtttggttagaggcagaaataagcatgcatatgtacgcaaaagaaatatctggatttgaacagagtaaatcccttttttccagcagtttactcaacatggatatcttaatttgcagccgacgattgcggatcttgcaaattaaggccgctataaatgcaagaaaataaatagatattgcaatgtaatactaaatggcacatgaacaataatcctgatcgaattgaaggtagagaatatatgctgggcagtgtgatcgatcctgtcccatgcgtgcaaagagaggaattcataatttacaattatgcagaatggttagataaacatctggcgatgatcgatgggggtagcatcatgtggtgatgtccccggccttgtgtgcagagcacctaacccggccatccatccctagtccatccagtaataatccatggtgcgctagagacgaattagattagcacctaatgccacactgcaattgtttaatataatcaggcacataggccgcagctaacacccccatcagcacgacaatgacagtattatgatagtatgatatagtggaaaaaaggccacgagcagctagttaatcagttgcacacgtgggtcctgacgagaattaatgtttgtttagaggcaagttgcgtgatatagtagcacacatctataggattaattaagattgagctatctagtgatgaaacgttgttagagctaagctatagcatgacttggaaaaagaaaaccacacttgttcttttagctacaccttgtgtgtatcgatcagtgagctatctagtgaagatgaaggcagccggccggtgttggcgctcatcgatcgaccgactgttatattagcattccaattttgcaagtgtaactgtgtaagatgtgtagtaatataacaaacagttcaccaccggtgaccacccatgggcagatcgatcgcgcaaaaaaaattacacgtcaatatattaattagaagaaaagagtttttgtcacgtaacataatcggccgaaccaacttatatatgcgaggggaagggagcaaagaaaaaaaaaactgaagcttaaaaaactacggtggctaaacacaaatttcaaatagcaggaagatggacagatcaatctgtctcgatcgttcatgcatggacagacaatttaatgtacacagtagctagcttttgtgtgattgtcgcgtacgtccctgggcgccggccaagcttgacccccggccctcttccagttccaggacgacggagacacggagtcaattcagcacgactctcacacgcactgcatatatataccactgtggctagctgcatgcacggtggttgcgccgttgctccactccagtagtactactacgagagctagttgcacttgcaacatcgatcggttggtgatcacttggttggtcgttgggtcctgtacctaggtgtgttcgctggagctagttccaaagcatacacagttcgcacggagtagtctattagagcacccacaatggtaaagtaaggtgctatctataaaacatgtacatctcagcaatagactagattaatagtaaatcacctcaacagtatgtctacatggttatctatagctctctcatgcattgcctcgtttttctctatagactatctctatgttagtagatagctttgctctctctcttcatttaatatcttccaagtaggaaaatatgctgacatggatctcttatagagagcttatagataaccattgtgggtgcccttagcacgcgattaattaagtatttgctaactttttttctcaaaaatggatcaatatgatttttttaagcaactttcgtatagaaactttttttaaaaaatacaccgtttagtagtttgaaaaacgtgcgcacggaaaaaaaaaaagagtggttgggaaaaggggcgtccgaacacagctaacctagctagctacatccccgttctaaaagaaattcatctctctttacaatgaatctaagcaaatatttgttctgatttattcttagaagttaaaaaatagaacgggttcagatttattcttagaagttaattttttagaacggataaagtatattaattactaactgatctgtatgcccaccgtagctgagccatacttgaaaagaagctaatgacgtactgctctctgacatacctacagaggtcgttgtgtgagactcatgtgttagtcatttaaaagcagatgatgctccctccgtgtcataataattttattttttgacttatcctatttgtcctaaaaataagtttatttttttaagtaattattgtattggagccaggaaaagcagagaataattatattagaataaataaaacgaaaaataattgtattaggtttgataaagtatgtgaattcttttttttttggaatatgtgggaagaggaaaataattgaatttattatggcacaaaggaatcaataaattatgtttcccgcaatcatctattttgcgaacgtgcaaaagtattacacgtccattagtccatatattagaacaagaaaagtttaaatacacatcacaatcagccagagtgcccgtgcctccctaaataaaaactgaaaaatggggttttcagttcccctccccaccagtcatcaatctccttgggttttttcagtttctagcaggttaaaatagcggctagccgagcgccgggcgagcgagtgcgagctaccggccggcggccggcggcggcggatcgatcgattgagcgcatcggcgcaggccggttgattttgcagcaagcagattcgcatatacggctcgttgcaggttgcgctttctactgtcaaatcctacagttagctagccaaaccgcaaacggagtgcgacgcaacacgcactgatcagatcagtacgcttttgcccggttgatttgagagtaattgtacgcaactctcgattgatcgtcagctgatgcagtgactgatgcatgatgggtgctaaattacgatatatatcacgttggaaattaaaaagagagagagaaagaagacgatcgatcgtgctcgctcttggatgcttgatggtatttcgtgcccccagtcaactgacaatgtttgatttcctactcttataaaaaggccgtttattttaggtctgtacaattgctcttgctcccagtctcacttcagcttcagcttcagcctgtttaagcagcccggccagcaagtcaaatccatagagtcaacctcgtgggtaaccaatcaacaaccaaacggcctaaattaagttaattacctgacgcataaccatcaaattataatatactcatatagggagtagttaattaatctttgcaagctgaagtagttaattaatctttgcgagctgaagaacaacgactccttaaagaaaacttgaaagcgagcgacttcaggactgaacaaaacaattcagtcaatggcgtggactggaccatccggtcgttaatccatagtagtacgagttctaaacacaattctcctcctccatcgtatgcctaactaatctctaaggacacgtcacatcatcagcatctacactagctagctagctaagctagcggccaattattacaccatggaattccactgcttcttcccaattctaccctgggttcggaagcttcttcggcgccgagcgtacaagcagtttagcacgcaaagcacatgggaattgaagagatgggggcaatggtatatgtatgttaggcatgacacacagataaacagtgtttaacgtacttaattaactaactatttaccactcaacgttgtcggtctctattaagtaacttcggacaattacagtttctttcagaataaaagctcctcaacaatttagttttcattcaaatcctggaaaactatagctgtagaattaagaaaataactagtacaagctagaagcttgttttcctagcttttccagatttttactagcaccaggtacttctcaaaatttttagcttcccaaccgataatgtatcctgattccttgaactaatgcacaaccatatagcacttgccactactgcagggatgcgtatctaccgttaaaaaaactgataataccaaaatcatttttgatagtgcaaagattaataacacatgttaaatttaagagcaaatttctgaaaatataagataagtacaaagagcattaccaaagcatcgtaacattgaactacttgtttgggcccttgacctttgtgacgctttgggcttagggcgtacccgtgcgtgctttgggctttaggccgaaagccttgtggcccaaacaggaacagaatcatagctacctctaacctaataataatgtccttcactccttcatcttcatacattcagttctttcatatatgtgtgtaatgtaataatcacaacttcacaagtacctcaagtttcgtatctgctgtaaccagttagctatatatggatgggttgcatgaagttttatgctaatagtagaaagctatatactatacagtagtacatgccaagatgggcctagttctgacgatgaactttttttttttttttgaaaggaaagctctgatgatgaacataattaacgtttattcagaatcagtggagtcaaattcaggaggctaaagtctcgttgttagtgaatgttatttttatttgttagagcaggtttaatagtggagctagtaagcaccggcgccaatttatatccacgtcatttagagtatcttcacagaatcatttttttatgtgtgtgtgtgaggaccgccaggtttactcccattggaccatactggaataatgacatgcagccgtgtaaaaatcaacagagattagaagtttaatagtatagtcaactactaactccaattcatctatagccaatctaatagctcattcgtacaatagttacatactacactattaatacccggtcccacctgttatacacacactatgtcttggagtccgtactacagctggctataaatttgtagcccgctactcttctctctcatcatttatctttttaaaatatatttgtagctggcttatagcactaccctaggtgcttgcgcttggccggctctcatgcaagcgccggctaccttctctctccaggactctctttcttccatgtagatgtaggttggctattagccggttattatacccgctcttaagctggaagactggaataagacgcataccaaaccatatcactccaggtgacagatggctttggtcacggaggttcatagccagtgctgcttattactcagtctacagtgtaattttgtctagtttcccctcatcgatcttgtattcattcagcttggactattggacattagtttccagaaatgcagagtatatttagttagtcttagacatgactgtcactgtcttttgggatgagcattttttagagtttgttaaccatttagttggtgcacacactactagcaaagtatttcaactagtcgcggttagtcgtatactagccgtaaagtcagtcaaatcactcgactagagggccacgactcgaccaaaaagcaagttgtgcaattagtcttggttattcataaagtcggtcatagattagtcgtgattagttatagcaaatcataatttcaccatgctaattgtcttgttgtgtttagtactttagttttatgtcttgaacttattatcttgctggctactccattgtccatagtttgtaatactatatatagtgcttagtatagtataatggtagtagagactagaactgggacttgggccgtgctttctcaggccagcccacggcacgatggcccagcacgaggaaaagcacgacacggctatgggccaggccggcccgtagttgggccgtgcctgggccaaagttgaggcacgcgctgggcggcatggtacggctattgggccgtgcctgggccggcccagcacgaaaaaaggcccgaaggctggcccagcatgaaaaaggcccgaaggctggcccaacacgaaaaaggcccgaaggccagcccgagctctagccaagccgagcgcccgaggagtcaagagcgcgtgcaattcgggacttccgcgaggagatcaggaggcaggagcgccgagccgctgagcgcatgcatgcgtggtcagacttcagccgacgcattcatatatgggcttcgaccgcgaggagtcgcgttcagccggcggccgcgctgaatactgatcagtaactgatgagccgtgctttcaatctttcagaattcagagagccgtgcatgcatggaaagcatgattttcttggctaattaattctgggatcacttaccattggcgattagtatcgtgtatatccactattagtcaatgaaatttttgttcatggtttttaaactttttaaatggctaatgaaccgcgtccttgttcactgcaacggtgcatgcatggaattatggaaagcatgtaacgcagcaggcgacggcggctcagcggcggcggcggcggctctcggtgtcgacggctggcgcgggcagcgcagcagggagcaggcggtggcggcgcgacgtggccgtgcggaccccggcaaaaaccctaggcacggcacggctcctcctcaggtaatcctaggccgtgcttgggctgacacggcccgaagaggcccgacatgtctttgggccatgcttgggccttatcttctccaccttggcctggcacgacccggcacggcccgttctagcacgaagcacaacgggccgggccgtgctagcccagcatggcccaagtcctagctctagtagagactatataacacatctcatgttttcgtatgagcaagttgtggatttagttcattaacaaggagaagtaatacaacattgatatcatgtgtcagctgcactaatgaccaatgtccctggctccctatgaagttgtatctctcacgtcaacacttaagctacattagaaatacttcctccatcccataatataacatgtgcacgtatttcaatattcaacctttaaatcatttgaccaacacttaatataatatgaaatgaattttatttgttaaaaattatatcattagattgtgatttaaatttactttcatataatcttgttgctacaaactttattgtatatgagaaattataagctaaaaattagttttggagaccgtgccaactttgaccatgctttatattatgggatagagggagtatataagaacaatttatgatacttgatccttcgtgaactgcaagatcttctgtaagatcttcgtgaactcattttgaggatatcgtactattaattatgtataaagttgtgtgttagttttttttttgggaaggggggcatgtgccccttgccatacaattaggtagtagacattaagattaggcaatctaaaacaattaatttccttggttttaattagtagattactaagtggtaatagttattgatatgcatgtggtcatatggtaatttggtttacacgacatcttggtcgttttcatccattaaaagaatgttcctcctatatacccggaaatcttagtatattacgagcacctcgtgtgacacgtctataaccacacactgatatgaaatctgaaacatcaatatgtctcaatgagttcatgactaatcatatcttgatttatgttagtagatatctcattgttcataactagaagatttagatttaatatggtgtttggacttataagagttttatgaatgtaattagcatatgtgaagattgaaaatagacaattaggaacattagaacaccctacaagtgcatctggcccctaagtgggttttgagtgattaacgaaatgtaattagagatctgattgtttcatgaagtaaaagtgcattgttatagtcccgaaaagtttttgagatgaaaaaaacctccaccggcatttaaatttttgcaacttttaagatgtggcaattaaggatttgtcactcacaatttatgacatgtgggccctcgtgtgtatatgacatgtggctccagtgacaaatccttaattgccacttgtaagagtggcaaattgttaaatatctcacgcaattgtggatctctatgatgtgaaaaacagagtcataggattatcatactattaagagaggttcttaatcttagccaaagttcgtatcatgtgctcaattccaatcctttgatatttatcgagagacattaggcaccgcactcacaagggaaaatgagtgattttcttaagtttcgtcggagcgtgtctggtcaaaatgtttggaatctatgttcaaaacatgccgtctcacacttctatgtttttcctaccctgcgtttcaaaaagaccttactatgtgaggttgatacttgagctgataacgaatgattcatatataatgtcaatcactttatattgcaatgtagattgggttgaatgcatgtggtacacaatgacattgtagctctagagcttaagcatcaatgctatgcttgcaaattaaaccaaacatcagtaaacagaatcagaaacctgaacacaagcaaaccaaatcatgaaatcatgatcactgcgccgtacttggcgacgaacgcggcaatgttggcgtcggagctgccagttaagtgtaatacaagctatgtaatgttgatgagtccaaccaacctttccacaactgaatcttgcaagggagtctggtaactggcatttcccaagatgacagacaaaactatcatttattcattttgacaaacgatttcaaattcgacactcagatgacacggaaaattcaggaattctcagctgttaaagctagctcagagtattatgtaccagtagcacaatatgtactacctccggccccaaatatatatttgtccagattcatagctaaatcttgttatattttgggacaaagggagtatcattcgggaacatgcaaggaaaaaagggtaacagagggtgcagacacacacaaaatttttcagttgtttgatggtttgctcgtttaatattcatcaatgaaatttgatgtacaaggggtgtgtcactgataagtgatcttattagcataacgtgtttaactctaacatgagtaattctcagtaatctgtctatgaaatccaaatggttcagagaaggaaccattgcaaaacaaatcataaaaaacacatgtaagtttgacaccatcttgtatatccagcaaggaaataagactattctcatcctgaactctgctggtctcagttttgacctttgccaacaactcaggaaaatgggaaacgttgagcacagtagcaggtacctcaagagcacaattactgattatactgcatgaccttgctggaattgacggtttctgcaccatgttctgagacacagatgatgcatttacccaaaggtataccgtgtttctaccatgtaaatgaaggcaaaacataggtgggataggagccatgcttgcggcacaatgaatcgatggcgtcctctccagcgatttctccaatctcattgagtccaagttcagttgcatgaatccctccagtaatgaatgcagaagcgactctagatgcgtttgcacctttgatgtcgtggtgcagtgaatcacctactgtgatacattcatgaggattaacccctgccagggacattgctgatgtatagatcacctgagaaagcaatatcagattagcacttaggcaaccgaactagatatgttaccgatagatgttaaaattcatgaaggataatcacagaaaaaaaactgaaagttattcaagagaaaaataattacacatggttacaactataggttatcaaacttgtggctcatcataacacatgactgacatttcaacatgttgaagtagctgaaccattcagtaatatatataaaaaaatacatgtcctataccttatcaggcttccccatccatttcacctcaccaccaagactctcgtatttggctgccagagtgcctaaaaggacagattggccatttatgttatattacaacaaatggttgacatagtgaaaagcagtatagctgtagttacagtatgactaaactgatccatgcatcaggggaaaatgattgttattaggtatctgctaaattatcagaatatcatgaaatatgaaacaaagtaacataccaggcatgactcgcagatctcgtgcttcaacagtaacataatcagggttagctactaccattggcagtcgcttttctaggcatagcattagaacctgctcaagctcctcaagacttttgggaagtggatcccctgaaggtagacccagggcctcagtaccatgggctaatataaactctgcctcttcgacattgctcacgacttgcaaaccaaggccctaataggagaaagtaaactgatttcataaagtccattttgaatgcaaatactatcaataataattgtaaaatattttttatctcttgtttgtcattgtcaatattaattcttcaaatatgttaatctgccttactattggattgcaagtttgcaattgcaacatagcccgaacaaattctaatgctaaattgctaatactgcttgaaagagagaaataggaagagagatgtaacaggaacaacaaacctccagagaaattgcgcctcgattgccccatgtcagatggacgcactttcttccaagagctgcaaaccaaggatcatctctcctatagattatttcgaaattcagtgtaagctacaccaagttacctcatataaacatatcactgtaaggagtaatctccaactaagcgaaataaagaactctacttagtatcagaaacattgtttgcttagtgtaatatggtaaggtaactttaattctgatcataatatgcattgcaccccacattcctcaagggggctccactgaaacctatgtcagcagaagatatcaacagcaagaagctcacttctgaaggtactgatgtgtgagttccccgctagtaatggccctgaggaaacaggatgggtcaaaaccaaggctctctagcttctccatggttacagacgacctcctcgacgaattgctaatgattaccatcttcgcccctttctcagcgagcttctccactgcaacagccaaaatgaacctaaatcagtgcattgcatcaacgaaggggaaaatataaactgaacaatatacagtctgtataccaacatacacgcgagaacggcaccagggtaaggcttcttcccatcgtgaagaacaccaaactgatcgaggaaccacgcctgcaagccagccaaatgcagatataaacaaacgagcagcagtggtagtggcaaatgctacgcgcagaggaataaatttctagtcgaaatttccccccgttccctatccataactgaatcgaccgcgtgattcagttccagaactgggaatcccacgaataatcaatggcctactgattgagcaaaagcagcagtaattccgcgcaaagctgcttaattaatggtggtgggggctattaccttgaagcggccggactccgccagtgcccggatcccggccagcctctcgaacgccggcgccgatgccgcggaggccatccacccccaccgccgccgccgccgccgcccgaagcccagcagggaggagggagggaaggggagagaggagagtgggtagaagtccgaaatgggtgaggttcgttgcctttggtgacctgtgggagacacgtagtactgtattacatactgttaattcagaggtttaaaatttaagcaaattttacattgagccacatgtttctctgggaaaaatagagtacgcaatgaaccattttcattagaatgtatccaaaaccttcacatctcgaaccgcttggtcagacacataatcatccacaagtttcagtaaggtgaaacattttcgtcgcaaattcacaatactagaactttaggcgcgcttcgcggcgccctaccatttgttattggtaaaaagtaccacgagtcagaatatatatgtacttatattggtaaatgttgagtacgaaaggacttcattctagcacaggctgtgacataacttgaattccgatgttacatgatgatttgaaatagaccctgaatactataagataaaaaatacctgataatttcagaaaccacaattatttatcatacccaaaagagcaagaaaaggtataataatgtataaaaaacggtttaatcattcatcctcttttaaaagaggttaattcagttccattacggggcatgaatcacaagttgtaatgtgaaggactgtgtttgcaatcacttaagaaaataaatattcttcaatcgcacatggggactctcagaatttgtatgcaccaggtttctggttttcgttgcttgcaaaattaagttgctagcaatcctggaagctgagtagacactttactggtgtgcacgcgcgcacgtttaatgtgacatggagattattacaggcagcacactgtggaaatggcagagttaggtataatggtaaatccctttttccagaattatcagctaaaatccactgctagatgctccctcaatcataccagcttacaaagaacgtctttcggactaatctctgcttgaatatctggtatttggtacataggcctaagaaaaaaaaatcagagagaattgtccatgttctgatttgtgattctgacttctgcagttactaaacataatccaacaaaaaagaaaatattttctatgttctgtaatttgagtcttaattcagattagattgacctgaaatctaaagaggtcatgaatcttcagattttgcatttgattctctgagattatatcaaacagctagatgacaccttaaaaaacacaatgaagcagaatcatccaaaccctgtcctgaccacctccttaaaatatgtaatggagcagagcgacccacagtggtttcatgaagtgaacatctaagcttttggttgttggaactatatacaaacacaaccaaataaaaagatatgcagtacaaatcagaaatactgtagcattcttgataaaaaaaaaggtagactatcatttgcaagggaataatggtatatgaaaaagcaaagctaacgagggaactggaggcaggaaagggaagatacacgccaagcatacataagtgagtgtagaaaggaactggttgtggcttaactcaccaaaagtgaccatgggaaacaaactgcaaatggaccctgggcaaggcaacaacacatggttccaatatcaccagatatggaatcgctaaacagtggtggtgccgcacggccgacggagcttcaagctaaccaacacctacaatattggcaaacttgagcaccttctatggcagcaaccaatcctttttatacagataagacaaaatcaattatcatatttgatattcatatttataattagattgcattctttttctcttttttgaaaaaagattccacttatctagtgaccaacacttcaaagtatcacctagagtagaaggcaaactgaagagaaaaacattgattttaacaatctttcaccttcttgtacatagaaacacaactgtgatgtacattaatcaacgttttcattagccgatgaggacggtaattttaacagagctaggatgatgcaaaataaatggctcagcaaaaaagagtaagttgtgtttcctaggcaagaagttttttggatttaaatcaacagcaactatgaaattgtaagtcccttaaatataattgcatgaaagcacataaaccatttcttgcatacttaattaaactcctactctgaaacattgatatggtgctctgcaatagttctttcaatcttgcaactaatgtcaagcaactttgttatggccttcttgttccatgattcaggtggccttgtaatgctagtatatgaccttcccatcgagaaaatacttagttaatgaggaagaatatccaaagtaagaccaatttcagaatatcaattagacatctaaatgaggccatatgataaagtgcgtgcagtaaaagaggatttctttttttgtcatattaacaaatgatctgtacaggtgctacagcctctaatcctcccatgaatagtttagcttaattagtttattctactgtgcacccatggtaaatttttagaaaggctaactatcacgtcaacagtgaacattagaacagtcattgacagttgcaataacatggagtatgtgcatgaggataactaaggataatggatttaggactaaggttctatgaaccatcatatgatgttcatgtgaacaaatgcacgtaagttcctattatgctgcatcgaaaaaggcaagaagcaacagaagaacttggaaatctggaaaaagcaaagaaaataaaggcaaaggcaacagaagaagatcacctgttcaaaaatatgaaatgtcatcccaattgccttgtggaggtagcaacaaatagacactcaacatttagttatgaaatcaatggcatcttgcttcacagcgtcctatcgtttattgagagcaatataaaccagaagtatatattgtactaatataaattgaagagtaccatatcaaactttatatgcccacgatcatatctatgactgtacataacaatgctattcaaacctgaagaaaaatcagacattcatgataaggctcatagtatcctctagaatcagatcaagtccaaagatagtcattcagatcaatcgataatttttttgattaatttcaattgtaagtggtcagctcaaagtgtcacagcatttacatcattcaatattaagttctggaggtcttcattccaacacagattgtcacaacacctgaattctgacatttgtgtcacttttaggaatagtggttgaattcttcaagatagaaatcactgaagagttagttcagaaattatgaaaacttatcatgcttaacagagaaagacatatcaatgtatataatcaaagatgattttagtgagattcagtttctttaaaaaaaactaatttagttccatcatatgcaaaactaaatttatatgttgcatctcgtgtagctgaaagcatgaataccaagatagaagcatccgcttatgtgaatgaagataaaggaatttatagaacaaccttcgctaagaataattcccaagaaactaaatgatttctagatttggcaatagaacggtcagttgatcatccaaaatactcctcaaagaactaaatgtagcatccaaaactcttctttcactcaaaagaaaaggataatacatctattgaaatataatgtgagaagtaatcagttaaactaccgtagatgtgggtgtcctaaagagtatgtggccacaaaatctgacatcatgttcataaatttctaaagattgggtataaaatgatacatcttaaactgcaatgcaactgcttagcatagtataagatgagaaagcatagccacaaggttgctagatagccaaatctactacacatattaggaagaaacatgccccctatagttttgacatacctgagcaccatatatggtagcaactaaccctttttacatgaataagacaaaaggagtcatcagatttgatatttataataggatgcacttattactctctaaaaaaaggttccacttatctacatgcataacaatacctttgtagagaataaattatatccgatgaagagctatagaaatacaatgcatatttaagctgaaaggagcatagaggacacatacacattaacaacgtacaacacccactaaacctctttgattacatcaagccactgaattatcagttataatctccctcaatcatacaagcttacaaagaatgtttttcagactaatatctgcttgaatatctggtattcggtgcacaatcccaagccaaaaataaaacacagagaaattttcttgttctgatttgtgattcggacttctgcagtcgatctacacatgcggctgttcttcgttcgcgtcattgtgaagcaatcaagcagaagcagtagcatcatattgtccacatcgtcgtcgctgatctggagggcatggccgacccgatctccaccagcaccccaacgtcgttggtaggccgcgccgcccgctggtcgtcggcctcacctggtgcgaggtcgccccgatgccgccggtgccatctccatcaagctccgccggcgtcgtcaaggtcgtcgcggcgtcgtcggcgcggcacagggtacgggggaacccgtccctgccggctcctcctctgcggccgccaccgcctggggagctcgtgcccgccgcagccgcctacgcctgcaggccgccggttcaccgtcgatgcatcctccgccatccacgctgccgcccggatctggatgtcgtcgtcgttgcggtcaatcccatctcgccgagctccggcctcgccgtcgtcaccatctccacccggccggatgacgccggcacctgcctcgccgtctcctgtgccgctgcggggggactcgcctccaccgccgacttgtgcgggtcgccgctgcccggattcctcgctacccctcctgggactccacgatgggcgcccgccggtctccgccgcgttgctcccggcggcgccccgataccgccgccgccggggggacggattccgccctcaccgagcacgagctccctccaccgcctcccgccgtccgccgcctcccgccatccgccttgctacgccggcgccctccgtcggcccgatgcccctggctcctctcataatctcccaaatcaagcgtcggggccagaagatcgatccccacgccatcaatctccatcacagcatcctcggagctagcgcagcaccatccaatcccctgcttgacctcacagagagaggaagagaagggagcaaaggtggggggagcgccaggagcccaggagatggaggaaggcgggggagagcgcgagggatgtcatctgcggtgaggagaagcgggtgagggggagggaagacgatgcagcaccggcggcgccgcaaaggcagggaaagagcaatcgagagaagggtggggtacaatggcggctagggtttcggacaagcgaggggatggaggatggggatgttttcttttgcaagaaaaccctcttactttcttgttttagagcgcgccccctatattcggaatttcttctctttcacatataataataccagtacatagaggaccactacgtaagaatacaaaatacagagaagtacgaccaggcagttaggaatgattatcaaagaaagcgagggtttttttgcaaaattgccagctccagcgcagggtgacgtggatatcaccggaagcgaacacgccagccaaaaaagccccggagcgctgtggtggctccatttcgcggtcccctttaatctctccgatactgtaaccttcacatctcaagtcacttggtcagagaatagaagttctcagcagctagtttcggcacaacacttgaaagctaagaacaagaaggcaggtttgaaaacagattatgctatttcataatctgatcccaaacattcaggtacgctttcagaaataaaggtacaatcggctaggctattacaaagctaacaaggtaatggattcatcccttgcacacaaatggcgatttggggcatgttctgcattaatttaacttatcaattaattcgttgattttatcttcacggtctcccaaatcaccaccaatccaccatccttgtagggtttcttcttcatctgtaacctccttcttgacacttgagcttgaagggcatgaggaagtttgaagcttgtctgaagtgtggaccgactgttgcgatttcatgctcatcttccaaacatatgatgccatgttctcctagagcctgttttcagtgaagtacagatggtgatgttacagtgtacattaccaaaccatgagaaacagctagaagtatcttctttactccaccaaaaaaagggaaaccaaatatccttttttttgttttcctttggagacagaaactgcatctttatgtctgggaagttacaaatgatcgagacggttatcaatgcaaaaatttaagcataacccactatgatttttatacttgtggcaggacaccaaaaattgctccaccgaacaggtgacaatgaagatgatcctaaattaagtcctggtagcattttaaatttgagctcttgaatccaacaaaaatattaattgagattagagaatcagatttcaggcattgttacacctagtgatttttatttttattaattttttttttgtaaactagacctccaaaataagtccacgcaaaaaaaaaaaaaaactgagagctatgtgttattgaaagttccaaatttccatggttaacataaatttttagaaggtgcaacaacagaaataccttcttaaatagatcactgctggtaagccaactttaattctgatcataatatctattgcaccccacattcctcaaggagaccccactgcagcttctgttagcagaagataccgacagctagaagcttagttcttgtgaagatactgatgtgtgagttccccgctagtgatggccccgagaggaaacaagacgagttgtgaaaccaaggctctctagcttctccatggttacagtcgacctccttaacgaattgctaatgataaccatcttcgcccctttcccactgcaacaaccaaaatataacttaaccagtgcatcgcatcagagaaggggaaaaaaaagtaaactgaacactagtgcaacaaccaaatataacttaatcagtgcattgagtcagatgtagaacaaaataagagaaatggatatataagttagagaatataattatatacagtgtgtaccaagatacatacatgcaaggatggcaccaggtaaggcatattcccatggtgaagaacaccaatctggtcgaggaaccacgcctgcaagccagacaaatgcagctttaatcaaacgagcagaagaagtgctagtggtaaatgctagtactacgcgctgggtgggaaatcaactttccccgtaaattttctagccgaaatttcccccaaataattccatatccacccctgaatcgaccgcgtgattcgcagttaccataactaggaaacgcacgagtaatcaatggttaggggaataatcacaagcacaagcgcaactgaatgagcaaaacgagtagtaattccgcgcaggtcggcggttgctaacttgatggataggtgagggggaaaagagagggcataccttgaagcgggcggagtcggcgagtgctcggatccccgtcagcctctcgaacaccggcgccatccaccccgccgcctcctccgccgcctgaagccctgaacaccgcggcggaggagggaagcaaggacagagcggggcgagtccgcgagaggtgagattcgttggtgacttgtgaggggcaaggcagtgaagggacgggacaaaaaactccaaactagaccagcgaatgcatcagaaagttgagaacagcagcaatggcctaatgtttgacaaatttaagtcacttctggatgaaatatttggcaaatgacgaatcagtgaatcatgccgcgtactttctgtcgttgactcagtttaacatgcggtgccaagccgaaatactctccaccctcttggaagcgtcttaccaaaaatggacagtcacgtatcatcagggatttcagggccgggagacgtcgaacgagaccctcagggaacttctctatcggtaaacagttaaaaatctccaattcctcaagagctgtgaagccattcatcccatcgggcagcatctccagcatatccatgcaatacgtagtaagcgatctgagtctgggcagatttcccaggtgcgaaggcagtgccactaaacttcggcaatgtgaaacttccaaattcacaagtgacgtcggcatcttgggtatgtccagtaaattgtcacaatgcgatacttcaaacctctctagttggggcagcggaagggcttcatccgatgatctgcacttcccctccaacttgccacatgcacgaaaagacagatgtcgaaggcaaatcaagcaacggagctcctccattggccactgcacaagatcatcacaaccatggacagtcaaatccttcacaaaagcaaagcactcccagagcccaagatgcacttttgacaaactgcacgttgcgagaacgaagactgccatcatttgcttgtgtcctgtgattatacggcggcggtttggcgcaagctgagacgttggtacaacattaacattgcaatccctgcggaagatggcatgccgcttgcagattggtggatcgcgacaagacggcgttttcagaacacgtataggacggatttcgatagtctgttcatgctaatttgttggcttatctggaaagagcgaaatacaaggatctttcaacacatcgccaagtcggttgaccggctagcggatgacatcaacgaggaaatcgcaatttggagggcagcagggattttttcccatgctagcgagtaatcccgattagaggcgggacttgccccattttttctttttctttccgggcttgagtttgcctgagaccggcgcgacatccttcatgtcgttgtaattaaaactttatttcccccaatcttaatgaaattggccggcctacctttggccgtcccggcaaaaaacaaactgcacgttgctaagaagcagttagaaccacgcagagtcaagctccgtagggcttcgaagggtctacggcttttcttgtcttccagaggcaccatcatgttcgctggtgagctaacatctaagctcacgggagaagcccaacaagggtccaaaggcatcctcatagagtcaatatcacctgctttgtaataaaggtcagacaatgatgtgagatgtgaaagtgagaaaattgagaggctgtgacaccccagagcctccagccttttgagagccgggctttccggaacacttgaaattttcatgcaactcttcaattctaggctttcaagctccgggaaaatgatcacatcattattctccccctcactgttttctgcccacctctccaagttcggtaaaacaaataatatcaactccttcaactttggaaataactgcactggggtgttcccatcaatgttcttacataatgagatcaaactagtcatataagacaaggacaaatactcaagagaggctgatagccacactgttggaatgtccttacatcttggacatcgttcaataatgagcctttttaagcaccggaacatttgagggtctctcatccacactgaggctttacttccaccataaccatataaatccaaaattttaagcttgctgtgaggtttaagagattccaacatttcttcctcattattgtctttgtctccaggcatgtaggatgacatgcagccccaaaataatcgtaatatactcagctcttgtttctgatggagattggcttctttcgcgttcgatgtactctttatttttctcaaattgtacagccccaacatattggtaaggtatctcaactgtttgagctcctcaattcccctgccagcatcggtgtccacgacaaacgttgttagtgtcaatagattgttcagtagactaaaatttgggggcatccgttttaatctatcgcatcccaacagataaaggtggttgagtttccttagatttgccatgccttcaggtaaacattctagatagctgcagccattgagcctcagtgattgtaagttatacaatgcacatattgaatctggcagtctatgtatattagacctagaaaggtcaagatatcataattgttttgtatttatgagatggctagtgataatagaagaatcgtacctacagtgacaccacagtcctctcaacgacctcagttttaacctttctaagaaaaatgacctcagttccaacacttcaagacccctgtataatggtaattccatcaacaaagtgcggagagatgttgtacctttgaatgatccactgatttgttttaattcaccttctgatatttgcacatgccaaacatcttcagatggtgctttctgttgaatcagttcttctgtagttgcacattcacttgaaacgtcttttgctaagtcatgcattaaatcatgcattttacatacaacaaagtcataatctaagcttctgaataatattgttttaacatcttgaagaaatgatctccaaaccaactcattgaaaacaaactcgcctttttgtgacaactcaattgtgccctcttcttgaataaaaccatttgctatccatagttggatcaacatgtccttctccatctcatagtccttgcagaaaattgcacagaaggtgaagcattgtttcatttcagatggcaagtgtttgtagctcaattttagtattgataagatttcgtcttttcctttgacactatcaccaatattacttcttgcgatggcttcccattccttgacttggtgtttggaactcattagaccgcccatcgtcttcagagcaagtggcagccccttgcatttatgtacaatacatttgccaatggtgaccaaatcttcttgctcttgtacgtctctaccaaacgctctcttcgagaacaattcccatgattcatcttcacttagacatgctggcttatagggttgaagggtttccattatagatgccacccgccgattgcgagttgtgatgactataatgctccctggacccccgacagaattcagaagtggccttaggtgttcattccacttgttgtcgtcctcattccatacatcatcaagaacaagtagaaaccttttcctgtcaatgactccttcaagtcgccttcgcaacaactcaattgagtcaggtaggtcacattttctatttgtagccaactcaatgatggatttcacaatagaaataggttcaaagttctccgaaacacagtgccacatcttcagttggaaatgtttctggacaatcggatcgttgtacaccatcttcgcaagcgttgtcttgcccaaaccgcccatccccacgatggggagaacctgcaaattctgttgatcatgctgatccagcatcagtttaaccaacacctccttgtcatgctctcgcccaaatatgtctgctgactcgtccagccccgagtgtgttagccgataaggaagctgtggcgcctctgtgtgctccatcaggccaaacttgttcatctcttcaaccagatcgttgatcttcttgaggacatcgcccagcttcctactcatggtaacacggaacaggagtgggctatgcggcgtgaagtagccgagtaccttgcgggtggtggagtcgccgatcttgacctcgcggcgcagagcctcgtactcgaagtcgtcgaggacgtcgtcggcctcgtaggcgacagccttgaggtccttcatccagcgcttgacggcggggttggtctcgcttagggttgtaagtggctaacccgtgaaacccacttataggctaaaataagccgcgagcccgcttattttgacctataagtaggttcgcggctgacccacttacacccttagtctcgctcttcgccttggcatcggccagcttgcactggacggccagaagctggcgctccagcttgcggcggtcgccgtcgacgccgcacacgcgcgtgacgctctggacgagcgcgttcgccgccttgccagccaccccgcgcaccaccgggaagcgattccgccatgttgcgttctcagctgcaaagcacggtggaatgaatgaagatgaaaggcaaagcatgaagcgctctgggcactctggtccgtaattcaagtgggcatgtttggcccgtatgagtataatatggagaaaatttacaacttgacttacttttgcgtccttctcaaaaaaaaaaaagactaacttttgcgtagtgcattcatgtcgtggaatccaccagtttggttggcagtttcgttgaaatctcctcggccctcgccgtcttttcttatcagcaaaaacatactttgctgaaacaaactggcacggcagtcggcaaatcctgggcttcgaatatgatcctgttgagacgaatgcatcagaattcagaatagcaaaggccaaattttgacaaagtctggatgaaatatttgctaaacatacttccaacgaacaaatcccaaacaaacatgacgaattctcccaaaaaaaaacagagcacgaaaccaaccatttccatgggaatacccaataacgagaacctttacatctcaaaccacttgggtcagatataatcagcaacaagtttcagtaaggcggaaacattttcatcacaatatgccgtagtaccttccaactcaagttacttggtcagagaggttctcaaaagctagattcagtagaatcacttcatcaaaactaagaacgagaaggcgggtaggaaaacagattctgctatttcataatctgagcatgaacactctattaagctttcagaaataaaggtacaatcggctaggctattacaaaactgacaaggtataacggatccatcccttgcacatgaattacgactgggcataggttctgcactaattcaacttctcaattaattcattgattttatcttcgcggttccctgagtcaccaccatccttgaagggtttcttcttcatctgcaacctcctctctggacacttgagcttgaagggcatgaggaaatttgaagcttctctgaagtgtgggccaactgatgcgatttcatgcacaagatcttccaaacatatgatgccatattctcccagagcctgttttcagaaaaaaagcacagatgggtatatttcagtgtacattaccaaaccatgagattgtcttcaacatcgaaaactgaaaccaaatatccttttgttttatttagagactgatgaaaatgtatcttatgtctgggaaattatacataaccgagatgataatcaacacacaaaaaaaagcataaccacagtgatttttacacttgtggaaggagacagaaatagctctaccaaagcagtgcatgcaacaatggaattgatcctaaatgaagtattgtagcatgccaaatttgaggtccagaacccaacaaaactattagccgagattaaagaatcaggtttcagacagcgctacacctagtggttttatataaactatatctccaaaataagccagcccaattcccatgctcattgcaaaatagcctgttgtagacaaatttactaatgccgtgcaacctcaagttttataaggtgtaacaaaacaataccttctcaatgagatcattgctggtaagagggaaaggttccttgtccaggaacccacggcccttcttgtaaataagatccttcacattcttcaaatttgggaacctatattacacaacaataaataaaatttcagcactgcaagctacagatggacaaatcaatatgtttttgtacaaaagaactgttaatagagaagcatgtttgagttcagttacccataagtgataaacggctccacaacaagaagcctcttcatagtagcgtcagtggccttgaggaacacgccggtgaggacctgcgtcagccgcagcttgcgcaaaatcctcctcatgtgtggatgcaagtccattgtgctgcagattacacacaaacaaaattgttaaaattgtgaaccgcaatcatcaccaatgaaaagagacaaaccttgcagaaacaaaaacaagaactcctcatcacttgtactgctgctaaaatacagtaataatactgacccagggatgcgaatcgcgaagacgagcttggagttgagggtctcggcgggggggagcttgcggaccttgaggcgggtcttcatccggacgaagtcgagctccttgttgcggaactccctgacgaagtcctcgggcctcttgatggcgcccttgccgtcgtcgcggcggcgctgcctcttggccgccttccgctcccggttcttgaccgcccagtcctcgttcaccttccgcttcttcagcaccgtctcccgcacgtacggcagctgctgcgtcccctcctccgccatcatcgtcgccgctatctctacgcaagcttcgccctggacgacggcggcggcggcggaacgacgcgagggagaagggtttcggggatcggcggtgtctgggtctcaccgtcttattatggccttttcatctcttactgggccgggctcacgaaagtttaggcccattaatgatgtgtggcccagttgtagtgggcctgttgggctttttcttgctggttggtgtggcccagttgtagtgccggtcaggttgggtcggcggcgatgacacgtacaagaacagtcgtcgtgactcaagacgacgactcactcaaaggcagcggcggcgagccacgcctccgccgctctctcctgctcttcagtcggcgggcgatcgccggcggctcttccggcgaactcgcgagtcgcccccccccacctcccctctagcctgtactaaggaaggtatgtcatgtgaggggtggtctatggtcgccgccgcgccatggccacgagcttttcgtgttgattctagaaggtgcgcttattttctgagtggaatggcgaataagtgcactcggtgatgtcctgtgatttagttgtgcttggaattttgggtgtactgaatactgatgcttatgttcttcttgctgtgtcattcaggcttgtaataatttattggattttgataatttattcgtgcaatatggttcgcggttctgttgatgtggcaatcaaggagatggaggctttatgtatcggacaaaatcaagaaaccaaagtaggtgtgctgcactagtttcatctttggcgtgaattaaattgttttgtgcactaagcaatactgctgaccatgctttgcactaccatgttccataggtgataccgtgataatagatgtgtaacttttgaaaattgggtgccagacaatgatgcgaatgccgtttagaattaacctgttattcagtgtttgcagtgttctcatttattgatattgttagtttggttatgttcatagtttaccttaatatatccttgtaagttgttaccaatggcctgtttgctaatcttttttgttagagatcagaggtaccatttccataccaggagtttgaaagctatatgtatgatttcaatactccacctaatagtaaatgacatttggtttctaggatagctgaacctctcatggcttccatcttttcattggtccttggctcattgcctttctataaatttactttctattaagttaacattattattacttctttggctgcaggaggaagtcggttttgaaacacaggaggcctcattaaaagcaagcaaagttgcagatagcaaaggagctccgtactcaccaccagaaaatgatgatgatgcagaagtggactatccgtctcaagatggagcacaaggtgacaactctgacttgcaagctcttattgctgagttcctcagctagagttgaagcttttgcaattctctttagcacttgctattaaataatctcattccaagttaaaataatctcattgcaaggaacagtaatagctgccaagaagaaaaagaagaaaagcaaagcgaagtaagtttatgttaaattaagccattactgttccttttctttttagaaccatgctttaatttatttattctgtagaaagaagaagggacctcttcagcagacagatcctccatcgatccctgttgatgaactcttcccatcaggagaatttcctgagggtgagatccaacactataaggatgagtaagtatgcatttatcctcataaaatttgtttttttttacgcaatcctcataaaatttgtatataatagcaaacctggcacactaatttcttagccattttcacctctaaaaattcctaatggcaaattcaatggactgtaataacagtgagcatatgtttgcataaattaattgtgctattgctcatcagtaacttatggaggacaactagtgaagaaaagcgggaactggaaagattgcaaaagccaatgtacaatgctgttcgtcgggcagcagaagttcatagacaggtttaaaatttattgatatctttgaatatttgcgaattcatttgaatatgctctatatgttacaactctgaaacatatgttgtggtttgctaggtccggaagtatatgagaagcattttgaagcccgggatgctaatgattgatctatgtgaaactttggaaaacatggtcaggaaacttatcaaggagaatggattggaagctggtattgcctttccaacaggatgctccttgaattggtacggtattccagtattttacatttagtacttcgtaagttccttactctgcattcccttatgaaactaacgaaaacaaaaatgcaatgcttagtgttgcagctcactggactccaaatggtggtgataaaactgtactacaatatgatgatgtgatgaagctggattttgggacacatataaatggtatgtatattgtttgttatacgcgtcagagttttttgtggctttgtccttgaaagtataaagtcacaccttttctactgccaaaaataatttggtatttcgattcttctcagggtacatagttgatagcgcattcactgttgcattcaatcccatgtttgatccattgcttcaagcatcaagagatgccacaaatgctggtgttaaggtaattctctacacttttctgtgcattttctgaagccctcaatatagcaaatcaatgggcttggaaatggccccttaagaaaacacctttgtcatgtcacttgttaagggcttgttttaacggaatccattcatagttgttcattaaactgttagtcaaattgttgtgtagcatttatacagtttttttggctagttattgcatggtgttcttcactactgatttgatggatgtataatgaatctattgttttattttctctaaattgtaatagaatctaccattgtacttcagtagtgttttggttgttcccttcattttaggaagctggaatagatgcacggctatgtgatgttggcgcagcaattcaagaagtcatggaatcatatgaggttgaaattaatggaaaagtattccaaggttagtgctagtgcatctttttcccatttcacactggtaacgtaaagtgataagttgacaacgcaaattaaattattgctatgcggcagtaaaaagtgtgcggaacctcaatggacacggcattgggccataccaaatccattttgggaaatcagttccagttgtgaaaggtggtgaacaaacaaagatggaggagggggaattttatgccattgaaacttttggatctacaggtatgtcaatctatagcttaggttgtcacattactaatagttgaaattcagttttgcatcaaatataacaagtaactactaatatgaccctccttggctaaagtgtagaagttttcaagtgttgaaattatctttttttaaataatgtatatcaatccggcctctatatgttgaagttcttgaagaattttatgcttactgtctgtcataatgtttgcaggaaagggatatgtcagggaagacttagaatgcagccattatatgaagaactttgatgttggccatgtacctttgagggcagcaaaagctaagcaactacttgtgacgataaacaacaatttcggaacacttgccttctgccggaggtatctggaccggcttggtgagaccaagtacctcatggcactgaaaaatctgtgcgatgctggcattgttgaggtatgtatagaagtccattctctactccaatattgttgtaggccttgccataaccatattcgtggttgctcatagttgtatgctttaattgttggcagccatgtcctccaatgtgtgatgtgaggggaagctatgtgtcacaatctgaacacaccattttgctccggccaacctgcaaggaagtcatatccagaggtgatgattattgattgcaatggctgtccctcttgtactggttttgtgagatcattgctcgccattttttattttgggaaacctgtatacactgttgtatgtatcatatgatatcactatcataagataaataatgtgcagtaagcaccgtttgttgctgctgctgcttaccacttggcagttggtactctttaaataatttttagtggaagcttgatactatttcgaagcatagtcttcattttgctggaaatgtgccaatctgttgtattttggtttattggtatgtaggattaccatctaattctgatatgttggcaaaaagtaatagagtttccagagaaaaatgcaatagcaaatttacaatagaagagaagaagcttgaaagaggaggcccatattaaagcccatgaacgaaagcttagcccatctaattggagcccttctatgcctaggcccacctgcagcgagtgatgggggcatctcctgaaaactcgcgcgcatttaactaagggttaccagctcaatataaagtgtgtcttccctccccgccgccgccgcctcgtcgtcgccgctgccgccgccgccgcggccgcgcgagaggaacatccgttggctctagggactcgcgtggaagatggtaactattccttctgatccttccccttctccctagcgtagccggtttctaccgccaaagtgcgggtaggtgttactcatgccagatcggtctcaagatccgggatggtgtgaaggagagctgcgtttgatcttgctttgtgcggcatgtagcttggatattacgctgctgaggagatgccgctttgtctgtggcactctgttccgttatggtgacaggaatgtgggaggagattttgagttggctgttgcttcagtttatgatgttccgtaactttcctgtaaatctgtaattggttgatatgtgccacttgttattctattgctaggttcaatttgaggaacgagtgcttggtagtttttgcttgcagtggttgcccatcgctaccgtgttccgttttctattactccctccgtttcataatgtaagactttctagcactgcctgcatttatatagatgttaatgaatctagacatatattttagattcattaacatctatatgaatatgggcagtgctagaaagtcttacaatttaaaacggaggaagtaataattttatcaggctctgaagtttagttcatcccagattactgtaatatagcaattgttaagtggtatattgactggaaatgaattccaggttgtgtaatctacacccgtttacctagtttgtaggtaggatttctgtatgctcaccaggactagttatgttttcccaatatccctgtcatggaacatttattttcttcatgctactgcttgcgtggtttccttgatgtgcatgtaaatttcaaatgtgatatgatgctagaatggagccgattaatttgttatctactgtcatcctgtgtctaaactctaaactaaacaattattatgattccgtagccaaagcagattcgtgaggtcaaggacttctttctcactgtgagaagaaggatgctcgttcagtgaacatcaagaggagcaaagatgttttcaagttcaaggtcggctgctccaagtacatgtacaccctctgcaccttcgagctgagaaggcaaacaggttgaagcaatttatcccaccaggtttgtaaaaagtggctctagttctgtttagcactatctcatttctgtttgggtatctgagtagtttgtgctggtataaatcttgcttacaattttgttcttcttattgatgggcattctttctctgcaacatgatgctttgttccaatatgtttgttgtttataatgctggtattgcttatatctgttggttgatgtcccagtgacgataaaattttgctccaaagatgattattctctggttttagcttcaagccctctgtcataccattttgacacggatggcttgtggctaaaaccattatcaagaatcatcaatgatggccaataatagctatgagatctgagggacaaccctacagtacaacatattctggtatctcaattctttgttatccttggttcctattgaactggatgtgttattggagatgtcaacacattctggtatctcagttctttgttatccttggtttctcttgaactggatgtgttattggagctgtccccaaggaagataaaaactttgtaccaaatatggatttgcaattagttttagcttcaagccatccttcctaattcatatgatgtgtgtggcttttggttaaaactaggttacgcttttaagttcatcagtgattggcaatagctatgagatccgagggatatgggttatggttttttcagacaaaaaaaaaactattagcagatcaagaaactatttgagctgtcaattctgttttttttttaaaaatagagatgtttttaatgatgtagagattttctttatataaatttctgcatctgataattttgttttcattgatccatgtctgagcgtccaagaggtataaagatacaaaggcaacatcttaatgaagtatccaaggtctttggtgctgagaatgcaaacaagttgaagcaatttctcccaccaggttcacagaaagtgtctggtaagttgatgccctagcgaagataaagttttggtccaaagatgtttggtgtctggttttagcttcaagccttctgtctgaccattttgacaattggatggcttgtggctaaaaccattatcaagaatcatcagtgatggtcaataatagctatgagatccgagggacaactgtacaatataaaatattatgatatttcacctttgttatttgggatgtccccatgaagataaattgtttggacctaagatggatttgcaattagttttagctttaagccatccttttaattcttatgatgcatgtggcttgtcaaaactagttcaatttttaagttcatcagtgatgggcagtagctatgagatttgagggacgtggactatggtcgtttcagacacaaaaggctgtcaccttttgttctctgtctcgttttgtatggtccttcactgttctgaccaagaagctatttgagctgtctgttttgttttgtgaatgcagagttttttttttcatgtaccaaagttttgcatttgatgactttgcattccttggtccaggtttgagcatccaggaggtctgaagacacaaaggcaacatctttagtgtccaagtttctgtctgttagcagttcatgcaatgtgttgaatcttttggactcctaagcaaattagacctgcctgttcttgatctgtaatctccgctttggagaaaaggtgtcttttgccacagttctgtgatgcagattttcagcttattttaacccagcagattttcagcttattttagaaataaactgctttctggataagatttctctcttacagtttacattgcactgaatgaagcttttttttttgtcaaagtaccttctgggatgaaggtgatcaaatgcgatataaaatcgtcctgtgctgctgtcacgtatcaccctgccatatattctgggatctcaatcatggttcatagacgggctacagtgcttcatctttgattctttgtttaacttgtgaatcatgcatggataatataagtagctattaaatccttgattctcactggaagaattgaagctactttggccgtgtttttagtttatttaccggactgtgaaatggattactttgctccatgttttaaaaatatattttcttaaaagtacttcacttagactgcttattttaagctatttattaaatttatttctaaaaactatttaatttattcatatatttaagtagataatccataacaataatctaaggcaaacatcggctattgagagaaatctaactttctctgttttttttcgatgggccggcgaatagctggccgatgtatattaagagtaaaaaagggaatgtacaaggtagcgcggtacgtcaatgcaccaccattatagacataaaaagaaagctaaaatctcacagaatgagttgttacagagtgacatatgaggttaacaagtcgtgcagctatccaagtctctcattcatccgccccaagtcctgcagctatgcaagtctcctgttcatcccccatggaaccgttgccacgatcccttcgaacacccttgtgtttcactctttccaaatcaaccaggttacaaggatcacccccgcatcaatgttttatcgtcaaccttagcaacagatttttgggctgtaagccaccaatcagcaaaatcagccgacggcgctcgcaaaatctgactctgtgatttcttttgtgatgaagttgtactttgggcatgaaaatctttcactatatcgaaatgcacaatttgtaacttcaaactgccatttttcattgtctttgaaaggttaccactttattttattttacaggaggtaaaacaatcctataaactttcagttagtaaagcagcccgatgagatcgacggcgatgttacagtgcgtcgccgtcgtcctgtcgatgtcggccaccggagagaccttcgagcggcggacgatcatgttgtcgcacatgatcccggcgtagtaaccggccagctggtgcctgaccacgtcgaggtacgcgccgccggagctgtaggcgtcgaccgccgcctgggcctcgccggcggcgaggtcgtacatccaccagcactcgagcagcgtcagctcgaggacctggccgtgattctccaggaacttgccgtacacggcggcggcgctggacttcacggtggcggcggcgatgtcgaccgcgatgccggcgagctggtgcacggtggtggccctggcgctccgccggtcggcgctgagcatcttcacgcactcggtgtggttggtgcgcttgcacgtgcgggcgacgaagcgggcgtcgccgacgacggcggaggggagggaggcggcgacggagacgaggacgacgacggcgaggaggacggtgacggcagcagctggtctcgccattgctgaacccaactcagtttgatcgatgaactccttgattaattactctagttcttgtgtttgttgattttgctatgagtgttctagctagtttgtgtatatataggctttgaaaagaatcccaaatataaaaaaactcattaattgaagcatttaatgtttttttcccttagagcaaggtcaatagtatagccaactactgactccaaaacatctatagtcaatctaatagtctattcatacaatagctaactataaaaatatactacatcattaatacctggtcccacctctcatacacacataatatcttggagtccgtgttacagccgactacaaatctgtagcccgctttcttctctcttctctttttttctcgatatatggttatagccagcttatagcctgctattgtacctgctcttatggaatccaaataggagtaatgcctttgagcatccaatttgaggaatttaatactatttggaagaatttagtgtatgtatctttaatgaatttattgccttcaccccctagaaattccaattttcttgaggacttcattgtattttcctcaggaacccaaatgtttgtgtgcatttatttttcgtggaatccaatcttttgctatgaaatttattgtggattttttttctttttgaacccaattatccaaacccaaaccgtgcagaatattaaaaaggtcatatagatagaaagatggtgatttaacattggaagtacacatcttagagggacgtgactatacaggtagtggtagctccatctatgttagaccctatccacatatatttcaaataaaattttctcttaaactactcattcgatcgacgatccgattacaccgttgtgttcgtaataattactccctccgttttttaatagatgatgccattgacttttttttacatgtttgaccattcgtcttattcaaaaaatttacgtaattataatttattttgttatgagttgttttatcactcatagtactttaagtgtgatttatatcttatatatttgcataaaatctttgaataagacaaatgataaaacatgtgagaaaaagtcaacggtgtcatctattaaaaaacggaggcagtaaatctttataacaagatctcacatgattatattttgataaaaaaatataaattacttttataatatatctaaattacttttagatttcactaaattacttcttggatatataaaagtaaattcaataaagcctaaaagtaatttacatatattatagaagtaacttataacaaaaaaataactttaatgcatgcctttttttttattttggacgtgactacacagctagtggtagccggtttgtattccttctagtgtctcatttcaacttgaaaaatgcaatagtatgtatcttttttaatctctttaataacttatatcttttaaatcacatattgtttttaagatatatttatagagagttacttctgaaccatgcaaaagttacttccatttaacattgaagttatttttaaaaattgttaaactttcatgtgttgatctgtgctgattaaatttaatttctagatagtcatatttttatccctacaacaaatttacttctaatgtcgtgacaaagttacttccgttttattttaagttactttttataatatatgtaaattacttttagactttattgaatttacttttatatgtctaagaagtaatttagtcaaacatatgataaaagtaacttacatatgtaataaaagtaatttacaaatataattttatttcatcgtaatataatcatgtaagatcttgttctgaagatttaattgcaatgaacacaattgtgtaattggattgtagatcggataagtaatttgagagaaaattctataaaaaaaaaatagacatgcattgtgtgcactagtaacaactggaccttttctcacgtaactatactagcaacactggaccttctctcacgtactatagcactggaccttttctcacgtatgaatgcatcgctcttttaacactaaatcgagagcgctgtcggtttagattttgcgatcttagagcttatactagttataagtaagattggagctagtagtaaagtataggtaagctctgatccaatattgagcccctgagctttactcctttgcaactatactcctgtgcaaacagttggtgatgattcataactgctgactgaaaatggacgttagatgtctatgatatgatctcgttcagaagcagaactgcagaagcataagggtttgttcggttcatgcatgatcctgccatgatgcatgccatggcatgctcagttcgttgagacacattcagaatatggatggatcaaattgtcagacaactctttttatttaggagtacattttatttccatccaactagatggtttgatatggacacaaaaaatatctgaaactctgtgttgatcgttgttattaatttatctgaaaatcaatacagggatttgatgcacaaatacttgttacaaatttcacaccaagcacaatctatccaaatacaaaaatttggctcatacatagctcattgctaacatctatcatcacttgtacgtaatgggcatccatgtacatcatcggaatttttttccccaatggtttcagaaattacggcgtaggaatgaccagttgagcctcttgatgcgaacgatgcggttgagctcctcgcgaacggagacgagcagcacgtacgcctcacgtgcgccctccacctccacgtccaccacgtgctccaccgtgccggagtcggggtcgtagtagccgccgccgccgtcgaccacccgcacctcgccgccgtcgaccaccgccacctccttctccgtcgtcaccgtgagcagcagcacggccccgtcgtcgtcgacgtactccacgcaccgcaccgcctcgcggacgccgccgccgtcgtggagcgccgccggcaccgtcctctcctccatcagcgggaacacctcgccggcgatctccaggcactcgcgcgcgtcctcctcgtcgtcgtcagggacgaggcggcggcgacaatcctcgcgcgagaagaagagcggcttcccgtcgtactccacgcagtcgcgcacgacgccgccggacgtcgcgacgcgccacctcgtcagctgcggagcgtacagggacgccatggccgcgcgccgccggtgacgccggatcacaccggagaagctaagctaagctaaggatcagcaagtgcaatgcgctctgatcgatggcgacgatgagcttgcgatcgaattgcttgagctctcatcagggccagcatctgaatttatcatgagcaccaaactcagtgtggaattcggagtcggacaccgattccgagacacagtcgatccggcactgccgctcctgtgggacccacataatgtattctcctggagcccatgggcccatgaccagttcagtgccatcttgggcttcgagtttctattctccataggaataagttcatcagaggtcccttaacttatcaacgaatccaattttcgtccttgaccctcaactatcataaccggtgcagataagatccctcggcggtttcgatggtggttttggctaacgtagcgcctacgtggttattttgactcggtcttcatccgacgtggcactgatgtggcgcttaggtggcaattcagtctagaaaaataataaaacctgtgggacccacatgtcagtttcacattcaaaaatatatttaaaaagtgggacccacgtgggccccacatgtcatcctctctgtctatcttttttttttcctttttcattctttttcttcttttaagatggcatccggaggccgatgcgagcgccgcgccggcggagagggcggccgacgggaatggagcgacggccggcaggagggagggagaggagtggcggccggcgggtgggagggagaggaacggcggcgcgcgccgcgctggcggagagggcggtcgataggagcgccacgagggaggaggcgagctcgtcggggcggccggcgggagaagaggcagcacgcgccggccgacgggagggagggagaggagcgggaggtggctccggcggctgtgggcggaagaggaaggggcggcgagaggtggccctggttgcggctgccgttgggagaggagacggcgtcgatggtgaggaggacgctcgcggcgctggagacgcggtcgctaggttggtcgaagggtgagaagggagtggcgggggaggtgacgtcggggcgcactagtcacggtcggcgagcgcggcatgcacgtggcggaccggaccgagaaaggcagcggggacgacgacgagaggagatggagcgcgaatcgggacagtagacggcggcggcgtgaccccggtgtcgaggccgatcgaggtcgagtagcgtgaccccggcgtcaaggtgcgcggcgacggcggtcgcgtccccctcacctgccaactcaggatatctggtggtggtggtggccggcgacgtcacactacccggtctaggaggagcggcggcgcgggcggtcgtcatcgccggagttgcgcggaagatggggagttcttgttgttgccggacgggcggcggccggaggcccggagcagagtagcggagcaggccaactttgccgctatggatcgccgcggccacctcctcgctggccatcccactcgaacgccatcttcgtgcgcgctcgccgcgggccactgtttttctttttatctgaccgacatgtgggccccacattttgtttttattttttatttttatattttacttccagtgccacgtcaccgccacgtaggacgaggaccaagtcaaaccggtcacgtaagcgccatatcagccaaaaccaccatcagaaccactgagggacctgctttgcaccggttttgatagttgagggacctgttgtatctggttttttctggttgaaggacgaaaatcgaattaattgacaagttaagggagcttaagtgaacttattccttctccatatattgggccagatgactaaatgggccggacacagactttctttctgctgctctccctgtggtctactggtctcgtcgcagagcagcagcatggcagttggcctgaatgcaacgcagaatgcttactgtactacttgcttattgcagcatattcattcagggtttcagaaattcagtctcagaatgcaaacagttggattctctagaaatttcaggaccaacacatgtaatcatcgatatgaagcataaatcgcattgggttaaagttcaaagtcaaggatcacaaatttgacaacaaatcacggaaactatcaccagttgttcgagcgtagccagtttgcagtgccatatatactgccatctcttgtttccatcagaacctacaagctaggaggagtaccgattaaacttgctttgtaattgcatcccaccaagatatagttatgaattcatgacgaggagcagcacaaggcttgcattgcatggctgcatcatagcttaccatactccataactgttactcctagcccatccatcatgatgcatatgccttgccatgctctcttcagacttcagatcatggattgattcatcgatcgtttcgtcagaaaccttagttccccaaaaaattttcctaaaaacatcacatcgaatttttgacacatgcatagagtattaaatatagatttaaaaaactaattacgcaattagaggaaagattgcgagacgaatcttttgagcctaattattagttcataattagccataagtgttacagtaacccgcatgtgctaatgacggattaattatgctcaaaagattcgtctcgtggtttccaggcgagttatgaaattagttttttcattcgtatccgaaaaccccttccggcatcctgtcaaacatccaatgtgacaccaaaaacatttttttctcgaactaaatatgcccttattttgatttcccatataggattacttcctagtgccattcaagcaacgatcactgttcagtaacagtacatcatgtcgcactctaaaaagcacataatttatctgaaactctgagtagatctgttgtttctttggagtaacagagattcagacaacagaatgatcaatgcagcacttacaggtaggaaaaagattggatttggggggaattgatgcatgcaagatgggagtagataatgctctgttcagaaagtcagaattccatgcccccacgcatgtgacatgtagcaataccaccatccatatccactgcctactcaagtgttcctcatcaactgccattttctccttattagataatggaataatcctatcaacagtccatggaacacagtaatttcacagtacctacctaccatgacaagtcataaatatttctaaaaacattccggtgttccaaatggcacattaaatcctgaattaatgtgcatgatggatcaatgggacagatctagtacatgattaatatttcaaaacaacaaatttatctgatctgtaaaattatactcctactcctgtttatttcgttacggttgtctgcatgcagtgtgatgcttgcctgtcatccagtgattattgcagaagcagcagcagcatcacattcacatcccacgttggcgccgacatcctgtgcagcagccacatgcgcatgccaaaaccgagaggtattaaaaaggagattaacttagcataaatccaagattaaatccgtttttgtatgcgttgagattggtgggaggctgggagaaagcacatgctcaccaaaccgtttttcagttaagccacagttgttgtgatgtgtgatgatctatatggaccatccatgcagggctaggctgcagccatccatgcatgcatgaaccaatgcaaatgcttttgataatatgcagatctgaactggttaattatttcccagaaagctactacagcctaacatctctcactctcaccatcatgggtgtcacttggttgctttgctgccagactgaaagttttaactgtccagaaactagaagcagtcgagtctgtctaattactcttgtattttggttatgtacttttgatttagatgtagaggctgggttttaatcaattttctaaaaaaatatatacagaaggtattgtacatatggatcaagtggttttacttaactcatctgaaagaatgaacgaattaagcaggtttgttcttggacagtactacagtgatgccttgcaaattgagcaaaggcaggcaaaacaagtacataaatttccccagattaatggagtgagacagctaatagtactattatggtactgttagtaccttgctgccactaattcgaggccattttttatctgactttttgtttcttcgagcacttgggttcagaaccgcatggtttttgtttttcgtttcgagaaaaagtggagctctgttccttgcttttcaagtgaacttctgcaatttccatcctgttctgcttcagaattttatttgtacatacatgaatgtgaaagatatcaaatgtgtacacatgtttgtagtcttgtagagagtatgatcaatgatatcaactagctgctgcattactagaaccacatgcagataaggtcgaactaaaccaaatcaatgataaaattttgagttattaaaactaagtactttggctggtgcaatgatatcgacggctccaatacacgacgacataatacaggcataaaaatactctggcaattagtttaccaaccggcaatgcaaattatacgacagtggttaggagatccctatcaattaatcatcggcagcgactgtattattctgacgcttgaccaaaatgggggctggcctgaacattaatcattttcaggaaaatgtacttatctgaaatctacaaaatatcaatgtgtttggttaaatttaaccctttctataacatggattagttggagtacattacaatctgaagtcaaactggagtactgcagagacagactgtcggtagtccgatttttgattctgcgtacagtcgttgaccaaattagattggaccatttcatggttactgcagtctgcaggagaaagaaaagaacacttgatctgcactcaagcttgggtgcttatcttaagtcacaaccaaccacatcttaatgacctgatgaatatgagatgagcttggtgcttttatgagaaattgacttctcccaggaggtcccaccatgtcagtttctaacccacaaattttgtacaaaaactaaataaattcttgcaaaactcctactattactacaattttcttagacaacagcacacaaaaccttactatatcaaatactctatccgatccaaaatataacaacctaatacaaaataagacacgtcgtactactacgaatctgaacaaaacccttgtctagattaatatttactagtatctttatcttaatttgatcatcccctaaatagagggcatcaagaccaaatacactaatccaacattctgaaattaatcctcatcgatcaaaggtgctccgtcgcttcatgttcaacaagttaattcacactttaaatgttgtatgggttgaactaatagaaatcaatcttgatttgttgtatgcatgtggggcattcacaatgcacatgtactctttacacaaataaaaaaagaagcaatttattaaataattattattttgaaaacatcttagatgatgattaaattgggatgaagggagtagaatatactcctatctctacttcgggtgttatattttaggttggaggaaatagagcttaagcttgtaatatgctccctctatcataaattgtttagaacacgatttttcttttgctttaaatccaagtatgccaggaaatatcgatgatcgatattttgaaagagcaatcgaatctcgttctaaaggtcggatatttatgacgtgtattagggcttttgcattgccattgtttacccaaatgttgtaagcataaaaccatgtcaagattgttttttaacttttgggtgaaaactttcacagttggagcagtaactaaaagaaaaaaaaaaggctttccctttctccaaattgtccttggaactccactttgccccattgaaaacgacgcctgacctcaacaatagcaccacccaggcacccacccactgacttcccgggccccacatgtacaatccctacaatcgagagagagagagagagagagagagagagagagagagctcgaagcttttcccaaataactttgccacagtgcctcctgcttcccccctgtgcttgcagacttgcagcgcagagctcagcgtagcgtgctctcgcctccacactccacaccacaccacagtcgcctctctcctctttcaccgagaagcgaagcgagagagagactggcaccgccgcaagaagccaaccggcgggggagggagaagcagagcaagcggcagaaagaagaatcattggttaggctctgcagaggagaggcggcactgcactggaggtgagaggctgagaacgagaggtagaagaagaatcgggagaaggatcgtcttcacgggaggagcaaggaggggataattaggctcggattgccattaggctgaggggggattcgcgaggcttgtgttgagaggcttgagaggtgtgtgctcgcgtccctctgcttcttcttcttcttctccatcttactgtattctttatgctgcttctagatttgtctcttgtatctgtgatgttgatggagttcgtcagaaatgtcccttcttttcttctcttcctcccatgatttcttcgagcagcatctttctatattctgttctgtttttcccccctctgaagtacgttttggaactatgatgattccataacaagttgctagtcgaagattgcttgttactctatcgatcaatggcagttctgcagctgctgcttaaaatgggttcttttgctcaagatttgattgtgctttctccttctgtatctctgttggtatatagttctgggacaggtccactttgattctatcatgggactcctatttgattgtgtttgaggtcctcactggatctgctcacaccttacttgtactcgtatagtatcccattcggattgaattaaatgcatttcctagaaaaaaaattgctctacttagtccttgctccttgcagcctccatttcgagtacacctctatttattcgatgcttgacttcattccaagcagtattgttgggcagctaggtgtacttgtcttctcctttctgcactcaaaatgttgtagttaatggcacctttcgtgctcattgagtttggtatgctttttatggttcagcaaaatgggagtagcaaattgttgtgctttggtttcaattccagtgacaatttccagccatattactagttagcatttactgacaaaatgcattggtttcgtgttcactgtgagccatcaaaacggtttgtgctaccgacatgttagcctggattgagtttcactgtaaagttgcaacctttattacatttggttgttggtgatttcattttcgttaggactacccaggttgtcgactattaactcattagacttttgtcactttcaagttctaataattctttgaagtcctctgtatgattactgtgatttctgaattgtgcttaacatttgcaggtaatgtgctttagagtcgacagcaatggcttcgctggtacccggggtccttctcaagctccttcagcacatgaacagcgatgttaaagttgccggcgagcaccgttcgtcccttcttcaggtggtcagcattgttccggcccttgcagggagtgatctgtttaccaaccagggtttctatctcaaggtgtccgattcctcgcacgcaacatacgtttccttaccagaagagcagcatgatctcatattgagcgacacaattcagttgggacagttcatccatgtagaccgtcttgaggcagccactccggtgccaatcttgaggggagtcaggccagttccaggtcggcatgcttgtgttggcagtccagaagatcttgtggtaacaaactccacttttctcggaagtaagaaggcacaacaatccatcaacgggtcaaaggatgccagtactttatcactagaaaaggagcagagcaaattggagaaattaaaaccttcagtgaaaaacaatggggcagaaatcaagaaaccacagttaaccaaatcaaactcttctctctcgaaacaagcattgaatagcattatagacaagaaggaagtagtcagctcaaagacaaaacctaccagtgctaggtcgacaccttcatctccgaccagcgtttattctctaccggcatcatttgagagattctcgaatgacataaagcagagaacaaaatcaaaaggagcagataagtcatcaccttctaggctttccttgttagagaaagctgcttctgttttgaaggctactacagcagggaggaagtcctctgcaggtaacttgcttagtaacaccatgtcaagtattgaatcgggaccaaaggccctgagaagaagctgggaagggaatgcagaagcaaagagcaaaggaaattcagattcaaaggcagccaaaactgagaagaagtctgagaatagaagcacatcggtacgtgcggttgttgtcaacgcttatcagttatatttgtctacaaatgtggcgtgatttactttattgagtatccttcatgtagtacttaagctattgccttaagcccttaacacattgtagcctttcagtaacatttgaattcatgtttgatcctttattgcccatcttttttttttccaaagttactaatctttgctggctcttttgttatcagactccaagacgcaaaccactagtagaagagaagccattgcataaggatgacagtaagattcagactcctccaaggaagagctcagcaagtgccccttcagatgattctgagaaaatagtgaataagccttcttctcctttgaggaggacgtctggagtttcaagcaacacaaatattacaaatctagtgaagattgcttcaaacagcaaaaagttgacagatgctagcgcttcatggacatcacttcctccttcacttgctaaattagggaaggtatgaatatgctcattcacatgttcgcataggttggctcattgatgtgttcactatggctgtttgctacaataggtctagcattgcaaaaccttttgcaattttgagggtgctaatttaatttttgtctttgcacaaatatatacttaacaaaagaaacgatggacaagccctgttttactatgtgaaatgatggctccagttcccctgggcatcaacaaagcaattttactataccattttagtcatactgtccagaggattgaaggatgaaagaattggagatcatttttctctgtagctgttgaatgcttcattaatgtcatattgaatatttaattgcatccaacttttcacaggagcttctgaagtacagggatgcagcacaaatggctgctgttgaagctatgcaggaagcttctgctgcagagaacttgcttcgatgtttaaggtaattttttcactgacatatcctttgtgatgttgcaactacaaaatctataatcagcaccatttcaaggtattgccaactcctgatatttcaatgatattgaattgtttctcttgagctattccttgacttcttagtctgatactgatactacctaagtactaaccattagtatttatttccaaattgtgttttgtatgcatagccgtatgcatgtgcatcatcgctgtagttattttgagaaattttgttaactttaaggtgaaaattcttcaagtcaactgcttgcgccacactatgctcattaacttgtttccagcctaaatatgtccttatggtgtgcgtaatatgtgcagctgatatgatctgccttggattttcttttttgtacttagttcaaatttgaacccaaagccaaagatttgaatccaagccctccctatccaaacagggccttgaggattttgttgcctgtcctagcatgttgtatgcttacaacaagcaattttatggataagtttcaagtcccacatggcatctaattattaacatggttgataatcgatggctctcttgatgtttatatcacatgggttctaaaataatcgatgaccaatcggcgtcaggtcgaaatacctcagctatagctgtcaagcaagttgcaatgatattaccaaccaccaattagctccctctccttttgatccatacaaaggcttgattatgtctgcacatgcttggaatttagatttcggattgagcttgtgttcctgagtgctctacggacagattgaacaagttcctggagtccatgctagcaatgcatggaacagccagctgttcttgtctgaataaagctaggctgtatagtgtttatcttctcaaacagtctgaactgctgattcctgtatcttgacaagcattgccagacaagaactcctaacaattcagtacttgtcactgcaatgtactatgaaataaagtagtttgcactttctgctcacacactggtgcttgcagtgctctgacagttctgtgcctagtcacaactcacaaatagtagtactatggtaatgtcaaatgtgaccttttaatctgatcaaaatgtgtgttttactgatggtcccatcactgttactgaataatgcatggctgattgtacagcacaaaagttcagatttctgcaacctttttaccatgcactgttgtagaatttgtgtactcctccctctgtttcaggttataagacgttttgacttttggtcaaagtcaaactattttaagtttgtagaaaaaagtagtaacatcttcgacccaagacaaatttataatgaaaatatattcaattattgatttcggattgagtttaaagcgtcgtatgacctgaaacggagggagtagttaggaatggtgcatttgttgccgaaacaacaactaagaaatgtcctgtcactgttgtgttgatctgaatgcttatcaaatgagcttttatctgatcaaaatgtgtgagttttactgatggatcattgttactgaatgctgcatacggttacttctacagcgcagaagttcagatttctgcaacatttttaccttgcttgtgtcgttactcgttacgttcgttgcagtaataacagctaagaacttacctttcactgttgtgttgatctggatgcagctcgtacgcggaggtgagctcgacggcggaggagcagaacccgcagccggcggtggagcaattcctggctctccatgcagccatgtcccgcgccaccgtcgtcaccgactcgctgaccaaggccacggcgacctcgacggcgacttcaccggaccgatcaacacccagtgaagccgcagccgtcgacgaggagtcccttgccgtcgcggtggagcgccggcgccgggcagcgtcctgggtgggcgccgggctcgccaccgacctctccgcgttctccctttacaacctcaagccgccacccgccattgctgcctccccgctggccgtcgtgctcgtcgacgagtcggcgagaccggcggcggcgacgaaggcgtcgccgcccgcgaagtcgcggctgttcccgcccaaggtcaaggggagggtgggacccgtcgctgcggcagtggcggcggcgcctgtccctccgccggagtgggagaggggaggcggcgcggaggagaggggcgagctggcgaggcggctgggggaggaggcgagggggtggttcctggcgttcgtcgagcggttcctcgacgccgacgtggccgccgccgccgcgccgtgggatcgcgaccgcgccgccaggatgctcccgcagctgaagcgcgtcaacgactggctcagcgagatagcgaagcccacggaaccgccgccgccgcaatccgacgccgacggcgaggaggccggcggcggcgcccccgccgttgcgaatggaggcggcaacaccgtgccggaggagacgatagagcggctgcggaagaagatctacgagtacctcctcaccaacgtcgactcggccgcctccgtgctgggcggcgccggcgcggcagcgaacgggaagagggtctgagcgacatgggccgtcagatcttgcacgaatctcgaggccagcatggggaggcttaactggcctcgcaaatggggtgagttgtggcccgctttcgagttctatctagaatttctgcattctctaaaagagcattctaaaatctaaatttgatgcggaaaatgaaaaagagaaggtaatttgtaatgataatgatgtatacagtaatacaattgattgtttcgattgttgaaatgaaaaaagaaaatgaaagagtaaattacactcgtaatacagggacaacaacttagcacgcaacccttgtcaattccttagattgtcttcctttcttcactttcccaactcatctctttcatttttcctacgccttttcaaattactaaacgtgtttttttttaaaaaaattatatacgaaagttgtcttaaaaatcatatcaattctttttttaaaaaatagctaatccttaatttattatgtgttaatgcatacattgttttacgtatggataggagggattcccaactcctttcgtttattagaacaaacttttcaactaataaacagatttgctagaaaacttacgcaagttttttttcccatctacacatgttgcgcgtaagattttagtgatagcttgtgtagtagttataacgtaattactgtcgaaacaagattttggcaataataaaagggggtgactatcaagctaagaaagtggatgggtttagagacaaggaattttatacaggtttaggccttcttattcaagaagtaataccctactcttgtccggggatgattccgccgagtgtattattgattgtatgattgggagaaaaaaaatcgtcccgagaggaacctggacccctccttatataggggaagggatccgtattataaagtacagtccatatcctaacggaacatgagattacagataaaatacaatcgtaaccgactaggatcccgagtattttcttaacatacaagtttagaatctaacccgagtcctcataaagatattctatctatatttggtaccatatatccagctggaatgtaaccgccatgtagatatggggtaaccataatcttcacagtagcccccgagaccttcgcagttgaccaaaatagtcttctcgaaacaaaaaacaataatccgagtgcttcaattcaacttgctccggcttgccgagtgctaaaagactgcgaagggcgaaaataaaacatggtgcatcgagtagatgcacctaattaggtgtagcccccgactatgtgattagttgaaaaactaaacatatagtcaagaaccgggtgactttatatcgaagcatgcatggtactcaataaaatacccagccgactacttctcacttgaatatatcaaggataaaaaatatgaaaagggccgaatgataaacactcaaaaggtccaaaaatagatatatttggtaggaatccgagtaagaaactcttaaaatgatccaccaaatatgataaaggtcatggtaattaagaagttcattagcctaggctataacccttaccataatcaaaataagcatataacatgataggagaatgactactaataaaccagtcatctcaaattaacccaatagcttttgtagcctaaaaaagcttacaaaaatggtataacacctttctgtcgggcaccttttcatgtgcatcataataattccaaagaattattgaatcgcgttaaaaaggattttaacagcatcgggccgcgtcattgtgagcacatattgccaaagcaaaaggcacctaagtccctagggatcacaatgggccacgctgaaaacataattgggctgaagtactgtacaggcccaagcccattagtactcccgataccctaaagacaccgaagtccaaacgtcgtttcgtcttccctgccgagactctcgccattccccactccgtgctacagtacagaaccgcaccgacgaagctagggttcatcaatctgctccaacccaccctcaaaaacttcacgaaatttctccccgcgtccaccgctccgattccccattcctctccagccatatctcggaccaaattaaaccatccagttcacattcatggcggaagaaagagaaagcttcgaaagtcagtgggcgccctccgatgtgacagaagataacctgaaggagatggtggcgcatggcgttctcccagcgaaggagattatcgggtggcgaccggcgttcggcgaagcattcccgacccccgacacacacgaaatcgtggtattcgctcatttcttctatggcggattttctcttccaacctctagattcttccgggggattctgaacttctacgggattagcttgcatcacttgaatccaaactccatagtgcatattgccaattttatccatgcctgcgaagcttttctgggcattaggcctcatttcgccttgttccgccgcatcttcttcctcaagccccagccaaacaaaagcaaaccatgcgttgttgggggagctggtttccaactcagaggaaccttgagccaaaaatatttctccatgcccttcaaaacctcaaacaaaggctggcatgcaaactggttctatgttcagaatcctgagcccgcactccccgagtactgctgtcttcctccggtttaccaggacacatggaactcattgcctatgggagatgaagctgctcaggcaatggaattgatggaacgcatgctaaaactgaaagaacaaggtttgcagggagaacagatcactcagcacttcatcaaaagtcgattagctccaatcaaagagaggtcccgcacaacttttgagtttgatggcaagcatgatccaaatcaggaagatccagattctcttgactttaaggtcatgaaagaaagaatgtacaagatcttctcaaacgctattgttgtcagctattcacatctgctgcccgttgtgccattcaacgcattcaaccctcctccaccggtatgcactcaaacatttcaaccttcctcaaaagtatgcttttaccctctgttaagctaattgaaagtttgaaatatcatgcccaggaatttgctttgatgaaatcggatcctccaattgctcaacgccgatcacctcgccagcagactggtcaggcgagtggaggaccaaaaattcgatctgacgctcgaccaagtgcttccgatccactgttgaaataatactaacagcataactcaaactcgtaggaagccgtctgacatagatccttccgaaaaggaccccgagccgactgacatagaggcaaacctttcaaaagaaaccgggccagctgcagaagatcgtccgagtgacaaacaaccggcaaccgacaatgtagaagccagcaacgagcccccgactgggaaccagtcggccgaaactgaagtcggtgctaaccaggagcccccgactagaaaccagtcggatgcagggtcaagccaaaagattcccgaagttgaagctcaaacgaacagtccgctcgggaaggatgctgacaatgaatcagaaaccagatctcctgtgaaggcaccaaagtccactcgtccccgaccgggaatcatcacaggtagacatgccatctgaaattattttgatccaacagactttatttggctgcttcatcttcgttcatggatacactagggccaataattggtgatgaagaagagatcctccggatacaagcagctgaggattcacaccctccgattctggtcaagtggtgggatgacaacatgcagcctcaagggatcgtgataaataagcaaaaagaggacgaagagttatgcctactgaagaaggcacttggtcaggcaacccgcattgtaaatgtaagccctctggtacctgatctcaaccatcttgtttgccatttaattcatgcgctaattaaactgtcttgcagaggatttatcttaggaacgaagccaaaacggtaaccttagagaggttagtccctcatctcgggaccctcgaagccaccaggaatcgactgcacgaagcgaaacaacttgccaggaagaatgaacatgatctgagggatcggatcgctgatctccaggaatcaaattttgaactgagtggctcatcaaaaggtacgcacaaactctgctcaactgactcatactgttatctttgcaatcttgattaaccgtaatcaatgtagtgcaagctgccaagatatctcagttggaaaagcagattcaaattctggaaaatgacaaggcagaactggcaaaacaaagagacctggctttaaaggaagttgaaggtatcaacaatcaatacctcaaaagccattatcctccatatgctgacttattaatgtgaatctgttgatgcagaccgcaagatcaaatctcaagctcaattcgacgtcctggttggcaagatcaaaaaacttgagggagcccgggatgaggttgctaacgctgctgccccaattgttcaaccgatgttcttcaataacaacggcccgagtgcacttgatgcttctgaaattttcgacaagctgagagttgctccggatacatatttcaagaacatcaaagaagctggaagtatgggagcaagtctggcgttggcgatgaccaaatccctttatccaagagttgatattgatgccattgatggctttgcagacgggatgagcgaagaagctgctcttgacctcatcagtgatgcgcagaaagcggctgacaaaattgctgctgatgtagttgagagattccaagatgtcgaccttcggccgactgggtctgataagtctgatgatgaaaaaactgatactgattaatgtaccaatgattttgacgattaatgatgatggaggcacaatttgtacaatactgatgaatttatgctatgcttaatatcttaacttagttcctgatttcttaaaagtttttgtcgaaccttgttgagcctaaaacccgcaaaagttgttaaaaaactttcagtcctcattgactaagccaagaaatcaaacagggcaatgatacatcaagtaagcaaattgaattgataaaaatcacactccattattattatagtagccccctgactgaaaacttcaagaaaaaacttgaagttagcagtcaaagaggaaagatacaaacgaaatgcctaagcgtaaaattgacgaaggtgttcaatattccaagaattgttgatgagagtaccgtcttcgcgcttgagtcgataagaacccggccgagtgacttcagcaattatgaacggtccttcccataagggagataatttatgccgatcctgtgttgtttgaattttccgtagaaccaggtcaccgactaaaaaggctcgcgatcgaacattccgattatgataacggcgcaacgcttgcaaatatcgagtcgactgaattaaagctgcttctcgggcttcttctagtcggttgatgttgtctactcggccctcttcatagccctcctcattgaagttccgaaatcgtagtgattcaaattccacttcactcggcaacattgcttctgcgccataaaccaaaaagaacggcgactggccggtagcccgactaggagtagtgcgtaaagaccaaagtacggacggcagctgatctacccacttgccagcataggggcgtagtcggtcaaaaactcgtgctttgatcccttgcagtatcatgccgttagcgcgctcgacttgtccgttactcatagggtgtgccacggaggcgtaacaaattttaatgccgaagtcttcacaaaagtctttaaacgctccgccaatgaattgagtgccattatcagtgatgatccgattgggtaccccaaaccgatgcacaatgttgatgaaaaaatctctagctttatctgctgtgatcgtaatgaccggtttagcctcaatccacttggagaatttgtcgatagtcacaaagagatgcgtgtaaccgccgactgcccttttaaatgggccgaccatgtcaagcccccagaccgcaaacggccaggacaacgggatggtttgcaattcttgggctggcaaatgagtttgtctggcaaaaaattgacaaccttcgcatgtccacacaatcttgtccgcatcggacacagctgtaggccagaaaaaaccttgccggtaagctttgccgacaatggtccgtgcagcagcatgattaccacaaataccagaatgtatatccttcaacaattgtctcccttcctccaaagatacacagcgctgcagtattcctgatggacttttcttgtacagtttagcttcatgaataatgtaaagtctgctgcgcctggaaatccgctcggcttcatttttgtcttgagggagttcttgtttggtcaaaaattttatgaggggttctctccagtcggcttcaatcatgcttacgccttgagtatccatggcttcaattgcttcttttctgggcacggttggttcataaagatgctcaacgaacacatcagaaggggctgcttcccgttttgaactaaaattggccaatctatcggctgccttattgttatgtcgaaggacatgggtgagctcgaatccatcgaatttatcttccaacttgcgtacctcttgtcggtaagcggtcatattatcatctagacatgaccactctttcatgacttgattaacaaccaactgagagtctccacggacgattaatcggcgaatgcctaaagagattgcaatccttaatccatggagtagcgcctcgtattccgccacgttatgggacgcagaaaagtgtatccacaatacgtagctcaatctttctccagtcggggaaatcaagacgaccccagctccagtgcctgtgagcctctttgacccatcaaaatgcatagtccaatattccatcttttcctctggcatgtcttcttggcactcggtccactcggcaatgaaatcagctaaagcttgtgacttgatcgaagttcgtggcttgaacgatatgtccaaatacatcaactctaaggcccacttcgcgatccgtccatttgcttcgcgattgtgaagtatatccccgagtggaaacgatgtgactaccgtgaccgggtgactttgaaagtagtgagataatttcctgacggtaattagggcaccatatagtaacttttgaacctgaggatatcttgtcttggagtcggctaaaacctcgctaacgaaataaattggacgttagactttttgaacatggccttcctcttcacgctcgacaaccaggaccgcactcataacctgggaggtcgccgacacatataatagtagcggctcttgcggatgtggcgaggccaaaactggtggagtggtgaggagtttcttgaagtcttcaaaggctttctgtgcttcgggcccccactggaaattgtcagtcttcttcagcagcttgaagaaaggcatcccccgctcgccgagtcgtgaaacgaaccggctgagcgccgccatgcaaccagtcagcttttggacgtctttttgggagcttggcggtttcatgttgaggatggcgttgattttctccgggttggcatgtatgcctctttgagataccataaatccgagcaatttccccgacggtactccgaagatgcacttttccgggttcagtttcatcttgaaagcacgaatgcttgtaaaagtttcttctaaatccgcaatcaggtcatccttctgcttggtcttgacgactacatcatcaacataagcttcaacattgcgaccgatctgagttgaaaaacatctttgaatcatgcgttgataggtcgctcctacattcttcaatccaaagggcatggtgatgtagcagtaggccccaaagggcgtaataaacgaggtcttcaagcagtcggattcttttagttggatctgatgatatcccgagtaacagtccaggaagctaagtaactcgcagccggccgttgagtcaaccacctggtcaatgcgaggtaacccaaaagggtctttgggacaagatttgttgaggtcggtataatcgacacacatgcgccattgccccgtctttttccgaactaggactgggttagccagccagtcgggatgaaggacttccttaatgaagcctgctgctaacagcttggttaattcctccttgatcgcatccttcctgtcctgttcaaaacggcggagtcgttgcttgatgggtttggcgtcttccttaacatgtaaagagtgctcaatcacctctctagggataccaggcatatcggatggtttccacgcaaaaatatctttattattctgaagaaaggtgatgagcgcgctttcctatttacaatctaactcagcgcctattacatcagtcttatcaggatcggagggatctaggggaatctttttcgtcttggcatcactttcttcggtcttcgtcagcttggttgcaggcacttctcgctcgcttgccgtggtcgcagccagtcggatctcttcgcgggcgagagcagtctcgtgggtttgggccatctcgcaactttctttgtcgcatgtgacggcctgcttgatgtcgctccgtagtgatatgactcctcgaggaccaggcatcttcatcatcatgtaggtgtagtgtgggacggccataaatttagctaaagccggtcgtccaagtatagcatgatatgctgtctcgaaatcagcaacttcgaaacaaacattttctgtgcgaaaattctcccgagtgccgaaggtaactggaagagtgatctggccgagtggtgtagctgacaatcctgggataacaccgtggaagggtgcattactcggctttaattccgtgcgaggaatctgcatatcgtccagggtcttagcgaaaaggatgttgagtgcgctgccaccatcgatgagagtccgtcggagcttgacattgcgaaccactgggtctagtactagggggtatcgccccgggtggaccactcggtcgggatgatccgagcggtcgaacttaattgctatctctgaccaccgaagatattggggcatgttaggctgaaccgcatttatctcccgttctgtcagcttttgttttctcttagactcataagccaggggtccgccgaagatgtgattaagttctttgcgatgatcttgaaaaccagtcggggcatcgtcttcatcatctttcttctttgatgtgccttgatctccgtctgaaggtttacgtgcgttcttgacgtattgctctgcgaactgtttgtagacgaagcaatctttggccacgtggttggagttgggatgatgcggacattgggagttcattatcttgtcgaaggtgttgacgcggggacgttgtcgggaagatagagaggtggtcgccacaggttcttcgggcttacgcttgcgatccttgtggttgttacttccactccctcctacagtcggcgtgtccttctttggcttccaagtggtgcccgactgtttggacgtggtgatagcatcttcggctttggcatactcgttggctttttcgaacatctgcttaaccgtcctgggaggtttacgtccgaacttgccgactaggtcctcgtggcgaatgcctttagtgaaggcggtgatgatgacgtcgtcggtgatgtcggagatcttgttgcgttgttcggagaagcgtcggatgtaatctcgaagggattctccagacttctgaacgacgttgtagagatcaaactgtgtgccgaggcgttcgaaggtgccctagaagttagcgatgaagtaatcacgaagttccgcccatgatccgatcgtgccacggggtagtccgtggagccaggatcgggcggagtccgctagggccacaggtagatagtttgctcattgttatgtcgaaggacattttaattatactatcattatatctgaaagttttttttactaaaaatacttgcggcagatttttaagatattctcactaataaaattgtgccatccctctcactacacacagagcgggcaacgagacgcacatgcagttgctagctatcaacggtaccgagatagagtattattaggtactactccacagagtgttagtttagtgatattatacctcctaaatcccgattagcactagaaatacctcgacctcataataccttttgaagaaccgaaaatttcccttttcctactgtttctgattttacactaagcacattatgttcattcggcaacccttgtcggttccttagaacaactacatgacagaactaataaaattttgttttttttttaaactaggaagcagagctcccccaatttcattaagaaaaatgagagctacaaaagtctttacatgctacttaaagcagtctaataataaaattttgtactcaacacataacatacttgcccacaatctacagccgaaaagaattaatggtccctctagatcgatatactgtatggtaaatcatttgcttcatcatccttcttgtaaaagatgtggaaaaccagaagaggatgtatatatatatatattcctatgcatgctttcactcatcatcaagacctggtatgtacaataagttgacgtcgaacataactgggctgcttggagccactcttggccttccaggagctgaagtaaggcccttcggaaatgctagctgttcagatcaagaaaaacacgaaaaatcaaattatcaccctcctttcaaatctctgtgctaagaggggaaaaatgatgccatagcaatggctgcaattgtctggccccaaatttaccacatctttcattttctcttgcataatatttgttgacattggggagtttaggctacttaccgggccaggtatgtataatcgccgtagtcctccaaccttcattgacaatatcccttcatcaagtccctttatcacctaatgtttaccaccacaaatggatgaaagaaaattgaattgtttttaaagcattttagttagaaggcgcataatgtgttttccagagggtagtttggttactgatagtgtaccaaacattttcttgcaaaattacatatggtgaattcatgttttattaataatacgaactatacatttttcacgtagcattatgtatgttacattagtgtatttcatgtgcaatttacacattagacataccaagagttttaatttgaaaaccaaaaaccagacgttaaccgacatgttccaaaaacttgttagcagcttgttaccctcaattactagtttaataaaatattttggattcaatctttttccagataaaagtggtaagcggtcggttaccctttctcaaagggaccagttggtattttgttctgaaactaatattcaaaacctttgttcgtactctttaacatttaagttttaaatattaattcaaattgttctgggctggtataccgatagccagtcgatggcttaggatcggtaagtaccagtaaccagccgagattttgattcattgtacaaacacgatcaaatatataaactgtatatgactgtaaattgtatatttacagtcatctacagttcatatatttgatcagtttgtaattttattactcacatttcagtggtaatatttcagaacacaggctaccaagtaccaacaggaatatgtagggaaaaaaaataaatacctgtcctgaaccaacacggaatatgtagggctgccccttttccagagaactgtatacaacacagacacacaagaaaatttcagcttgcagcttgcaagtgtacttgaacagcatcaacttaatctcgcctatataaaagatggttagtttggcatcaaaagctcagttcgcacctgtcaaatatctgtccattcggtaccatggcaacataatttgcagcaacctaaatggtaatcaaagagagaaaaaaagaaacagattaagaacatgatcatgaacatctgcactgtgagaaatcaagtgagcacctggaagccaatgggtggacttgggccttcacccactttgatatccttgtactgaagaccagactctgtagtcaccatgggcaccttgggaatgcatcatgatgagttagttgctgagattagcattgattagatgattaacatttactaatctcatcgctaaacatgatcatgtatgtaatcatgcatagctcaagcagggttgaaaacttgaaatgttcctaaccagaaaacagatcgatcaccctggcaagaaagaaatttcaggtaaattttttttaaaaaaaatcgatcagagtaagtacattttcgaggtccttctcgcaggcggcgtcgcagagcttgggcttctcctcgggaggcagcccggcggcgagggcatcatcgaacgcggccaggccgagcgccagcgccgacgatacccccacggcgactccaagaacgctcctcctccgggaccgggtggcgctggtacagaccacgccgccgtcatccactccgcgctgctgcggcggcggcgccgttcccgcctcaccggcggcctcgcacctgcagcagcagcagaagcatcgccgcgccgctgaactcagcgccctgctgcccctgaacgccctgccgtcgggaagccacggtttggaggaagggagcgggcggcgggccgaggggaggaggagcggcgaggcggtggcggtggaggaggacgaagcggttgcagccatggtggaagaagaaggaagaggagaggaagacgaaggaattaagcaggtacggatcaggagacgtgggagaggaggagaatggatagcgcaacgacgcatcgcatcgcatactgggctttgcgcgcggtccgcctccaccactcgctgcgtcgggtcaaactgaaatctttcgggtgctgctggtccacgtgtcactcacagagggtttcgatctccatctcgcctgcaactgcaaaccacctcgctggctgcctcggcagcatttttcaccgtagtccacgaggtgtaaaataagaacgtattatgggatcccccatctctatcataagacagtcacaaaattaatttggagagaaacttcagctcgatcaggtcaagcggagattgtggtgcgtcatgctacctgtgaataatctcaagttctgaactctaaacaagtggttatcacaagttagaagaaatacagtaagaattctgaagattaatttgcctgtattcattggtgtcacggtgactctggtattggaacatttctttgcagtaggtagtagcaccatgccaagccatcagattatttttcataagagtgaaatgcacatacagtccttaaactggtacggatatatcatttaggtccctaaactctcaaaatgaatttttggatcccaaacttgtaatgagtgtcatataagtccaaacgggctccaactcgctccgtgagatgacgtggcatgccacggtaacgcttacgtgccagtggatccacatgtcagtcatataaaaaaataaataagagaggagagagagagagagaagaaaatgatgtttttaattttgaaaaaaacaaatgaaaaaagagaggagaaaaaaatatgtcatgtggttgacatatggggtccactgacacgtaggcgtcaccatgtcatgccacgtcagcacacggagcgggttggaacacttttggatctatatgacatccgagacaagttgagggataaaaaattcattttgagagttcagggacctagttaacacacccacgtaagtttaaagactgccgtgcactttactcttttcataattatactttcgataataacatgtgtaaactgtcagacagaaaacacatgatcagagagtaaaaacacaactgcatacattgcaaatttgcgattatgcagctcaatcgctggttcgtaatccctactaccaccgtagggtttattcttctgacataaaacataaaaacatggccagattgcagggcttggccgaattattgtacaaacatcatcatcctggtagtaatatatatagttgatgcgatcaaacaagctattcgagtcaccagacgttctaataaatactccctaaatatttgacaccgttgattttttttaaacatgtttgaccgtttgtcttattaaaaacttttgtgaaatatataaaactatatgtatacataaaagtatatttaacaaagaatcaaatgataggaaaagaattaataattacttaaattttttaaataagatgaacggtcaaacatatttaaaaaagtcaacgacgtcaaatattcaaggagggagggagtagtagtgtaaggtttttccaagtgatagaaagtgatgatgggactcctgacagcgtggtgccaatgatactctgctgatattgagcttcctctcacattatctaattaaactgagcttcctctcaagtacagcaaccaaccagttgcatatgttgtcagtgaactgaaaataggctctcctggaagctgcactgaatatgaaggtggttgaaacggtgcagaatccaaacgcaaatcccagcagagtaaacatgtatgtcagcgtgtcaaaaatctcatgatgtttgtgtttgtcgctgtccttgtggcagcttcttgtaagtggagccccacagagatcttcatttcccaaaaaagagtctccttcaaaagtcataagttggtttccatatggtatctttcctgagaggtggttgtaggatagattcaggaagctcaaaaataacagtgacttcatgctctgaggaattgggcctgatagatcattccatgagagatcaagtgattctaaccaggccagatttccgattgtttcaggaatacttccctcaatgtgattccttgatagatttaaggacgctagtctgtaaagatttcctatttcactgggtatctccccggttaaatggttctctgaaagatcaatactggtaaggaggaatgatatcacgaaagtaagtctgtaacctctgaaggttgcctgtaaagtatctttgtacacagaaaagtaagcgcccccaacgccataaaccatgaattggaaaaaaggcgatgagtcccattctagatttcgtgagagaaaggacgttagttttcccagagaacgtggtatagagccagagagtttgttgttactaagatccagatattgaagggcatgaagttgggataattcttcaggtatttcaccggaaaactgatttgaccctaaaatcagaagtagtagagtttgtaggccattgcctatccatgttggtatgtatcctgacaaattattctctccaacgtcaaggactaacaatcttttacatgactgcaatgaggtgggcaacaatccagataagctgttcttgctgagatgcaatgctgtaagggaacttagagagcccatagtggatggtatttcaccccaaaaattattgctggagaagtctatgacatacatactggaattcatacgccaacaatttggaagttcccctgaaagattgttattggatatgtcaatcagttccattgatattatgtcacatagatatgccgggattactccactgagagaattatgagagagcgacaggtattgcaattctttgtctccaaagctttgtggtaatgatccagacaagttgttgtgggatagatccagcactcgaacactatttggcatatcaggaatgtatccctcaagttgattatgcctaatgttcagagttatcagcatttttgatcgcaccaaacttgcaggcaactcaccagttatgttgttcatcgagacatttaagctagccattggcgaagagaagttccagatccaatctggcaatgcacccctgatgcctgcactgccaagatcaatcatcttgattctagtttgtgattgcagccaggttggaaactgtggtccaaccaggcaaccatgcagtcctagctttgtgagctgaaagggtggaaaccagctatgcttgactacaaccttgaaagaatttgatgctaaaactaaagcatccaatcttgataaattggtaaagtggagttctgataattcaccaataagtttgttgaaggaaatatccaagtatgtcaagttcgatagcctgctaatgctagttggtaatactccagataatgaattctcactgagatcaagaacttctagacttgccatgtgctcgcaccaaccagatagctgtccagttaatttgttatcagcaaggttaaggatctgcaacttcttcatgcagggaaacatgctccttgctgcttctgagagatttcctgacaaaatgtttctagaaagatctatgtgaactaagttgcataatctgctcattgaacgtggtattgctccattcagcttgttgttccctagtccaataaactgtagtgctgctagtttccctagctcatcaggaatcctgcctgaaagttcacaactagacaggtccaaatctgaaagggaagatagattccaaatccaatctggtaaggaagaattcagttcattattcttgagatcaattactttaagggcagtgaagttgatctgagaaacagaattaaggtccgtagctggaaggcttgcatcattcaagcgaagcacttccagcaaatgaagcatattcacagcctgcagccaatccacagaagcagcaaggtacaaccaactaaggtcgagatacctcagggaagttagcttcgaaacccactggaaatcgtccgcagtgatcacatgagaaccagatgagctcagatcaagaaagctgagccttgacaagttgccaagctgaggagggacagtcccaccaaaaccagcatgcgagagatcaagatacctcaacatcttgaaacagccgatgaattctgggatgggcaccccaccgaagtcactttgactcaggttgaggtacaccaatcttgtcagaccagacaacgatggattgatctgaccattgagagtgtactcgccgaggtccagcttgatgacatggccagtcttcttgctgcagctgacaccactccagctgcaacagttctcgccatgccatgagtgtagccgcccatcaggatccttgatactggtgttgaaggcaaccaaagcatccctctctgtggagatgcacgcagctatctccctgaaattgatggttaagcacaacagagccaaagccataagcaatccattcatagtattttccatgttggtggataaaactgtcagtactcagtagctggtggtagaatagagaagataggtcgagttgcacctaattggataaatggaagtgctgagatgaagacttgaccagttgacctgatgacctctggtcttcgctgctagtctagtctttctgcatttttagtcatctgaaaaacttgctttcctgtgtattaattgcattttgcagtaactggcctttttggcttgacggccagggaggaactgcaattaccgatcgagaaaagggtgtacacaagggatatgtttgctgagattaaagcagtaccacctgtacactctgggaggttacaaacttacaattactgcactctaatattttttttgattgaaaatactatcaggccttgcctatatattaaaggacaaagagcattctttactgcactcaatattataattcactcaagaaaaaccaatgttgtggtcagcctacccaggttcaattcaagtcgtaggattggctaggatgatgtagagctcatgtttagttttcagataaaaaaggcaagttcttactcaatttgcttttatacttggattcacaaattgatctcctcttcccgggaaaatctacatcttgctcattcatatttattggcctgaaatttctggtagatctaagcacggcattctcagcctgactaacatctcagaaaatgcaaatgttactgaaacataaaccaaccccctcctgctaagagcctaaggcactagggtagtgaagtgaactaaactacgaaaggattggcactaacgaatttatagcgggatgtacagtaatccggaaacagtaaatcgtagagaggaagaagcctgtgcggccataaacctgaaacccgaactcccaaacccctagttgcgtacctcgcagcggagaccactccacgctccgccgccggagacgtcagccggcaagccgccacggcgaacaggcagcacggtgttggagaccagtttgccgccgtatccgctccacgggtagctcggcgaggatgagggcagagcctactgtcggaagcggcgcttcggttgagggatcttcaggtgagggtacctgcggcggtgaccggtggagctacgcctggagcggcggccgccggcggcacatgctcgccctattctattcgagaatttttttcggttttagattttttttaaaaaaatatttacagaaataatctatcggctaaaaaaattacaaaaatagaccctgccgcccacctctggggcggcaagctgacgtggcaaacgggggaggaacgggcggtgacggagggagggtttttttgcaggaaaacccttgccgccctctggtggggcggcaaggggcccgaatacaaaaaagccagtcggggctggctattttgcaggcggccccttgccgccctctggccggacggcaggcctcgctgcctataaaaggcctgctgcccagcccccagccctcattcttctctccttaattccagtgaaaaaaaaagaagagaggggaggagaagagaagaaggggcgaagccctgccggattcagacgccgatttcaggtaatattcatagatcctatatgtgactattgagttaaatagtgtgtgttctttaaaaatttgtttgaataaatgcattatttttttgggttttagttgtactaatctagaagtgcgtattgtagatatcggtaactacgtagatctgctagtttggaatcaatacattaccgttgcattggcttacacaagaagatattacgttgtagatgtttattgcatgaaagagtaatatgatctagttatttcgttgacagatatgtcgaacaaacaaatattccaagtttaccatggaccaggaaacgtccgttacgggccaactggggtagatctgtcagattttattgtatcagaaaggggaattgatagaccagctgagaggagtgtaccttctataaaaggatggttaatgaggggcttgagagttgatccacagacaagtgacataacaatcaatgttatagtaagtcggacaactaagggtttttattgggaactaatgccagttcaaaactctcgagtgtggagatggtatttggaaaatgcattgcaacgcaagtggcctctagctttggttccgtttgttcacccgaaggatccaggtgtgcagatgaacatggatgatggcgagggaccaagtgctgaagtaaacgagacttctgtggaggaggtcaacgcacgagaggacgggggcgtagtagctccagtgggcattcaaccaggtggagtggccgacgagggggagactgtcggtgccattgtggatgaaatggagagggaggattctgacaacgagcgtgtagaggaaggtgattcgtcagatgatgagacggatattaatccagcagaatgggctagtgaggatttttctgggctgatcgtctctgaagaggatagtgtgagatgggagtacaaagaaaatgatgttattcagggagcgatttatagtagagcagaagatatgaaggaggcggtaaaacattttgcagtgtcacttcatagagagtttagggttgccaagtcgaaccggtcgcaatatgaagttcggtgtgttaaggaaaaagatggttgtccctggagagtgcacgcgtataaggggaaatggaaggattattggacagtgtcagtcgttaccaagcatacatgttttctacctggtaatgttatgttatattattgaactctacatatatgttaaattgcacgtcatcgttatgtaccattagtaacgtttgctatatttaaatagcctgtactcttgttgtacataattaatctcatgattttattactatttcataattttgcaagttatcttttgttttacattactattttttgaattgttctaacacgaaacactatatttttcagagatggcacatcaggatacacctcagttgttggacccggcgatagatcaccgacaccagtctcaccttactgcggtgcagggggctcagcttgggacgttccgggcacggacgtgcggtgagctactcacggttcacgactcctttgtcgagaggtacgaacagtgttttactataagttagttgcactgtaatattttttataatgacatattaatttgttattgcaggctacgtgaggccggcctcctaccgatgtgtcggctggtggaggctgcggccggcgacgcggacccggccagacgatggactgtggacaggtccctcctagcagctttggtcgattgatggaggccagagacgcacacttttcacttgctgtgcggtgaggtagcccctaccctacaggacgtatcgtacttgttggggctaccgctcgcgggagacgctgttgggccagggaccacggctatggactggaaggatgatctgacggcacgtttcgcactagtacagcgcgcaccgcacctcccgctcgagccgttggcacaccaccgcaacaccggacctacgaagaggtggctgcttcagttcaccgtgagtgtttttgtaccgaaatgacaatcgtattacatatttagtccgcagttaaggtgcctaacattttatcgactgcttgcaggttgagcagctacaggcggaggccgacgagtactcctacagccgatgtttggaggcgtacttgctctggctttttggctgggtgatgttctgtggcggtcacgggcacgcggtcgacaagggactcgtgcactacgccaggagcatcgctgacgccgcggtaggcgaggtgcctcagtggagctggggttccgcgttgttggcggctctgtaccgtgcactttgtgagtcttgcacgaagacggatcccagcgcgacctttggtgggtgccctctctttctttctatctgggcagctgagaggattgcgatcggccgccctgaggtggaccagcacgcgtacgaggagtcactgtacgaggagcaaccagaggtcgactaccctacgatgggtactctgtggtgccgtcgtcaggtacgttgcatcgatcttatcgtattgttaagttaattgctaagttcattgtacatcacatcgatcgtctcgtattgcagcgccgatgggctcacgtccaggttaggcggtcgtatcttgagtttgttatggagttcgaccgccttctgccgactgacgtcgtgtgggagccctacagtgccgcggctacccaggctcgtgcgctgttgggtctgtccacactctgcaccagggaccaggcgtactggatgactacggttccgatggtcttcgacatctgcgttgagcttcacgcccctttccgcagttcggcttccgtcagccctttccagtaccgtttccgaccaccgtcccagctgctgttcaccggtaagatcttgcactacgctttccgttgttgcattaaaatctgcctgttcacaataatttgtaacatctgtcgtttcacactaatattacacattaattcgcaggtactcgcgcaagggtcagcagtcagctggcgactggcccgccaagttggcgacttttgttgaggactggttgctcgcaaccgaggaggtcgtggaccacgagggagagccacacactgaggagtcgtaccaggcctacctacgctggtaccagccacgcacccgtactagggtcaccttcgctcccttggagcagcagccccaagttgcgagcactagagacctctatgccaggcaccgcgaccaggacttcgctcgtgctgtgagtaccctgcatcgcaccattcctttatgttttcatgtctttctcttcgtcaaattttacgaatatttacgtacaaattaaccatgcaggtcgacgacatcaaccgggtcgtcgttgatggttcaacgacgatccaacgtttaggcgcggggattccggtacccgtagaggagcacctgacgacgtacacgcggatggtggagtcgatgcgctcgcttctccgagtgctcacctgtcgtgccgacgacgttgctcgggcagacgcagctgtatagcggccacccgtacagactggtccccgtccagctgcgcacgttcctaggccgactccccctccgcacggaggtaagtatttttattactatttctgtacatgcctcgcacatataagtgagccgtttcacttgccgattgcttcagggtttcgtgcaccgttcagcaccccgccttcctcggctaggccttctgttgtgccccccacaggtacttaaaaaaacaacattacttcgacaatcaatttacatacattttatgtcttagcttacaagggtcccgttgtcgatgtgtaggtttcgcccagttcgctatgacgcaggccgcccacttctcccaggctgcagggtcagcgtcacaggcagccggcacgtcgagtcagggtccaccactggaccatgttgggacctcatcggaccgcttgctgccttccaccgtgctcttcgacatcactgacttcgacttcgcttcaggctcgtcagaggacgtcattggcccctcacagctgggaggcgcaccgccggtgcagacgcaggaccaggcgcaggccactcctccgcgggacactcgtgctacccgtgctgtgccaccggatcgtttcacctactcccaggaccacgtgcgagcacaggcccggaggaccaagcgtggtcgcagcgcggggcagggccagtagagcagtcttctctttgtttacttgcttcactttccagtactgtatgcttgtgtaatgactacgttgttgttatatgtgcacgatacctttcggtgcatgcacgactactttctgccgcaccgatgcagcctcctttattcgcgtgtgatacgagtatttgcccgccatttggcgcatacgaccaatgtaactttcggcgccgatcatgcatgtatctttcggcgccaatcaggcgtacccaccataccccaccacgttcacatgtcaggggtatcactcgattttttgcgcctatataagtcgccttaacgagtgaggcctcacaatctttcagaactcagtcacattcagtactctcttccccacttgcttcattacaaatccgaccggctttcgtcaatggctagacgccggggtgttgaggatccaaactggcgtagcgatccttgtgtatacctactaccaccttggtgccagcgtcctctctgcctatgcggtgatcgatgccaactaatggcttcgaggaatcctgatattcaaggaaggcgcttttttaggtgccctaactatgaccgtgaggtattttattatctgcatatgcttattcattctgtatgggcaatcgctttattcttcgtaacactactctattcggcagacccgcactacggcttgtgcatacatcgagtggatcgatacaaaaaatcccgttctcgacctaaccacttgtttacaagaaggtcgctggtatttcgcatccgaaagtaatgagcaatacttacagagaaaagcggcttatgaacgacaatgtcgtgaacaacagagcgactggcgggtgctaactacggcactccctccatgggaagcttgtccaagatgcaggtgtggtgatcgttgtcaggtttttcgttccataaatcctacaacattgggttgaaggttctttgtttgtccaaatattcttgacgacgatttcatggtaagaatattttgattacatgaatccttattttctcacaacatttactaactttgcttgctttacatctattctttcctcctaggaaccaccaaggagatgtcaatacagagaatggatagacaccagaagggttctaactccacctagccgtgttgtgcagcttgaactaccagagcaatacagggttactaaagcgcggtttgagagaggagagggatcctcacgtatgggttagctattatcggacaacttggcatattgaaatttctactgtcatgcttccttgtcccattactacatcgtcgttgtgttcaactattgcactacctccctcctagttcgaatctaatatcatctatgtaaccgcaatgcaaatagtcgtatcatgttcaaattgtactactatttcttcatgttacataattctccttgtttaagtccatataatgtttatacgacccagactgtgataggcctatataaattatccgagtactaatacgtcgaataaggtacaaaataatacctcacttaacatatgaaattacgcaacaaccaacttcaatacatttttataacaatattaacaagttttaccaataaatacttctttatttattattaacataacatagaaaaatcttttggccgtacttttttcatctggggacccagatgaaaaagtacggccgcaagctctttatgggcggccaaaattgcaattagccccttgccgccctctgtatgggcggcaagggcctaatcgcaattttggccgacggcgcggtcgacccaccgtctgccacgtcagcttgccgcccaccattagggcggcaggggctatttctgcaattttttttggtcgatagattatttctgtaaatatttaaaaaaaatctaaaaacgaaaaaaattctactattcgatattgggcttcccgttcatgggccttcaagttaagcagtttctacttggaaaaagtatactttgactccctcaactatcgcccgagtatgattcatatcctccaaccacaaaccgggtatataaccggtgcaaacaatgtccctcggtggttttggaggtggttttggctgacgtggcgcctacgtggtggtcttgactgaatctttgtcctacatggagcttacgtggcattaaaataaaaacaataattaaaaaaaatgtaggacacatatgtcattcacacaaaaaaatattgtgggacccactgacatgtggaacccatatgtcatcctccctcattcccttcttcctccccctctctctcccttatagctctcgggagcggcggcgggccgacggctgtggcgatggggacgaggcgaaggggagtggtggcggcggcgatggcggtggggtcgaggcagaggtcggggagcggcggcggctatggcggtcgggagcggcggcggcggcggtctgggagtggcggtggagagcggcggcgatggggagaggcggcagtggggacgaggcgaaggggagcagtggcggtggggacgaggtgaaggggagcggcggcggtggggacgaggggaaggggagaggcggcggtggggatgaggcgaaggggagtggcggcgactgtgagtgtggggagcggc

SEQ ID NO: 9958 - DNA, 1327 bp, Oryza sativa
gttcatcaaaatttcagaacagaacgtcaagttgatgccttattccaaccattcaaagagtagcgtgagtataaacgaggatctgtcagccaatagctcgattattgccggagtccccaaaattcacacacaaaataaacaactgactcaagctggaaatcctcatattcttcacctaccgagccaccgatgtgtttcgcagctactatgatcaatcgtgtcgtccagatagaggacacgtcggtagtggcggcggcggcagctcagatcgaggaccggtgacggagcttatctatggcgcccctcggcggcgactcataatgaatgaagccgccccaccggcgacagttcagatcaacaactcccctcggcagcgcggtggcgcagactgaggacaaccccggcggtggggagtggaaaaaggttttgacgacaacggcggaagcgccggggtggtggcttgaggaagaggcgcccacgaaggcgatgtgtttgggcaccgcaatgcccaagccgcacgacgacacagcactagctgctgcagcaaagcaaaaccacacccacgacgacgcggcggcggtagcggcagcggcggtggcggaaaccaaacgaccgaaaaaaaaaacccaaatggctcgcccgcgatcgccagcgcggctgctctcaacctcgacggcgacgcccacctcttcacgtcgccatcaaaccgagcacacaggaggaaaaaaaaccgagcgattcgattcgcgagggaaaagcatcgaagcttatttgcgggggtgaagccaaaaaaaaaatgttccaaatccacaggacgaatctctcaaccagacgacctcgagacgcaagcctcccctcccaaatggcggcggctgaggcgtaggcggcggcgagcgaggccaacgaacggaagggacgatgaaccgaccgcgccgcgaagaaatctctgaaatctcgtggattcggtggggggagaaatcgatcaatctgtggagacaacgtgtcagagaaagagaaaaaaaaactggtaaccacagcgtgtagctgtagcataccacctcctccttcgacaccagccaaatcatacactgcagcgcacgatccatctcattcacacaaagcaaagcaaatccccggttcaggaagcaggccccacacgccatggccccaccaccactgacacgcgacgaaaacattggtctcgctctcacgcgcccacctgcccatgttagcggagcagacattttacctcgaacatgccgcggagacagctcatccatgatttcctcccccccctcccccccgatttctccatcggattctaaaa

SEQ ID NO: 9959 - DNA, 22220 bp, Oryza sativa
cagcgtcatctattaaaaaacgaagggagtagaatatatatagattcattagcatctatatgaatatgaacaatgctaaaaagtttacattgtgaaacggagggagtaaacgttacactaactatatatattaatccatgtcgacactccatgtgcatgcatgtacgttgtttaataatgctttaatcaacaaatcaatcacattcatcaaggcatccaacaggagaaatagttacatactaaatacaacgaacaccaactcgcgtcgcgatcttcctgtataattggtcttcaataattgtatatatatacacccgatctagttagtcaaaagagtaattgattattgccttattgtcttaataaagaaaaagtctaaatacccttaaaactttaataaaagtccatcttacctaaattgtaatcattcatatgaccttaagatgattttacaaagtggtttttatttaattcttttcagaaataaagtacaaatgcattcactaataagagatgcgcactttccctgtaagtacacacgtacactgtaccctacccttatgagcaactccaaaagactaggttaatatatcttgatattgataaagtaaccacgcagttgtttgtgtcagcggccacgtcacaaaccattgaatgaataaatcgcataaatactagcacgcatgccaaatctagtacttcaacccacataagtatgttgcgccacaagaaacccaattatgttggatcaatttgactatttgacatatgcattagatatatgttaaaatctctacctaaatatttctgtttagtcatatgtttgctctctcttaatatcaatataatactagaataacatcactgtaagcataaattgagaatcgaggattgactatgtgtaaataaatatgttatattcattatttaaaaccgtccgtttaagtgtccaaatccacaaaaccgccgttcaaaaccaacttaaggtgtaatataaacaatactataaagtttagagattggatgtccagttctaacgtacgttcagtgtactaggtagattttcatccaaaatttatggagtatatggacttattcctctcaataattaatgcaacgttcttgctgtaattcccattatttatagaaaataatttggactacaaaaagaaataattgagggtaattaatataatcgtccggacatcgtgcgtacgcctacaaaagaagactctagctaattaagagctgtccacaccatgcatccgtccgcatataccctgtcaacaatgtcagacttaatttttgactttattttttcagaacactctatatatatatgacaccgatgatcgatggctttgggtgcctccctttgcctgccttcattcgtgaattaaaagctttgggtgcacattgccttcaaagttcaaacggtgcaagggcagggcaggtacgtagctctctggcctgtgggctgctggtttcttcctccacacctctaaaaagtactactttttttctactgtattgcttaggccatttcttgtaagcacttaggttgtgttattccccttctttcccaactcaactatctttttcttccatgtaagcttttcaaactgctaatggtacgttcttggtaaaagttttctgaagttgctttaaaaaatcatattaatttattttttattttttttgctaatacttaattaattacgtgttaatctcagccttagtatttgttaacaggttgtagcatgtaggatttaattctttcataattaaataaataatctatcagtttccatttagaatgctggctaattctttaattcttatgtttctcttgatccatgcttcattactactagctattgttatttgggttcatctgttgctcggtcgaggctactctcactggtcagaaatctaagcttcattgaggaagcaccggtggtaagtgtacaactaacccaacacaagtcggttactaattattatattaaccgcctaaatttctcctaaaaaataagcaccattttaaaactctaataaataaacaccttaatttggctatttgcaggaccaaagagaggcatgtcgacgatggtggtgagcgcatacaagggggtgattgactctgttcttgcaaagctcagagagctgatgggaggggacatgtgtgccaacctcataggcgtgtccagcagggacattttgttcctcagggatgagctgcctgccatgagtgctctcctggagaagctggatgatgccgaagaactcgattcggaggcgaaaaattggaggaaccaagtgagggagatgacctacgacatcgaggactgcatcgatgatttcagtaacaacatcacaagcgtagacgctaagacggggttcctctacaaggcttcccaatttctcaagacttgcagggctcatcttgaggctgcctggcaaatcaaagagctcaagactcgtctacaggagataaacgagcggcgtaagaggtacaaggttggacattacatctctaatactacctcagtgacagttgaccctcgcatctcggcattctataaggagacagccggccttgtaggcattgacagcccaaagagagagctcactaaattggtgatggacgaagagacgcaattgaaggttatgtcaatagttggatttggaggcctaggcaagaccaccctagctagtcaggtgtatcgtgaagttggagtgcagttcaactgtaaggcatttgtatctgtttctcaaaaaccagacatggtaaggctactcacaagtttgctgttacaactcaagcaacatccctctcatgcttgtggggtgcaagaactcatcgacaatctcagggaatatctaatggataaaaggtagatattcacattatttattcagtttctaggaataaattaacgtcttatcatactagttctttctttaactaaataataaaacttctaggaaattaatttcttttcctcctaagtattaggtcaaaatatgcgtgcacacctttagatttccacaaaagcttggatttcttgtttcaaaaaatttaagacccgttaacacatacttaatttgactagttttaggaacagaggacacaaatgaaattaaattttacttactaaggatcatctataaatggtgcacattcatgctactacctccatccaaaaaaactagcaaatttcagatagattagtactcaacacaaattaccgttgtacccctgtttaatgttgtttctaatgactcaacatcactctcaattcaccatgcatgcaaataaaaagaaaaggttcagccaattagtccacctaattagcattctcaaattaactagttgggtcctaccttgctagaaacacaaatttttggtgcacattttgaatggtagaaatacatttaaagatattaattgatgattttagtgtctatgtatttatatggtcacatttgactttgatggtttttctgtccatcaataaggtaaagctcgaattaattaattgctcaattatttcctacatactgtacatttgtatatttgaaaaatagttgcatatttaatacaagtattcgcttcaaatataaagatgaatataatgtactcctctccatccaaaaaaaataaggatttctaggttgtttagcaaatattaaagtaaaggataatagagtttagtattcctcttaaatgagggatggattggagtgggagggtgtttgaggttaaagatggtgaaaattgattgagatgattgatgggatacatagtagaatgcttatatttgtagataaatttcaaaatctgggaatttttatatttatggacagaggaaatagaatctagtttccaattgcacgagctttgattttgctaaatctatttaaaagcgagtgtttaattattccttgcaatttaatatgtaccgcacgtgaaatgtttttgtaggtacttcattgtagttgatgatttgtgggatgttccttcatggaatattattacatgtgcttttccacaaaataatcaacatagcagagttataataactacaagacacggggatgtggctaggacatgttccagtgaccatggaagcattaacaatatgaagcccctaagtgcccaaaactcaagagaactattcttcaacagaatatttgggtctaaagattattgtccctcttacttggaagaagtctcatgtaaaatactgaagaagtgtggtggcctaccgcttgcaattgttactgtagctagtattttagcttgccaacccacaagactgaaggaggaatgggagtacattcaaagttctctagccactaacaaatttgcaaggaagtccaccttggaagacatgatgcaaatcttggagctcagctacaagagtctgccacatcatctcaaagcatgctttctttatcttggtgcttacccagaggattgtgtgattagcaaggttgatcttattaaaaggtgggtagcagaaggttttgtgagtcactctcctgggcaagatgcatgggttgttgcagagagctatttcaatgagctggtgaatagaagcatgattcaacttccatatcagggctactacaatgaagtatctcattgcaaggttcatgatatgatgctagacatgattctaatgaggtgcaaggaagataatttcatcagtgtgatacaagatccacgagcggcgatagaagttcaagacaagattcgtcggctcaccattgacttgaatggtgccatgggtgacacaatggatatgaacattactaggaaagtgtcacaagttcgttctcttggtgtatttggaggatcaaagtggatacctcctttgttggagtttaagtttctgcgggtgttattccttgaattctttctacgagagatgataattgacctcactggtatcaaccaactgtcccagctgagatatttaaaggttgaatgcaaggaatgcctaatggatggtgacataccatcacaagtttccatagtgttaccaagtcaaatccgaaggctacaacatttggaaaccttggagttaccctgggtatcaaaatgcagcatcccatcaatatcaggcatcattgatttgccgcgcttgacccatctagtgttgcgacagcataaggggggattaccggatgggattagaaaattgaagtcattgcgcactttgcatggctttaatctaccagtaagctcattggaaaatattgatgccctgggtgagctcactagtctagcagatatgtcactccattgtggcaaacaagacacaaaatctactactccaggatggatgactgctctgagttgttccatcgagaaactcggtaatctcaaaggtctttatgtgaggtctaatagtcctagctgttgcgccgatgcgatgagcagctggttttcacctccatttctcaaccttgagaagcttgatctgctagattggacattctccaaagttcctagatggattggccaactccatagcctccgtgagttggcacttgggggcaagaagatactccaggaagatgttagtatgatcggcacaatgctacccttcctcacccatctaagcctacgtattgttacatgcaatatcgcggtgaaggaaagcaggatcatgatagaaggctccataggattcgctgctctccggtttttctgttttgactctaataggatgtcacacctagagtttggggtaggtgctatgccccagctcaagaggctgctattagcacttgatccatgggaatgggatgaggccacacctgttggacttaaacacctcttgtacctcgaggaaatacgagtattgacagcatcaacagctgttgcttctgcaggatctgaatcaatgaatggcaagtctgcactagtcaagggtgtgttccatgatgccgctaatgctctccagagtcgcccagcatttaccgtgctcccaaggatccgttctctctctgatcacgtaaattgttgtaaaattaatatggaaacagttgcatgtaagtaggatttttagggaatgtatatgtaattgttgtagcaagatttgttcttgttccaactgaacatggttgttaatgttcttacttgtaattgtaagttctaatcttacatcaaaaggatgcttagcctaacacatgatcaccaagataatctaatgtggaatttggtgcactggccggtgtcaattggagccacaagggtatcgtcttcctctgttcttctggctcatgagatgttgatgttcttagctacctgtgtacttgaggtacctcgaacatgatatcgtctgcttgaagcaaagatgttgcaggtgattgtcctccgtggggccgaaggggttgcggttgattgatgtccttcgctactacagatcaatgatgccgaaggcattctagtgatcggtgttcctcccaatgtcactacctacatgggacaagagtctgatcaccatggaatcttcttccacggtttcgtaggattgaatgtttcagggtttatgggagagaacgtgcaagagtgaccactatccatgggaactcacttaaatatcatagtggataactacgggaaactccatttagaaagattttaacacgtttctaatcattccgtgtttgcgaatgtcattgatcatgttcatgttttccagccagttaggcccaattgatgagcatatgtcactaattgcctagcctaccactataccatagtgtcggccatgctcccacccaatcccttccctaagctcactccaaccagtagcgttgtctcgtcctttcctctcctctcctctcctctcctctcctctcctggctgaattcaagtcagtggcaagcgattggcttcccaaaccctctttagcccaccacaaccaacaacctacatatgggccaaagtaccaaagctcaactacacgaagcattaaggcctattatggcctgaagttaccgggacaacgaaccaagacctactccgcaaagacttcaagcccacgataaggtaggctcaaccgctacctccatctttccccatgcactagggctagggcaccacattttcttgttggaaataagtctattttgcatcccttaaatatttcccttggtccaatcacatctctcaaccgcaaaaccacaacctccctcattgccccttcatctgtgtcgctggccctccatgtcacatgtcgccgtcggcccttcacgccctgtgacgtgaaacataagcatgcatagtgccactgccgccgtggagcagtgaggagagccactgccgccatggaagagtgagaagagggattcggcaccgacgaagtcagagacgagaagcttctcgagacacgcccgctcctctcggtcgacggctaacgcaagcgcctccgatccaaccgctgcgacatccgcacggggaggaggacgcccacagcaaccactgttgtgttcaccgtaaggtcctgcatcgcaccaccaccaccgagcacacagcacggggatctggtcatgtgtaatgggaatggtgctcgtcgggtagagcgggtgaccggtgcaaccgcgtgacagcgacgaggcacgaccgctcctctcagtcagccgctagcgccaacgcctctgccgcctccacctcctccaccgctggccatgccgacatcgatcggcgtcacggcatcacctccttgaccaacccatctaccatgtcaaacgttgctacttccaccatggacgccgtgccatccacatggggagtatgacgtccccgccacccacaacagccgcggtcccaccgcatctcggactacgagcagtgccgccatgtccaccatgaggttcaccatcaccgatcatgccagatgggaagttggttgttgatatttcttaatgatattactagaatataatttccagtaatggcgcagaaatactcctggtatattatggttacagagttcatccgcaaacatgcagatatatcattgtagcatttcacccaagagtattccaagggtatcgtatttatgtaatcccgtgggaagatcatagtagagagaaccgtactaataatttatatgttacttgtaataatcatagtctaagcaggggttaagataaatcaaagggtacagtgacacacaagcagggagctactcattcacatactaaaacatctaagctaagtggaaagaaaatagaaagagaatctattcctatacttctaatatacatagtatacatacacttatatgattaactagctaataccctctttccgatgccctcctagtacttcgagaagccacccctgactgtcgagtttcttacgacagcccgccatgaccatacaaccagggctaaatacggaggagtaccctcccaggaaactaacttaggactatatacacgtgcggaggaatacccgtactgagctgtcaccatcagcggcccacctctcatccgcagcatataaccccaaataatgatatctcgtaatctagacaccatgcctaaactaccagatactactctaatatcatcgtcatgacatagagtaattgcataagcaaacattatacccgtacctatgcttctcccagataagctaccagtataatcagtataacatgaacataatgtaaagttggcattcatatactcgaaaagtatttcaataccagaaatgtataaagaagagtattctaaacaaagtacaaagcttacaaaagaagaaaggaaagctactagagccatacccgatctcttccgaaggcttccggactccgatttctattctattcctactccactagcataagactactaaactaaacttgagagaatatgagagagctttgcttggagtgtgtggaggaagtgagagtgagagctacttttatagcttgagaatgacagttgtggcggttggaatggtcggaaataccctccaaccgccatagggagtcgatctcagccgtccagaagaaccctggatcgagtggtgccgtggtgggttagaccgaaccatgggttgggccggcctagcccaaaatcggcaggtggccttctctgctgctctcatacgcagacttgtgaattttgccacagttcattgtgtcaattctgagttcttggcccattcatgcataagtctaatcctcgacatcgtccgattgatttatcgtctggtttgatgccgattctcctccactttatggttattctctacaacaggttagtaaacctaatactagtggagtattattatttctaacacaaatatgcattgcaagcataactagttctcctctattttggtaatattgacagtcgaaactgatcgctaacgaccataaacattggtcagcgatgtcatggacagggagctcgttgggcacggtggttgaccgacacagtcgcacgacaacgtcgaggcacgctagctctctcagtcagccaccggcgcatccgtcgcctccacctcctccagcgtcggtcgtgccggcttcggccggcattggcgcatcgcaaacaacgtgccatctgcacgaggaggacgcccacaccgtcctcggcaaccttggtcccgcacaaggccgaggagctgccatcgagggtggccaagtgtgactatgcggcgctcgctgagggcgtcagcgcatgcgggaaaagagggaagacgagagagagggcgtggagaggtgaggatgaaatgtggtgagagtcgttgacacgtgggttgcacctgctaactcagcaagtcaaccacaatcaacctgcctatatcaacagaaaccgcttcctaaaccactaaggagatagtttgcaccagttttcaaaaataggggtggtgttataccgggttttgtagtggaataacttcacccgaggtctctcaactttacgtcgagtctgtttaagatccctaatcctcaataccagaaatgtctacctctcaaatatttaaaaccatgcaaaataggttctatggcagtatataggggtggcaatctaagcccacatatttttcttttttctctattctattatctttcttctcttctctttcagcgagcctggctgcctagggagagcagtgggcggagagcatggcggcggctggggcgcatcgggcacctcgtaacgccgcggttgttcttctcatggcctccgttggtgaagcggggctcatcgccgtcgccaccatcggagttaataccgagggagaaggagggcgcgttgggagcctcgtaacttcatcgttgctcctcccggcggcgctcctcatcgtcgtcattgtccgagtcgatgccgagagagaaggatggtgcatcaggagcctcataacgcttatgttcctcccctccattgccgccgtcggtgaggtgggattcgtcaccgtcgccctcgaaatcgatttcaagagagaaggatgaagtccatccgccagtgacgacgagggaggcatttggtggagaactgagtaggccggcaaaggggggatcagtggtcgacggagcagagcagcggaggccggagtaggccgagagaggggagacgaaggcaggcgacgtcggcaaagggggcggagcggagtggctgcggccgaagtaggccctggccctcccctccttcttcctcgtctcaagctccagctttgcttctcaagcggtagccgccgcacgcttctcaagctccacctccacgagctccggccctcgatctcctccaccaacggtggtgcctccgccacactccgcgactgaccctgctctgcccaccgctaaccccgcaccgagtcgagcgtgcagcatgcgaacggcggcagcggcgcctgatgcaacctccccctccctcccctgccggccgcttcctccctctcccggccgcttctcccaccggccatctgccccactcccaagcttgggaagaaaaaagaaaggaagaagatgatgctgacacgtgggcccacatttttccttctcacttacagatgggcctcacatatttattattttattttttgataactaggatgttacatcaacaaaaccaaatatctatactgtctcgggacttttttttggacagttttacatagtttaggggtacacatttctagtattacgattaggggagcctagacagattctacgtacaattgagggacgtcaggtgaacttattcattttgcagttgagggagactattcagtaaggagcaaaagaggacgggaagtaaagtagacttattcctttcttgtagctatgaattttcatgttttcaactaaccagtccaaagttctaagcattcagagggctaatccatttagtggacctgcagataatatttttttctactgaaaaatttacatgcgtaaatatttgtataaaatttaagctttgcatgacaccagactgaattctagccattcaaagtatagagtagtagactcactcgagagccaactgttatctacctggtgaaagacctgcagcaagcaacactaaggttgccccatgtagttccaatttgcaaagggcttgcaaaatgatattttgaatcaaatccacaaagaggcctggaatgtcaaataatattgaacaggaataaattaaaatttctaaatttaaatactacagcttcaacagcccaagtattctgctgccttttggaagctagcttctgggctgaaattgtaagctggcgatagcagtcacaagaagcagctttctttacggtaataatcacaaagaatacggtaatgaacaagattcacagtttcacataatgattgttacagctaacctgaggtgtattcctcatatatctacctatcgaaaacttttcaggagatgggacgaaggaataggggagctcaaagatcttcccagactgctgccagcttttttatctgatgatcttataggtgtggcacattcgttgaaatccaggattttcccctcggtctgcaaaatatgcattcatattatgatcattgctaataatacagttaaacactggcagtctggaatgggtaatgatgttaatttatgctcaacgtggatgcaaatctatcaaaaccatttacagttgatggattacagaaaaacaactgccaccgttttggactcacaaaccaagatttgccagacagcatgagctacatagctaaataatattaacgcaagaggaactactaaaatgacaaacaataaaaccagggtcctccttttgttacaacgcaagaccttttgtttcaacaacacgggaatatgaaaataagcagttcaatacgcaccttgatttttgcttgcaatttggttgttgctcctggttccttcttggcatctggattctccaggttttccttatcagaatttatgttctcagattggccaccacttgccagcacctcacgggcttctgccaaagcagcagcagtctgcacatttatctgcttcaccaatcctagcgcatcgtaacttccattagctgggctgacgaagtatgaaccctgggaggaacatatggccacaagaagttcagcagagtaaacagcaagcaatatccccagtgcgtgacaacatcagtaattaatgaaaaaaaatactctcaggcacgactcaataatatttatttccatccgcttagatttagccatagtccaccaagttatattcttgttccaaacacttgagctctgcatttcaaatatataaattttacaaagtgctaaatgtacctgaaattgcatatctacaaaccaaggggacttccatgctgaaggagattctagtcctcttttgatgcctggggtatcagccaatctaacaatagcaaggctttagaattcagaattacatattaaaaggaacaaggatcaagtaatctcttcacacttcagtagttggagacaagcggagtttaattccctattgtagtatcttaaatgtattcgtcagtaggattcaagtgttcttcaacattctggatgaaatagcatgtgctaatcccagtaagatggtggctaaaaggcttatgataatacattagataataaaatgtttttcagtttctgactaatgatggaagctcttgaatggatatttcagttacatagataagaatgggtagtaacttaattttgtactggattaagtatctaaatagagacatgaggttgaacatgaaaaccagctaatcacagtttaggtcttcagaagcatgccggactacaaattcaataggttgatgcttgcaatagcaagaaaaggaggaaatgatcattcactagagatcagtttccataaaacttaacgacttaatattcatgtaacctgagaagattactatacaaaagaatctgctgtaaaacaacaaaggaacatgtgaaattagtggtcttacatgttcacatattcataatccacatttatgcatgctgaagatttctccacaataagttccgcaggctttttagcagacactccctccttacagactgacaaagattccatatttgtgttttgcttctgtttcatggtgtttttaccataatctggggaaacaagatcatcaccgttgtgctcaataagaatacctgcaggttgctgcatcaaacaacatataggtaagaacaagatcattggaaaaattcattttccattttgatccagtctcccagcccccatatttcatagatgctaacatgttaaagactaaagagcacctgctacactcagggcattaacttggttatttgaagatgcataaggccactcccagtgggagtttcatttaaatagggctccatgtcaacaatttagatgatgtgggcatgtggcaaagaattaataaagtgagagatgaaatgagtgtcatctagatgaaactgtctacatcgtttccaatacagcttatctcttgcatgtattgcctatgaaacagcaaaaatgaaacaatgcattgtaagagatatttcaatcatccattaaataccttgttgcttatgtggcacccactgggactggcctaatgctaaatttaattgtgttactggacccactctgattggttcacctcacaaactatacaggtgctaccttttatcctcaacgaaatatgatacacatactaactggctaaatatcatcaaaaactggaagtacttactaaattgcctggcagatcatcataagtagtagttatatttgttgcagtacgccgttccccccttgcctgctcgtcaatgtgtttgtaatttcctgcactctgtccatcttttgcctgttcaattgtgttgtccaaattttccttgttctcatcagagaactcaagtttcttttccagaggtttagaagaagcagatcgctcaatacgcaaaactgatttagttataacagcatcatctttagtggcattaataaaacatgtttgaatgccgatggaggatgtgtctgataccccacaatccttttcagtcccagatttcttctcgattcttttatccggaataggagacacgaggtctctgtgacgtttctttagtattgatggtgtgcatatgaagcttttggcagcactcttcagcaaaatgtcagggctttcatcatgtgtaggggagccccacaatctcattggagtgcagacattcatggtcgaccgcattaactgccgaataccaaggggactatactcttggagatcaccagaagttacaaggtcgcaactgacaaatggaacatccatgcttggaaaacgaggaggttcatagaatagggctccctcatcctgcttttcatctgctgtagcactcggtgtaaccgatggttctttctctatactggcttcaggttcttccgcattagtaacatgttggtccgcacattcaggtatcctttccatcattgaaggaatatcactgccattactactaccagggttagcagacatttcagcgtcacctgaagaactggaagattgtgtgaccatttctgcctgagaaactgtcatttcttttggttctgatctattatcagaaggtacatcagtcataacatttgaacagataagagatggtggtactgacatctgtggactctgtccataagtagcctccatcacactggaagaatttgatgtctgtaataggtagggtggtgctaaaaattcattatctgcttgagaggaatatacatccgattgatgatttgatcttgaaaaagaatcagtttcaactgcatcaggtccagaaagaaggctttgcaaggaaatatcctgccaaagttcagatttcagacaattaggactattgaagtcagcctccgacataaaatgtagtttttgctcagctccagaatcacttggtaacatagagagaggcatctccattgctacatcatatggttccaatgacctttcatgattttctatactacagatagttgggttgtctgcaaaactagaattacttggcacttcatccatactcatatgcaaattcaatccttgagcaaactcctcttgcaagtgttgatctggatcgaagttagaggaagaaacgtggtagtgcacctcaggtatagcagttgcaacagcccccacagaagtatagcatgcttcgtgacccacagaagattgagaatcatgcgcttcattattgtcaacattcgcatttacttgcaaatcacagcccaatgccacattagcattgtgcacttgggagcaagaaaccttggcaagtgatgattgactacacactgatgaattttcaacctctcgaacagcatagctaccactgtcttcgctgttttgttgggtcaacgcaggtgaggaattacagtgtgcagagtattcatttagagggagacacgagacttgggtaagtaaacctgatgacatgtatgagtcgactttcttctttactgaactgttccagtgatttttaattgcattgtccgtcctgataagggaaatagaatgttacaggttcaatcatttcagtagtccaaaaagggcatatttttataataacaagcgttaattgagcagaagtacatatagatcattgtgcattaggtcataaacatttagagaagacaagaatgttaaacatcaatagatgtgtcaaaatggcagtaaaacataaatttcgcatctattttcacttcatagaaaataacagattgattttaaatttcgcttgctgaaaataaaggaacgatattgcagttaagcagtggcatctctatttcacattcggtggaagtatggacccgcgtcctcattctattctcccaaagcaaaaacgatttaagtttcttttttaggttaccatcttccctaaatttatacaacaccatagattccaaatgatgtctgaaaggaaggtggaaagaatgctgagctaaacagtttgggaacttaccacagaaaaaaaaatagaatttggaacaaaaattagaggaaagatttcccccataatagcagtcatcatgacaatatcagatcaaaactagaggtctgcaaacagctcttaggttaaaaataaaaatcattaccttcctggtaaaaattttgtcagctcagcccatttatttccatacattcgatgagcatgtatgagggtaatttcctcttcttgtgtccatgcctccttgtttatgccagggttaagatggttgtgccacctaaatgcagattagatagtccatctttaagacgtagaatccacagtaatgatactcgattaaaaataatggcatgcacattaagaaataaattagcatagtttacaaaatactgcattgtgaaaataaatcttattaacaatctaacacatgttttgccagacatcattgtacaacatatatggtctatgcgaaaactatgtccaaagaaaacctgcattcaccagcagaacaacgggctagaagaaatcagttgttgctagcacaaagaagttgctctgttgagccccacaaaacttcttgttatatcatttttcttcagtgcaagctagatgaaataaaataaaatgaataagtaattttcatagcattaccgttcccgacattgctttcctatacgtccaggcaaagcttgagcaatggttgaccatttctttggtccaagtttgtttaccatctgaacaatgatgtcatcttcctgaaaaagggaacaagtcattgtgagcgtattatgactaatcaatactatctaagaaatgaaaataaatggaatagcatcctacttctttggaccatggccctttgaccaattcagggtttagaaccttttgccacctgtgcaagcattgtacatcggttctatccggaaaacattccgctggaaaattagaaggatctctgtcaaagcttggatttttaacgatatacaagaatctcatcaacaaagtaggaaaaacaatgccagaagagcatgacttgagtgtaagttaatgaaacagcacaatgctttcctgcacacgagttcccataacatcgaagaaaaaatataaaatatgctgcatggtttatgatatcctactgcactaaacaattgtaggacaaaagaggcttgagaacaatatggtaaaaatgaattgtaaaccctggatagtggataatattgtgaaataatatattgttcctgttacaacctgacatgcattgccgtacaacagtatgtaatcaaagagcaaatgtgaccaaaagaaaaaccaaagggaagcagacatgcataatacaccctctatttcaggttataagactttttgactttggtcaaagtcaaactaatctaaatttgactaactctatagaaaaatgtagtaatatttacaatgccagcatagtttcattaaatctataattgaataaattttcataatacattggtcttgggttaaaaatattactacttttttctataaaattagtcaaacttaaaatagtttgactttgaccaaagtcaaaatgtcttataacctgaaacggagggagtaggctataaaatgtagagtaatgtagataccaaaggacacacttttgaaggtgcttccctatgttatttcctctctcaaaaaaatagtgcaatgggtggggattggattttagaaggctctttcgtttatatgttccatcataaaaaaaataactatattgaagataaagaaaaagaaaagtatgacagctaaaggatattgtagaaatgcaatgataaagagtaaggactcgccgggcaagagtaaggactaaggtaaagagtaggactaagcaaatagaaaaatagaatcattgcatgactttccacatataagcatcaatccaaagaacgtacctatttttttccaattcttccctttatatgtctgaacagctctggacaatatggaatcctacatttgaatagcacataagtgcaacgttaaacagtgtaagtagataataagcacaaaaaaaaatatgcatctaagaaatttgaaattttgcattgtgtggatgataatatggatcttggctcacatttcattgagacatacaaaatagaaccaaaatgctgctgttacaattttgtacaaagcatggaactagaacagaattgcacatgactatatgacagaaacagaacaaagaaggtaatcccaaggtagaaaagtgaagtttatgattcgcctcagaatacatgcatttgttgacttttaaagagttaaagttgcccatggctcccttggatgctagagaaattagtaaattatcagattcaactttgtttgtaggaggaataaaacaccaaatgaagtgaaatatttttttcatattaaacaagtccagtctttaccagtaaacacattagatgtttcacagttacataaaacaagatttttcaatcatcatttaattatgtgtacatgaaaggactcttcatcaacagaaacacaagctgacattcacatgttatacctcttcaggggtccaatttcctttcgtggaacgccgtgttggaccagtggtcctcctaaagttacaaggacaaagaagcataataaaatttagtagaatatacattagcatggttagaagagcttagaattttacccactgagcggccggcgcctttgtggttcattgctgatttcaccttcttggggagctgatgaaggtccagaagcttctccacccttctctggagcctttccgttgtcgcttgtcatcatgactgaagacattcaatcctcactttgcaatagaaacctctaagggatataaaaatcattatacggtcaagcctgagtaaggccttcagggagttgcttcaaggaataagcgatcataggctgcaatagaaatggaggaatgaagttcttgtcacaagatgtaacaatagaagtgttcaggaatgcatagagggcattgactacactcataaggacattaatttactcatttaaaaggaatggggagtagaactcatgtcactttggctttcttaaaaagatggattttacaatcttctatcaaaaagaaggagccgaggtgatagtgtatctacaccagtacaccatcccttcactgtacatctttcgtaaaaactaaaaattgcatcattcacacagatgtatcatgtatatggaggcaatcgattgatatccagccaagcgtacaacttatagattgggaaaaaaaatagtccatctttgcttttctaaaactattctgcaggatcaattaaccagcaaaactatttgttggctcattctaccctccgagctaccaaagaagctaatttcacaccctaatggtttgtgtgtgggtgggtgtgggtgatatgcactgccatatggacctctaatgcttgcattgtctgaatttcagctttatttagtaccaaagagagtttgatttttgccatggaatttaccgaacaaaaatgtataatatacagatctcactgagacaaattcatcacacatacaaaagcacctcctcctcctcctcctcctccagctccaaattcgaagcggacatcccaaacaacaatcaagcaagcaagcagatatacataccaatcgccctggcgacggcgaccctggccgccctggtcccgcggagcgccgtccccagccgcacgattcctggatgctggatctgcgggtgggagcccgacggccacggcagcggcgcgatttgcggcgcaccgaccaccggcccacggcggcggcggcggcggctccaactgagagattcggcgcggcagaggtggaggcggcggggggtgcgagatcgggggcgagacgaggtgggggatccgatctgcgggcggagcaaatcgcctcctcctaaccctagctcttgctcttcctcttcgtcttcgtctcgcctcgtctgcgatttcaaatttcagagcgtgggagaaatgaagcggatgggatatttgacaactttgttttttcttctcttttttaagttttgggttttgggttcggggtggtttctgcaaaatggacgggaaggaggcgcggagagggattccggtacgaaatggacggtggggagatggcttcgcgtgagatcgggcggatctgggccgtcgcttcattcgcagagctcgtggagtcgttgacattcgaatattgccgtaccgggagtatccaaagcaagggatgcttggctgtgttcgttaagagaagggaacaaatatccagtgcatgaaaaacagagcgatttattactacgtgattaattaagtattagctatttaaaaaaaatgatcaatatgattgtttaaagaaactttcgtatagaaattttttataaaatacgtaccgtttagcaatttaaaaaacatgcgcgtggaacacgaaggataggagttgagaacacaggccgccgaacacagccagttgcttacctccaatggccatcgtcgacaatgaaaatttgctctcacaaaacatgagaggctattccctcgataaaaacaagaggggtaagttgaaaaaattattaagcggattattgttacggtcatttggttcattataaagataaattaaatattttaaaaaatactagctaaatacccgtagtttgctactggaaagttgaattatacatgtggtaaacttatgtttggaacaagttaattataaggtttttaagaacaatttcattcccagttctctatagaggtctttacatgataaacttaaatcatagagatgaaataagatattaaaaatttgtaaaaggatatttttttacaacattaaagtacgtacagtagttggtaagaaaatagagttggtgattggcagatttattgccaccatcatttttttataaaaaaaaaaagagtatagaaacttaataattagcttaaaacaagtctaagcagtataactaaagaaagtcttgagaaaatacctttttaatcatggagcaaataatttgttagacataaaaagataacataatcaactggaacgattacactgaaaacaacagaactttggagcatttgtgaggaaaaaaaaatctaagccaggatggaatgcttgtcatatttttatatccttttggtgccgggatcagttgactcatgaagtgatgcaagctttgaagatgctatcaagctggaatgaagctacaattgttcataccaaaagtaaaagatttttccatcaataaagcacatgaacagggcttataatagggtggattcgattattttcttaagcaatgttacccggactagtcctctttccacgttgggttgatctcatccagggttttcaatttcgatttgcacagaaattttggaatttcggtgcaactaacacttttgggaatttttgaacttttttacccaaaatcatttgaaaatttaataaattttgaccaatattcaaaaaagtttgcagaaaaccaaaaatcttgtgcaacatttttagttgctagaggggagcgaaatttccaactgaaattgaaaaccctgattttatcatgtagcatgtcattcaaatttttagattaaatgcactaggcccaatttaatcctaataaattcttaatcctaataaattccaaaagccaacaattaatgttaaaggaatctcaacataaagtgttagggtaccgagctcgaattcgccctatag

SEQ ID NO: 9960 - DNA, 10592 bp, Oryza sativa
acccttattcacgtgcatagatcttataccgtaaaactttgcgcgtataaaatatattctatataaaaatatttgaatccaaattcgaatttaaatcggggtatataaacttttgacttataaactttttctctataaactttagatatgtaaactttcggtatataaacttaccaaaacagaaaagtaatgtagtgctatataaaaaatatatgaattcaaattcgaatttgaatcgggtatatacccttttgacttataaacattcgctcagatgtgtaaattttaggtgtataaactttagatgtaatataaaattactaaaacagaaaagaatgtggtgtgaaaaaaaaaaggtgggaaggggatccgatcgcccgatcgcggggcaatcgatcgccattagtcttttcgtccctttcccccttttctttcctctcttctcaccggtttcatttgtgccaaagccatagagctctcctccctcctctgcacacaccttccggcggcgcaccaggcggactcgaggacggagtgggagacgggcggcgactccgggcggtcgcgggcggcgactcccggcggcgcggcggcgaccttcccggcggcgagggcggcgactctcctgacggcccaggcggcaaggacctcgggggcaacgagcaacaaatctgggcattccattcctcttccattcctcttcaaatcaaggtatactacaaatctgagcatactacttgtattttggggattgatttgtttagatttgagtgctatagtagtttctaagcatgtgcatgaatggttgatagtgctatatttgccattttttgatattttgttcagatctgagtgctatatgttgtatgtctcaatatatgtgtgtatgaatatggtagacctgatttcgtatcaaactttggcattgtagatggacagcagaacaaggtttctgatttatgcggctgcatcgtatatgttgctgccaatgatggctatggttattgagtctagaaaaaagaaaaggaaaagggttccaaggagagaagggattacctatgggccaatagatgaaagggataggaaaagatttgattatcttaatgacaagatttggaaaaatgatatcatctgtgtgaatatgctttggcttaaacgagcaccttattttcgtttttgtagactttttagggatcgtggcttgcttgtggatactatatatatgtctgttgaagagcaagttgctatgttcttacatacaatcgggcacaatgttagaaacaaggtagttggcactaattttgataggtccggtgaaactgttagccgatatttccacgtagtccttcgtgctattggtgacatgagaaaggaattaataaggtcaccatcaacaacgactccatcaaaaattctagggaacccaaggtgggatccttattttaaggtatgatatattatgaagtaacaacttccactggaatgtaaccccaatgtatagtaaactataagctctcaaggtggcatgtaaaacggataaaaataaaaagaaattaggggaacacattcaaaaggtcactaaggacagatcagaataagagctggaatataatgcaagttaacagaaacaaccaaaacaagcaatgaatgcaacaaaaaaatcacaacagtaaactcaaaacataaaacaaatcgctaaatactgtactagtagaatggtagtggaaccaaaattttgtgacacattaagggcctgcttgggagtttagtttttttttaagtaaaacacctgtaaatttggattacccaaaaataacagtgaaaccccctctaggatctacttcatctgtttgtaagaactgaatcctacatggccatagcaatgtgtatggacatttgtgtctaacagaaatttcagttcataggatcaatctggaactacaaaatttgataaacaaatatattcagattgaatctcattgttcatcaaaatttcagaacagaacgtcaagttgatgccttattccaaccattcaaagagtagcgtgagtataaacgaggatctgtcagccaatagctcgattattgccggagtccccaaaattcacacacaaaataaacaactgactcaagctggaaatcctcatattcttcacctaccgagccaccgatgtgtttcgcagctactatgatcaatcgtgtcgtccagatagaggacacgtcggtagtggcggcggcggcagctcagatcgaggaccggtgacggagcttatctatggcgcccctcggcggcgactcataatgaatgaagccgccccaccggcgacagttcagatcaacaactcccctcggcagcgcggtggcgcagactgagggcaaccccggcggtggggagcggaaaaaggtttcggcgacaacggcggaggcgccggggcagtggcttgagggagaggcgcccatgaaggcgatgtgttcgggcagcgcaatgcccaagccgcacgacgacttagcactagctgctgcagcaaagcaaaaccacacccacgacgacgcagcggcggcagcggcggcggcggtggcggaaaccaaacgaccggaaaaaaaaaccaaatggctcgcccgcgatcgccggtgcggctgctcaacctcgacggcggcgcccacctcttcacgtcgccatcaaaccgagcacaggagggaaaaaaaaccgagcgattcgattcgcgagagggcaaagcatcgaagcttacttgcgggggtggagaagccaaaaaaaaagtttcaaatccacaggacgaatccgtcaaccagacgacctcgagacgcactcccctcccaaatggcggcggcgagcgaggctgaggccgacgaacgtaagagacgatgaaccgaccgcgccgcgaagaaatctccgaaatctcgtggattcggtggggggagaaatcgatcaatctgtggagagaatttttttttttagaatccgatggagaaatcgggggggaggggggggaggaaatcatggatgagctgtctccgcggcatgttcgaggtaaaatgtctgctccgctaacatgggcaggtgggcgcgtgagagcgagaccaatgttttcgtcgcgtgtcagtggtggtggggccatggcgtgtggggcctgcttcctgaaccggggatttgctttgctttgtgtgaatgagatggatcgtgcgctgcagtgtatgatttggctggtgtcgaaggaggaggtggtatgctacagctacacgctgtggttaccagtttttttttctctttctctgacacgttgtctccacagattgatcgatttctccccccaccgaatccacgagatttcagagatttcttcgcggcgcggtcggttcatcgtcccttccgttcgttggcctcgctcgccgccgcctacgcctcagccgccgccatttgggaggggaggcttgcgtctcgaggtcgtctggttgagagattcgtcctgtggatttggaacattttttttttggcttcacccccgcaaataagcttcgatgcttttccctcgcgaatcgaatcgctcggttttttttcctcctgtgtgctcggtttgatggcgacgtgaagaggtgggcgtcgccgtcgaggttgagagcagccgcgctggcgatcgcgggcgagccatttgggttttttttttcggtcgtttggtttccgccaccgccgctgccgctaccgccgccgcgtcgtcgtgggtgtggttttgctttgctgcagcagctagtgctgtgtcgtcgtgcggcttgggcattgcggtgcccaaacacatcgccttcgtgggcgcctcttcctcaggccgccaccccggcgcttccgccgttgtcgtcaaaacctttttccactccccaccgccggggctaccggggtgtcctcggtctgcgccaccacgctgccgaggggaattgttgatctgaactatcgccggtggggcggcttcattcattctgagtcaccaccgaggggcgccatagatatgctccatcaccggtccttgatctgtgccgctaccgacgtgtcctctatctggacgacacgattgatcatagtggctgcgaagcacatcggtggctcggtaggtgaagaatatgaggatttccagcttgagtcagttgtttattttgtgtgaattttggggactccgtcaataatcgagctattggctgacaaatcctcgtttatactcacgctactctttgaatggttggaataaggcatcaacttgacgttctgttgtgaaattttgatgaacaatgagattcaatctgaatatatttgtttatcaaattttgtagttccagattgatcctatgaactgaaatttctgttagacacaaatgttcatacacattgctatggccatgtaggattcagttcttacaaacagatgaagcaggtcctagagggggtttcactgttatgtttgggtaatccaaatttacaggtgttttactttacaaaaaaaaactaaactcccaagcaggcccttaatgtttcacaaacttttggttccattaccattctactagtacagtatttagcgatttgttttatgttttgagtttagtgttgtgatctttttgttgcattcattgcttgttttggttgtttctgttaactcagtatattctagctcttattctgatatgtccttagtgaccttttgaatgcgttcccctaatttcttttattttttatccgttttacatgccaccttgagagcttatagttttactatgcattggagttacattccagtggaagttgttacttcataatattggagtaatattatattctcaaactagtgtgtctggtttgtctaagccttgctctttgatatctgctattctgttctacaatcttctggcatgcaattatgagttagcttaacttcctgagttcaattgtgcactgctctgagagagtataaatcaataagttcagaacgtagcaccagctttgacaatcatgcgctgattcttgttaccctgttttctaactttgcaacattttgtactgctttgacaagtatttaatatttgcgagtagtctatcaagttttgagttcagcagagataataatttcgagagtatttgtttgcaggttgtcaaatgagtgactcaataatctagaaaatttatatcatgagaaaaatgtgccattcatgtgaatcggaagatgcaacaatggatggggtcgatgatggccttatctgtagtacttcttgctataatatgtgtggccatgctgacaaatcttcaataattgatggtgagattggttgtccaagcatggaaataagcccttgcaacactccttatggcactcctctttttagccgagaaagttcttgttcaagctttgccagttgcttttcaagcctcggtgagtgttgttgcactgttctcctatagatgaaatgctgtcattgatatcatttgctattttttttgctagcataactaatattttttatgccatttatttcctagatgactacctagttgaaactgactctgaagaggaaattgaggtcttagatactggccaacttcatcccggcatcttattctctgatgaatcgatggagcaaagaacagtgggttctgtacaagtggaagaatgtcaagtcagtcatgctgctgttgttgacgatgattctagtatttccattccgacaaaccagaacatttcatctggtcaacagcagttggagatacatcttgatgctaccaatgaaaattctgttccatccaatgttattatagatgcaaatgtaacggatcctcatcaagatgtcatttccaatggtggacttatagaagcatgttatggtgtaccattggatgatattgatctcaaacaatccaatatcttagatggtgaagagattactagccttcctatggctgacaatgaaatgactccactgaatgatcaaattatggaccaaattgatgatatgaaggaaattagtactatagtttacaacaatacaataagcgctgagcagcatgcaaattcaggttcagagtttgagaaaggaaatgaatccagtgaaaacctttatccgctagtaatgcccagttttgatacagaccctcacatttggttaccaccagacccagtcaataaggacgatgacactgatattgttgctaataacgatgataatagtgacaacaatgatagttgggtacagtcaagtttcaatattagctttgatgcaaagagaaacaagactagttgtgaagaccaattgcagaaagcaatgtcggaagttatgaatgggcaattcaagattcttgttagtcgttttttagctgctgaagggctctctttgtctgatggagaagctgacaagaactggcttgatatcgttgcttcactatcatggcatgctgcattacttgtcaagcctgatgccaatgttggaaatgcaatggatccttgtatgtatgttaaggtgaaatgcatagcttcaggatctattgagcaaaggtaacctaccaacattcttcctcattctgcttttttttctttgcttagtcatgtagacatgccttaactagctcccttttctatcttttttttttgacagtgaagtcatcaacggccttgtttttaagaagagcgctgctcataagcagatgcgtgccaacatgaagaatcctagactgttacttctgcagggtgttgttggccattcttctgcagggctattgtcaatggattcaatgaaacaggtgtgcatgtatgcccttagtagcatatttacattatgtacagagttatgtcatatgatacaagatatgcaaatttcttttcattgtcattgatcaggaaaacgatcacttggagaaaattctcagtgatgtaattaccaaatgcaaacctgatgctatattggtggagaaagcagtctcacgaaatgtaaatgaatatattcataaacaaggagtcactgtagttagtgacatgaatatccgtcggctggaaagaattgctcgttgcactggttctccaattttcttgttgcagaatgttcttgcaacacccaaccttattaaacagtgcgagtctctacattttgaaaagtttattgaggagcataatataactggaggaggaaagagatcagccaaaactttgttatttctagaaggttttcgaaagcctttgggatgcacggtatgttcttttcctatcttgtttttagtttgtaggtcatctgttctctttatgtaggactgatcttctcatggtggtcagagttgttctttctctgatcccttgagctgcatttagtatattctttcagtatattatttacattatatgtgttagccttctatgataaatatttttttctgccattttttttgacaaactggtatatataatgataaaatataatcctgtccatttggaatcaacaaaaatatattaattaattttgaagctaatgaatttccttattccagacttgacatcatgatttagactgaaattgattgaatcagataatataatcttcattgttggggttctgaattagaatcttaccttgcatttgtttgtgttatttagtgaaattatgttgatagaacaaaccaattagctttttaaatatacttttcccccatgacattagagcttcacaccttgttacctgcttaacattgagttatatcctaaagatgtattagtacagaaattgggacaaagtttcatagataggattgagttgctcatattgatattgattatagtatttctttttgaagaaaaaataactttgatttgtgcgacaatgttagctaatagccatatatcacccaaattgcttttaggggctttatatgttatgcacaaatgcataagatatgaattgttacaccttggatgtactaaaccatttgtgttaatgaattgaaacaaaatctaatcagcttaaaactattttgtagattttgctaaaaggatcaacaagtgaagaactgaagaaagttaagcgtgttcttcatttcactgtttttgcagcttatcatttgatccttgaaacttcattctttgctgatcaaaggttatttgcaacgggaaaaaatgccatggagaaaggcaactgtttgaaaactgatccacagctgcttgttccttgtactgctgctccgtcctccaaattctgttctgatattgcacaaaatagcgaccccacacaacatgctttgaacattcttgcttctgatggacagtatgttaatcaggatgattttgttaatccagagaaatccgtatgcatgcatgattccaaaattgaaacatctagagagcacgcggacagaaaacttgatgacagcaacaacattcagtcatattcatcattgccagttcctgacccctcgagaaatcttattggcgatatgtcgttagattttgccaaattggcatcatgtgatgactttgccggttccacctctggagctccttcaaacaatggggttctgcagacgtatggggcggatggcaaagattgtctagaaactattagtgatggaatatctacagggactaggacttctttagattctcagaacatattgatttcgatgtctagccaacatatcagaaaccaagcaatctgtgagcagagtcatctttcccgcataacttactacgggtattttgatacatcacttggtcgttatttgcaagatagtttacttaatgaggtcatacatcttaactgcttgttgatttggcagatgcttattttatcttatgatgtttcaattgacaatatattatttgcagaaacacaactgcttatcttgtggtgaacctccagaagctcacatgtactcttacactcaccacaatggcactctaactgttcttgtgaaaagccttcccttggatgtaactctttctggtaaggatcaaggaagaatttggatgtggactaggtgtttgagatgcaatggtaagcccacccagagggttataatctcttcctctgcgcgtaatctgtcatttgggaagttcttggaactcagtttctcaacacattctgctgctaagaagctatcaacatgtgggcatttgctgcatagggactgcctacgcttctttgggtaagtgcgttccaagatgctcttacctaaaggacaagtctttcctaatgacatcactaaagttacttttttcatgacttgcagaatgggacccaaagttgctatgttcagatactcatctgttgaaatatattctgcctttaagccaccattgactttggagtttcataacccaaacaaaaaagaatgccgggaagttgaatttaataatgtatgtctctccaaaaaaattttctgaaacatcctctttttagctaattacatattttaatcctaatatacttggttattcaaggtacttcgaaaatggaggctactcttatctgaagccgaaaataaaatacaaatcttgaaatcaggaggctctggtcaagccttgggggaaaacaccaaagtttcagtacatgaggaattatttttggaagtcaataggatacttgcacaagaaaaatatgaatttggggtaagcttgatatcaacttctattttgttctcctattccttcccagaagatttggatctacttttgatatgctaacatatcttgtcaacacgaggtttatccgaagacatttgacttccttgtaaaatctgggacttgtgctcacgagatccttgggttgaactggctacaccagctacttcttcttggaatttacatttgggatgtccggttgcaacatattcttcaatactgtaaagctaacgctgcatctccagatagtactatccagataaaaacaccagagaacaagccaaagaattctgaaataacttctgttcatggggacacactatctcttaccaacgttggaatggaaaggcaggaagcacgtatcgatacttgtcattcttttgatagttcatttggcggtatgattttggagaatgagcagctaactgagaaatcagtaatccaagagcctgggtcacatgttagtccagatcatcgtgaagatggtggatcatatgaagtcgacaaatatgcacatatctctgacagtttttgtttagaaaagttaattgacttaccagttaagaataatgaattgccagaactagccagaggtaatgaaatgtatcctgttgccaagccaagcaagtgttttgatatattccttaacctatttgatttcttaagtaatgatgccagaaaatgggtctggggtagttttagtcacctggaaaaggagtacaagaaagagcttcagggtggttctttggacaagtttcatctcatcaacaaatacatccccaccttttcatcactggttcagcttaaatcccaaatggacatggtacagtttattgttggccctggtggtagtatcttgtccattgttgaggacgaggcatctagtatgattgcttatgccctattgatatctgagcaacaaggaatatattcggaagc

SEQ ID NO: 9961 - DNA, 31173 bp, Oryza sativa
  unsure (1)..(31173): unsure at all n locations
atgcgcatacgacactgcaccatccttcttctcccttacaatcaccctaccagcaacagtaagatcacggtcgaaccatgtgtaccacaagccacctccataagtttggaccccaacctcaagataacctccctttgttacctgcgtggcaagaagcaggatttaatcgccaattcatcgaattgtaccacgccaattaacataaacagaaatcaactacgaagagttcaaactctaaaccttggagacaggcttgagcttcagggatggactgtcagtatgcgcaccgattatgtgaaacccattgccggcagcatacctacaacacatcaacataatccaataataaataatgcactaatcaggacattcatgatccacaaaaccgtatagaattactacagataagtttcttcacaaaaaaaaaatagaaaaagtatgacaaattaaataatcctatagcctcgagcaatccaaggagtgtgaggacaaggtaaaagtggatctagcagaggctcacttggcgccgatggcgaaggcgacgatggtggagtggttgcgcgtgaagaagtacttgcggccgggctggagccccgcccactcctcccgctccgacagctgcgagaaccccgccgccttcagccgccgcttcgcctcatctgagacaacacattcacagtccagtttgcgtcgatcgacaccaaaggaggaagaaggaagggaaataggaatcgggggggaaggggggcgtaccgacggcgtggaaggcggtgggggaggcgttgaggaagtcgacgaggtcggagacgacgggggcgacggcgacggcggcggaggccatgggcggcggcggcagtagtggatcgatgagtcaggtgtagccgccgactttggtatgcagggatcggtgtagggctgtcaaaaaaaaaggtcgaggctcagcgagcagctcgaggtttcgagagccgaacccgagcctgagcaaaagctcgcgagctttaccgagccgagctcgagctttatcaagcctggccgagcttgaccgtgcatagtttatattgcatgtttaccttattaatataataaactaatagataaatatatatattagtatctatttacacaataaattagcatatgttagtacaatatatttattttaattattttctactcttttattagtgtgattaactaaaaaataattatacttatcaagagattattattaaaatatatattatactacttatggccgagctcggtagccgagctcgagcttgaaccgagcttgcctaaaagctcgaaagtgcagtaggctcggctcgagctcggctcgagcctgtgtcgagctcgagcttgggcagacgagcttgctcgagctcggctcattgacagccctagatcggtgaatagttgtgtctatgtattgtacccgtatatactatgttgtgtccggatgccccttttcccatcatctctccctatgtcttttttttaaaaaaaagtttctatacgaaaattgcttaaaaaaataaaattagtccatttcaaaaaaaatagcaaatacttaattaatcacgtgctaatggaccaatccgttttcgtgtttgtgttgggaactgcctcccgtgaagatagcgttcttttcccctctttcccaactcacttgcctcatttttcacgcgcacacttttaaaactactaaacaatatattttttaaaaaaaaattctatatgaaagttactttataaaatcatattaatctatttttaaagttttttattaggctaatacttaattaatttcactataatcgcgtgctttgttttccgtgtcgagaggtgcccaaccttacctcccgaacatagcctaacttgtttatacggggataatgttcctataatttttggaatcagaaaagaaaatcaaatggagtcgaatattatcgaatactgatacataatgaatatgagttagaatacgggcacgaatatttatcggaacataaagaaagacctttttaccattcttacaaagtcaacaaagaaatataggcagttttatccaaaagaaaataaattcgtggtatatataatatgttattctaaattaggctctttggttttctagattttaataaaaaatataattgtaaatatgaagttgtattcaatattcatattagaatctcaattttaaatgtaatttgtttcatttcaaagttattagtaatgaacaaatgtaattgacatggacacttcttactctttttaaaataataaggtattccattaaaaacaaattatttgatatattactataataaataatgtttttattatagataatagtaccgaatatagtgtatgatttgtaactagcaaatatgacatactggatagctgcataccttgtttctaaaataaaattatttaacaaatatgttgggatagagatgtgaacctaaagatggagataaatggttttataaagctatccgaataactatttaaaaattatccatatattttctaaccatttttcgttttcgccatataccaaccttactgtatctttttctgaaaaaaaaaatctaaattcgtttctattgtcaaaactatcaaaaaataatatccggccgacattatttatttccgaaaaagcatcccagtattataactatctgaaccattttcatccattcgtatattaatggttttaacagatggcaccatttacgtattgatacaggttgaaccatttgttttatagaaaagtaaaatgacctcgatatcgcttagagaggaggtgaatagatgatttaaaatgaaatacgaaagctaaagcgaaacatggttggattatgatactaggtcagattgtcggaagtaagaacggaccatctgacctgtagagcagcaatacaaacaggcaacaacattaaagttgatccaatccacaagtaaggaggcgaggtcaaacatcactacattagtgtggtagaaagcaattcaacaagaaaggtaaagggaaagaggatatcaccaaggtttatgtaacagtatatttttcggagttcaaattcttgaggggattctaatctctgttaaggagctcacaaatagtcaagtcttttaatctgggttgatgttaccaactgaaagtaaagatcctccggcattagtctcggtttgtgtttccaatcggtactaaagatgcacttttagtaccggttggtaataccaaccgagacaaaatgttttcagggacttggacttttagaaccagtactaaaacatttttagtaccggttctaaatctagctgagatatttgtgatttttgataccacgatgaaagatcagttgttaagtattggtagcacatgcatgtaatggctgttcatgcaaactgtaaagtcacactatcactgaacaaaaaaaaagtcaaatagccggagagtattgttgagaagaggccatatttcgaatgatggaatatcgaagtgtttggtcggtccggatgctgatgtaattagggatgaaaacggtacgaaaattttctggattccggatctattttcgaaaacagaatctgtcggtcagaattttttcgaaaacgaaaacgaattcggaaatattttcttggaaacggaatcgaatatgataggggcagtttccgtcggaactcggaatcggtcggagacttttcgggaaatttctcggaatttccggaattacaaaggcccataacatagtctataattcctccctagcccaacccaatttagcatcctaattcctatgtcactcaattcagcccaacccaatacacccaattcaaacttgagaattgaacttgacatgattgtgttttgtgatgtaatgttgaaatttgagacttgagaattggatttgacatattttaaagcttagtttgaggggttttttattccgatatattttcgttaccgtatcagcaccggtcagttttcgctccgttttcggttttgacaatatttaattccgttttcgtatctgggtttccgattctgattccgaaaaaatatgaaaacgaaaacaaaaaatatagtttccgccgtttttgtaccgttttcatccctacatgtaatgagttggagcttgatatcttttttttactgatgagtcaaactgattcaaccagtgaagaacatgagcacgggttgttttattgtttggaacatgtattacgagcttaaatgctcatactatgtaaccttgtggttgcatatatcctgcgggatgtagaggccttttttttttctcaaatccattatctaaaaaaataatgactgatccttaaaacatagaagaaccattttagggtgtagcatagagccacggcaaatcataacagttgattatgtgtgcttcatttctaataaaaaaacatatgatctcccttcaccaaatacatgatggttaaaaatgcaaagtatcataagtatctttcctaaattaattatttactaatgaagaatttatgatttaggcaacaaactgaagaggcccacaatttgccaaaacaaggcgcaatgactatgtgtaatttgggcctacatgtcaatgggaggcttagggcaggtgcaatagggaaaatgtacctactattagccgctggcatcagctctttttcattgctggaagaaagagggagtggagagagagagcagccgtcgactaaattgacaacgcctgtgcacaggcgcctagacacggcatgcatacgatggatgctgtgattggtgaaaagaataggtgagagataattaaggttggcccacatggaaagagcatctgtgactggttgatagcctaggagagagaaccaaggtttggcccacattgagagaaaaattaatgactcggttaaatattatattatctttaatgatatagaaatgacatgtaagctcatctaatagatggctgcttactctcttattaaacttgcccttatgttcgattctcacatatccaataattttgtatagtttttacactaataaaaaatatgaaaagtcggatttggtatgaacaacggattaattgtatgtttgccatatacaaaagatagacgcagataattcaaaattccaagttgtgctgcgcaactaaactaatcgatcaaaattccaacgaccgccagaccaaatcccaaccctttaatttgcatgggctcctgcctttgccatataggaattcccattgacgacaaccgtgtccggatgtgaactcgaattacgtatatacgtacctgcatgcatgcaacattccagttcacaccatctacaacagataccgggatcaaagattattaatctttagtcccggttcaaaagattagagctactttttgatctttagtttcggttgggaacaccaaccaggactaaaaatgagttccggttcgaaaaaaaatagcaggcggtgtcaaacccctctattatttttattatttttagtcccggttatttcgagtctcgattggtgttaccaaccgggaaataagatcggcatatgcggcagagatgacgaggcgtgcgcgagacccagaggcaatatcagttaataagttctatctcctcctccctcaccttaatttatctctttctcctcttcacccctatctcttcctcttcctcctctcctcattctcttcctcttcctcatcttctcctcccctctcctccccattcttaggcggccgggcagcggcggaggcagcctcgtgcgcggatccgggatctagcgcggccggccgggcggcggcctagcgcggagggccgcgcccggtggaagccggcgcggaggttggtgcggcggtaggcagtggaggccggggctgctgcgtgattttttttttcttttttccttaatgtgtgattcgatctgtgttgaatgattcgatctgtgttgaatcgatctgtgatgaatgtgtgattcgatctgtgttgttgttgtgaatgattttgagaatgatctgtgttgtgaatgttgtgaatgattggggattaactattactgtgaatgatttgggatgaactatataactgtgaatgatttgagataatgggcgtgagatatacaaaatagaaaaaaaaaagaaaaactccgattgaaaaaccgggactacaatgagttaccaatcgggagtaaaaagcatttctctaccagtgatacttttatgtatatatatagttttatatatttcaaaaaaaatttaaataagtcgaatggtcaaacatgcttaaaaaaagtccacgacgtcccatatttactatttagggacagagggactacgctatatagaaatactcgcaacattttgaaaaaaaaatcaaacaataataagaccactggtggagaaagcgtttgtagtcccggttcataaccccctttagtcccggtttgaaaaccgggactaccaatccgggactaaagatagatcgctatcttttgtcccgggtgaaataccgggactaaagatcgagctgaccttttttttttcatggccctgttgctgcatggtttatatatatatatatatatatatatatataaaccatgcatatatatgtataaatacacatatatatatatatatacatatatatatatatatacatatatatatatatatacatatatatatacatatatacatatatacatatatacatatatatatatatatatgaccaaaatatatatttacattaaagaaaatgtgtacatgcatatagaaaaatagacatgtattaattacaatctattatgatgtcttagctagctacgatttcgacgtagtagtagtcgttatctcagaagctaaggacctttgaattgtatttccgtcgtagtagaattcacccttgggatcaaggatttattcgttgatgaatcccattagttgttcttgaaccgccgcgataaattccttgtgtgtgatcaggttatccctcatgcgaataaactatatgaatgtatgaaattaattagtaattaaacaacaaatcgatacgtacgcaatgaaattttgaatttatttgtacgtacatcgagctctcttgtggtgatgatttggtctgcaaggcaatggcaatactcgcacacgtagtagccgcacaagttagttccctgcttttgctttgcgcactataaataaatgataaactgcgagagatctaattaatatacacttgtatgtatttgaattggagattgaatataaatatagagcatgtgtactcacaagaaaattgaacttccgcctaagtctttctcgtcatttgccgtggaccaaatgacggaaccgataccaatcgggactaaagatcccgggagggcctgacagaccctgacagcatttgaaccaagactaaagatgattgggactaaagatcatctttagccccggtttttattgcaaccaggactattgtgaaattcggccgactgacgaaagatggtttctccgcccctggacgaaaagaaaaacaacgatcagaccgggaagggcgtgcatgcaattgttggaacgtggataggcacggtatctatttattggtctttatccatgcatcttggaaggggcagaccggcagctcgaacgtcctgtttaacgcgctagggcgatcgagacgcgcaaaattttctgtgcatgcagcacgcgcgcgtacgtgtacgaacgcgcggtgcccgaaaatcgcattgagtatagcagcagcatcgttcagattgatcgatttccatctcaaaagaaacaggagcctttgctatttcctcggccccgaccaacaaacaaacaaacagcggatgagcggagagtagtcaagccgcgtcgtcgcgcgtggtcgtcgatcgcatcgcgctctctcgcggttgtcgtccaaacgcgttgaaattaaccaccgatcgatcgagatggccgtgcgtgtaaagccctacgagtgatcgccccggccggcgctctctcttccctcgtcatggggagggaggcgtcctcgccaccgcccccgccgccgccgccggcggtggtgcatggagccggctcgtcgttgtccggacagaagaggaaggccgccatggacgatggcagcggcgaggacgacaacgtgccaccatggctgaaactgtctctcggtccggtggcctacggggtcgccacgggcgtcgtcgacgacgactcctcttcttgcgctccggcagtgacgacgtcgatcgaggtgcggccgccggtggccactggtgtggtctccggatcggcggcccaaccatcgattgaacatgttcctgccgatgatgcggtggtcacgccgtcttttgtggcctcggcagccggtgtgctgttcaccggctgcgcgagtggtttgatccccaatggtgcagtctcggtatttccatgctttaattttcttggaccttcaatgtcatcatcaatcctatcgcacctccatcaacaattctcctcgactcgacgtcaaagcaacgcgtccatggcaagatctagccgcacctgtggcggggacgacgacatggcacttagcaacatcgctgcgccgaacgtcacaaacggtggcggcaacaacaacaacgacggtaatgctcttcctgatccaccgtatccttgggctaccaatgaaccggccaaacaccactccctcgccgagctcgctcgccgcgacatcaccaccatccaaggcgacgctcggtgcaggcgctgtgatgcacgcaaggtgatcgtctacaacattgccactaagtttcaagaggtgtccgactacttacgccaaaaccaccaacatatgcatgaccgtgcgcaggcgcggtggatgaaccctgtcgtgccgaactgtgacgactgcggccatgagaaatgcttgcgtccggtgatcgctgccgagaaggagcgcatcaactggttgttcctactgcttggggagacactgggtttgtgcacacttgatcagctcaagtatttctgcgcgcacaccaaccggcatcgcaccggtgccaaggatagggtgctcttctccacctacgaagagctatgcaaccaacttgttcctgggctaatcacaagacgtgaccagttgaggatgcgttagttattaattttttcggttgttaatttagacttttcaagatgcaaccatgcgtgcctacgtggttgttacattaggttcatctagagtctctgtcttggagtctcgtctctataagtctgtgagtgtttgagatagttcgcgatatattatttctctcttttatttgtaagttgtgcaactggatttgaatgtgggtgtgtattgtttgttttaatatactatttatgtcctttcagctttgaatgataggcgcaatttggtgtggtttgggatttgtccttaaatttggagaaatgttgattacggccaaaaatacctataggtctttacactttgttgagaaggtgctttatgttacttggaatatctgggagaaaagaaatggtttaattttttataatatcgctccttctcttttctcttggagagttctctttaagaatggtatctcccttttactccataggcttaatttgtttgatcattggattaatctgttgtaattttctaccttttattttttcaatatattaaactgtaggggcttccttccctcaagaaaaaaaatggcttcttaattcaattggagatttcaatgtgggtccagttttatttgtgtagatagtactagtagtatattgcgaaatttcactgctgcaaacttgtaattactgtatttacactaggttggatttgagatgatagatgctatgtagaagctgagagtacgtaatctatgtcgttagcagcaagtaattcaaaccaatggtttggtaaatgtaatctagctatatattttttttaaaaaaaactgagccagcaagagttggtgttatattgagcagagtaaaaacatttgtgcattgaattttacagccttagagtagagatatgtactgctgtagcactggttacaaactcacaatatgttcatttaactaatgttgcggtgtttataaatgcatttctttagtttgctcaactaatttatgtaagattactatttttttattttgtcaattatacttttccttcgcgttgatctaattcacttagttgctattggacccattttttccccacgatgtagtttcatgccaaactgtataaacaacacattgttgaccttgtctgtggatagattggtgtgttatcacttatcacccaatgtataagcaacccattgttgatgcatctatagtactgtttatatggaattattagttacccaccaatctaattattttttatgaacgcaaaaccttaatagatttatagtttctaaaaatacactgccttttacttatcttacatacatacctaatcggtgaaatgcttgccaagccacatagttctacgaatgcaaatcactaatccgttttagtttactgcacttgctatttatgttagatagcttggattcaggcactaatacatttcattccctttgtccaagtaaatacacttaatacatgatatgatatatcctaatactataaatttggacacatagacacatgcaagtgtttttcggtagtttcagcgtgggcggcgtgaacgatattatggtttgccacaaactagatcatttagtttgcattggtgtttgatttgcaattgtagaatattgtagaatacacagcttgtcaaactaaggtctcaatatgtcctgcacaatttttttttcataaaatcgggttatttagctatgccctgtaatgatgccactgaataatggtcgttacaattttttgtgtacacattgttatttggttatcggattgttgtggctttctattccatcggctttctttgtgtgtttacatgtgtgtgttaccccaacacagcttaatcaggagaaaatgggtacagatattagtaaaaattgttaaaccaactgaatttttgtttttaaaaatacaattccttaaagaagtgttttgtgcagtaactagaggaaataaaaatctcaactataaaaattaactcaaaaggcaacaatgtttgggaacagtcaaatactcaagaagtaactaaatttgttaataagggcctcagttggtgaacaaaagagggcatagtatggtaaatgttggacaatattccatttatattgtggtttgtagcagtggacagtctttaatattgttcagtttgaacttgatcaaaattcctgctaagtcttgttgaaatgttttaatatcttgctgcataatgtaaagggagaacattttaaatgattttcataatgggaagcattggtgcaaaatatgaatagagttggttttagttgcatgaatttgaattggtgggagataagatccgctccaatgctccatgaactcaaggatatataggccacatgaggcgttagaaaaattgaggcgttaggttaacacattacaataattaaataatatgaatagcatgtggaagagtttaggagtaacccacgtagtctccttgctttggcaattgctggacttcgctgtattcccatgaggtaatattgaaattaggccagtcatgttgtaattatgggtgctgatttttttgtcccctgtaatcctctctggatagctaccagctgggaagtgattgtaatgtcaggtttgttaaaacacgacgaactcgatttgaattgtacaagtggatcgaagtgtatcgctcaccacacgccttagatcgggtcgatcttcactgattgggatatatggctagcgaatcgagtatttgcacttcacgttgcttggcgttaagaacggcaaggtaccagtgtgtttcttttatattaattgggagataaatctgtagatgtgcgataggaagattgggtaatagcttgcaataaccattgcatagaatagctaaataaacgttctcatgtcatatgttaggtacttgcatgccatatttttaatccattgtttatcataggggttgttagatttagcatgcgccctctttcagtagatgtcacaccctgattttagttccagggattaataaaattatttaataaattattcctagaatttatattaaatattcccacatttacaagtgatattaaatgtgggaaataaaacttcctaaataaaaaatggcttgatttatttattattacattctccatgattaattatactctgaaaattctcggatttttcagagctcaattgttaatttgtaagatacaaaagaacatacgagtaattatttaaatacaaattaatcattaaatgatctggttataatttgttttaaatactttgagtgatcaagtattatgaggatttttattggaattattggagcatttgaagcgttttaatggaaaagatcatatgcaatgattaatttaaatggaaaagtaattaaaaaccctctcctaaatctaggccaattctggagaagtctcaacattttagattttcaaaactacttatacttttggagtaggaataacccttatgacatatctccttgaccgggagcatggtgtattcgaatacgtctgcaatgtctgcccagctttacccacacgatgagaacaattcgcgaggttgtaaacaccatagccgttcgagagtcccatttaccactagttactgcacagtggggtcttggttcatcatagtggtcaaactcttgccaggcctaggcaaggtatctatatcgtcacactttcatgaagcccactgttgtgattcatgccacccaaacaccttacgcatgattcaccacaaaacctgctcctaataagccacccaacaatctttcatatagtaggacaatgtactaggctaagtccaattacttggtcgtgtggatgggcgtaactatgtcatttctatggtataaggggataattataatccggttaaaccaccaaaatatctcaacatcccaaaacttccataccaacttcataaatcacacttcaaaaagcccattttaaccggattcctaagtttgtaaagatatttggaatagtgaaccacataaaatgatgactaaagcatcattctataatctcatgcaaaaatgcttgaaagtatttaatatctaaagagtaatatttcatgcataaaatgacagttatattaagttttctatatgatcaaaattttagttatgtcttgccttgcgccttaagatttcccgcggctttagcgtaatcatctgagtccacgtcagctccttggatgtcgatagaatttgctgtacggtctaacgtacgaatacgaaaaagatagcaaatagagcctataagcaaattgctacaaagaaacgataaaccaagaaataaagaaaattggagcaaggcgaaggaaaaaggagttgggtcaaaagaaattttagtttggaaaacaaaagagaggggttttggtttctaaaggttgggtttcaaataaagttgaggaaaaagagagattgggtaggtagggtttatttggtggttttggtttatagtcgatgctagaatagagtagcacaatggctagatatttggagttggttagccgatgctaaggataagcaacattacggctaaatatttggcttatttagtcgatgatacagcgcaatgactagagagttgggaaaaattcgtgtgggtttgcaagatggaaagtgctactctaaagctgtgagtgacagcaaagcggctaggattgcacatagtccaaggactagtgtgctgtggaggtcgggagagtagtgaggcttcaatcactgtacgcgtcgaggcatgcggtgtgaagggcaacactttgaccttggaactaggttatgccgtgttttacgatcaacgattcgacgtcggggtttgtagactacacgaatgtctcatggaagcgtaaagtttgcacgacaactgtttagtggctattggattagcaaaagaaataattgaaggttttagaaataaaaggaaataaatagatcaaaggaaattgaattcaaaatgggtttttaaagaaataaaatttaaaatggtatttgaaatgaataaataaaaggtgtttaaataaattaaaggaaaaatttagttttttaaaaaagggtttttaaataacacagaaatttaaatttaaaggtatttgaataaaatagaataattaaaaaaggttaattaaaataaattttaaattcgaaatgtaaataaataaatgaataaaaagggatttaaatgagaaaatttaaataaaatttaaaaatagaaaatttggtatcaaaataaagagtttgaaattagatgaatttagataaagaatttactagaattggatctatgatttgagaaatatgggtgtctatagagattgaaattgaaacaaaaaggaaagggattagtatgcagtggggcccacttgtcatagccttccttcttcctccttttctcctcctcgtcttcttttcctctgtctcacaggaagccgagagaagagagagagaagcgcgagcaaggtgacggcgctccggtggccgagaggtggcgacgccagcggcgggtggtgttcccgcttgttgctcacccgaagaggaggtcggccagcgagggaagcgagggaggaggccggaatggcgaggataaagattggtccggccaggagagagaaagctccggtggtggctcgatttagggtggaaggaaaggggaaataggaaaaattggttcacctcggcgaggcaagcccggatggcgcaaggatttggccagcggagctccggtgagggagatcggccggtggcgaggtggtggccggcatggcaggaaagagagaaagagagtttagagagctcggctgtggagggggaaagggcgaccgcggaggtcggttcggagaggagaagggatacttggttatggtggcggcagcgtggggaagtggacgacggcgccggcttcgttcttccattggccgaaaagggcggcgcgcacacgcggcggccgtggcagcgttgggcggtggaggtggaggagtacggcacgacgctccagctaggcaaaacagctgcagcggcggcaggaccgtggcgacggcgcgatgccgtgggcggcggcgtgcccatggcgccagtggcggcgcccacaggggaggaagagagaggcggctggttgggccggctcggctgggcttcggctcagttgggccggcagcccaagaaggagtgagtggaagggagagaggaggaaaaggaatgggccgaaaagaagggaatttcggcccgaattgattaggaaggtttaatatttttgtgtggagagttttgaacggaattcaaaggagatgaaagaatgaaagttttgggatttttgaacttgaacatggaatttgaataaaatttaaaggagatgaaaatcaaaggatggatggatggatgtggacctttttggactttggacaaagaaatcaaatagaaatcaagggaaatggaacctaagaaaattttgtatggagggtttttttataaaaaaattaaatgaaaggtttttaaaacaaaaggagtttgaaaatattttaaataaaatcaaggatatttattttgagataaaatttggtggaaaaatttgaaatgggtaaaagtgctccaattttatagaattcaataagaatcaaacataagacttggcacggaagtttttctttaatatttaaaaattaaaaattagaataatcaaaaagggaaggaaaggcaataatttaatttctaactttggataaatttgaaatggtagcaaaaatagatggaggcaaataactaggattttgacctccaagatatggggtatggattcttggtttagtatttgtggctaagggaagttagactttctaaggaaaaaattggaaatagtgttcttagcacaagagcaatcattcaaatattcgtgataatatcgttcttgtgctaagggtgtgatcaagccataggaatcaaattggcggcttgattcataattaaatagaagaatttgaatagttgatcttctagaggagtttgtggtaggtattgtatgaaggataaaatggggatttctaatgataggtctagataggagtttgatccaaaataaattccaataaaaaggaagttatactggtttagccccaaaaataaaaatggttaatgggatataacagagagttgggtcaatcagggaaatattggcccaagctaaatagtagactttgaaatcttgagtggataatttagatgaatgagatttcaaagaggaaatatttattggagtatagaactggattcggaagtatatgtggatgggaatttctacgggaacggaattggtggtagcttgataaactctagaggataggtatattgactcaaagggggattgaaaaggatatttttgtgactctagagatatttaggtggagattcaaaggaaaggtatcaacatttcatgtactctagggaggttagaaaatggcatttcatgtgttctggagatagctgagcgggaatcgaaaggatatttgtgggtgttggagatgttcgggaatgggttcaaaggaaatgtatttagagtcaaagttagagattaaataaaataaatagagagcttttgtaaaatttaaaagatagcgattaactttgcaaataaagtttaagtccaaaataaaagaaaagattaaaagtaagatcactctaatgcaagaatcgagaagagcataacttaaaatatttcgcaaaatattttcctgaaattttgagtccgttacagccttatagtcagcttgctccaatatgggagttggaaaaaaaaagtactctttttccttcaagtaccatacaatgtactagagtgtttccttttcttccctgatttcccaaacttcacctgaaataaacatgtggcagcaatagtaaggtggtaaatccaaattcatatggttagtcatagttctaaaaaaaggttatgccttatagtattatcatgtcacatgcatagtttgattttttttaatttagaagcatcacacaaaaagattcaataataagatggaagcaataacctgttcgaatttctcatactgagaaataatatcatcttctgacaatggttttggagcacttcgcttttccttttggccatcaaaagaagcatcattgttcctccagacatgtcgcctcggcaagaagcggcgatgtcccatataacaatatttgtgcccattaacaagtctgtggtagcaggtttcagtgtggcatgaaggacatgcatatttaccttttgtgctaatgcctgacaagttttcaaatgctggaaaatcattaattgtccaaagcaaagcagcacgtaaattaaaagtctgctttgtggaagcatatggctacaagtatacatcaatgtcattaccaggtgcttttgggccaagaattatcatagacatcaccatatatggatctttcatgcacatccaaggtggcaagttatatataacaagaactacagtccagatgctatatgaagaactcatatttccaaatgggttaaatccatcactagcaagaccaagtcggatgttccgtgcgtccaatgcaaatgaagaaaatttcccatcgaagtccttccattcttttgaattagcaggatgtctcttatatccatcatctactaacttctccttgtgccatcgcatatgtgttgcaagttttgtagacaagtacatccgttttaacctcggtaccaatgggaagtatcgcaataccttctatgggactttcttcactcttctcctccttgatttagagacattattatgcccttcatttttccatcttgaaatgccacaaacaggacaagaatcagccttatcataagcccctctatataggatgcaatcattcaaacaagcatcgatctttgtgtaatccaatccaagatctgtcatagtcttctttgcatcactatatgacttaggcacattactgctactaggaaatgccttgcataacatggaaaatagagcctccattgcatttgcactagatcatagaggtatttgatatttaacatttgtacaataaatgctagtgtcgaaaaggtaccacaccctggatataactcttgctctgcatcttctagaagtctgtagaatttgttagtttcttcgttagttactgtagagttatccatgtcatcattcaaaccaggtgttgagccacccagtgatcccatattcacaaccataggttctccaaaatcattcatcatctgatccataccatagttatcataattttcatccatatcaatattgccactgtcttctgaatctgggacgttttatccatgatagacccataatttgtagtctttctgcactccatggataaagagatgttcctttatattattctgatcaaagaagtgattgtttttgcactttctgtatgggcatcggaggaatttgtctgcattgtaatctttgaaagcaaactgaataaattggtcaactccttgctgatattcaggaagactcctattagataagtccatccagcttttgtccatggccgtagagtctgacattatcctacaaagaaaatattattttctaatcacttattatcattaagttgttaaatagtaagtaacatgctcaatttaaaaccaaacattcagtggtactctatttgatttcagtttcaggatgctagcgatgtttcacaagctgtatctataaacattatttcaattttggtgccgtgatagttttggtgtcgagcaatatttaagtgtgaatgtatttttagtaaaacaaaggctaaatgtacgtctatgaacatacagaaattgttgaacagttcaaacagtggcagatttataagttttattgttcttgtttaggtataacaatgtataataagtgtgcacagatacatgcaaactccgtataacatttaccatggagactaaaatttaggtcaagttttgatttaggagaggaaaacaatctcccaagattacatagatggtcctgtattcttaacagtttagactatgaatcctgaattatcctaaaaggaaaatataatggttcaggttataatcacaatggttgtaagcatttgatttagcttgcatcaaacatggtaattaaatacttatatagtactgttgcatgcgttggtctggtggctaagcacagtaattaagcttaatctaacagtattgccggcactaaacttccaatgacagtatgattgacataaggatcacgtagattaccaaattctatctaatttaatctaatcggctctgtgtcattaacggcaaggtttatgctctaattccagtaataacatagaagttagacactacatacatacatacatacctggaattctggaaatatgaataagtttccttaagtctctccgtaagcgatgctagagagaacaacagtgtggggggaattcctgcagggcaggcgtcagagccagaagagggccgggaggagaccactggaatggaacaggtgcctccttgtgtgctagggctgccgatcagccgcgcatgtgtgagaagatcgatagggaggaatagaagaagtgtttgagatgaagttaggttaaaaaggaagataaaggaaagacaccgtccatatgttttaaaaaaatctgcaacaactttattgctctaataagatgcgcaacaatttattgctcaaataagaacggcaacaactattgctcaagacaaaatccgatacgaatcttcaatcttgaggaatccagaaagaaaatcgatggtaaatcgagtcagaaagatcaaatcgtacacaaactcacgaaaccaatgacgaatataatcggattcaggcattggcagcacttgtgtcttggccgtcgggggtggaggccgacggcggcggtgaaggccggcatgccacacaggaggtctggagggcttttcggctgggaggccgaccactgccctgagtcagccatttcgttggcaactggtgaggacagaaaatgggcctgttcggttcttacatctgcagccatagccaaaaatagctgtacgaaaaagccaaatgatttcactgagtggctgcctaataggtggacgtaccctataataattcaccaactaactgatctttaaggcctgtttggtacagctccaactcctaaatataactccaggagttgagtctaaagtgacgcagctccacaactctagtacattttgtgagagagcttcacccaacttcactcccagttttagtggagctgaaactgtttggctgagctccagctccaggccaaacaagcccttacatcctcattccattgaatcaacgccaccaaacgaggggaggataggcgtggagacggacggggatcggagtcggagatgaggccgagccgacgcagcagcacgcggtggcgctcctcgacggaggtcggctcagagatccagacctcgtaggcggagaacgtcgcggacgtacgacgacacagctgctgcggccgccgccgccggtgctgctggtcagtggtcacgtcgtcatcggaggcggacgtgaacgagcacgacgatccagcgactcgtacaactcctcatcctcctcgccattccagcgacgcatgccaccgacctgtgccaccgaagcgcccgcctcgccgatctcatccacggtcgatcggtacagagtaaatcattttctttattgtaggagattacagatcagtttccatatgttgcctataagcatggaagctctctcatttcacccaagttgttcgtctacaagtatgtcccctgctttggttcttcaattatattgtcacttcattagatgtagtactttggatgacaatgagattggcttaaaataattctgcctttcagtaggcagcacagaacagatttcccctccaatgtattaggggagagattagattttctaagcagaaacgttctgagattcgaccagaaaactgaattgatattttagtaatgtactgtagtttgcttattactttccaagattgctctgtgatatgtaaggacagccttacttactagagattgtgatatttcatatggtggcatgagtgctgatagataattgatatgtgcatacacaagcttttacacattaatttccatgtcattgctaaatatagattgatgtgtgcattccagataggttgatgggaacatattaaggaggtgcttacgattcattgactgcaagttatttatctatctattatatactaaaagtctattaaactttctacaaaagctcttatgctaccacatggcgctctaaatacgatctcaagctgacatgtggcgttaataaaatccatcccttaattttcatttaactcggtgggccctatattctaagccgttgatttggttgagattaaaacaaaccagcgagctgtgcatgaaccaagcgcctctggaaccgctatgacccggattcccgtgcgggcagggtgatcgatcaacatgttgatctctgatcgatcgatcgatcaacctgtacagtggacacccttctcctgctcatcctagcctccttgcaagacatgtggaagccctgatgattaaatcactattcgcttttggtattcacactcctatgcatatgtacatgtggtttttgcatgcatactatacgctgattagtttgcttgccgaatagtaataaatccaacccatctctaacctctgcttcactccccttttctcccttctttgtatgtctagcagtttgagataaaattttatgataataaatttcaaacagccataacttctaaattatatgtttgatttttatctattcatcatctatctattataaactaaaagtacattaaacttcctataaacactcttaagccgtcacgtggactcctaccaacgctcctaaaccgccacatggtgctctaataatttaaagaaaattctaagaaaaatatctaaccgtcaattttcaattttcatttaaagcggtggacctaatactattgaccattggatcaaaactaaatcccccatcacccttctatcccggacccatatgcatgtacgtggacaattacatctggtagctacaacgtttatttatttgattgcttgatttattattgacattaggcaggataattatatatggcctcggtgtgctcgattgatgcatgcatccggttcctgattttttttctaaatacatgatatatatgtacaccataatttatcatcataataattattagatctatttctcatggagactgatttaggtgtgaacgtgcaagcgctagggatttacaataggagtgatcttggtgctgtaaataaacaattattttagacggtctacacgtttaatttaagatacacttgagcagctttagtatttttttcatcaaatcaacaatccaagaccatgttggctatttgctttactattatatcatattatatcttataggtcctcctcatacatatattatacaaccgtgtatttatgatacatcgcatgccaaaaataattattacacaattatatttaaccatccaatcgtattcataataggctatgtggagcctcgcacacactctaaatgaaatgctcacagatggattgtctctcaaactatgcaatcatattacaaacccatgaatgtagtgtagcctcatgttgtacccaatacatctgtcaataaataatgggcgacctaactaacatcagtaatccaattaaaaaaaagcaccttgcttactttatatttaatttggtaggcatgttttctaaacaaaataagtctaccttctatttagatgatgaagaagattataaataattgcttatagaaattatttgaatatgatatggtataaaggtaactaataagttaaaattatataagaaatactaacaaaaaatgtgaatatatcgtacttttaaagtgtggtagattttctccggtgatattctatccttatatgcttctcaaacctaacctacgatgcatgcccgcgcattcgtgttgagttgtataaaacaaaacagaaaatagaaaaataaatgccaatatgaactacattaattgaaataattggtgaaaatcttataacttattttgcttcattcttttttcttagatattaatgatttttcttgcatcgcatcaattttttaattaagtgcttagattattttttttctctatcgtacgccacagtattatgaatttctctacatattattgcaaatataagcaacatactaaggttaccgtacataatcggtttagaagttatatttcttactattaaatttaatttttaagggtcaagttgattaggttttttctttttaagaaatacaatagatcacagatatcatagggaaacaagacctaggatacatgtatatcatctctgtcctattcatatgtaagtaataattaaactgcatcaatataaaccaaataaaagaatcgctagctagatggtacaaataaaacacctttgatagcaattaaagtatttttaagatttgatagaaaaaagttatcccctaaagaaacacctaccttttaaattacatttaatttgtagatatgttttctaaatatactaaatttgtcttattttagatgatgaagaagattatagaaaattgcttaaaggaagattaaatattatatggcataaagctaacaaataggttaaaaatttatctaagcaatacatcctatgatacatgcccgcgcgaatgcgcgggctaccttcctagtttatgtaatttgaggataataaaaggaattgtctaaacatctagacatggtagcatctaatttgcttcaggaattaattgtctaatttgctcgatgctttgttctcttttctgccagcaaatatacaaaccaaaatgttaattcatttctcaaagctttatttggagcaaggttagagtgcacattctgtatattttggtcaatcaacatattatgactgccttttttttatcatcatttatctgaaaggctgaaacatattatgttcaaaacacctggtatttttttacattttttagtacaacaagaaaatcaagttcctcagctttttgtgaaacactttgtcctgaatgatggaggtagcatcagttatggaattggtctttagaaaatgatggtgtaaggtgatctgatttgttcattgagtaatcgtgcacatgtaatgtggcatgccttcctttataattatgaagccattcttaacaacggccacaagtttcgaaagctgatagaaccaaacaggaatataaaagtgaatttgggcaaaagtatggactgattcttcatatacttggaatggttggggtgcaattcttcatatactatgtgtgtattgtgacatattatttactgttaagacggtgataaggatttgagaggtgctagagggagaataccttcaatactcagtttatttcctgacctgttatgattaacctggatttcaagcattatacaataggagaatatttgaatattttgtggtgtcagtggtagaagatatacgttgaggacttcattaagattaatctagacgatatatttggactacaccgtatgtttgtgttctcactggaaaatacaagctctagtgcagttgtcaggtatggtgacctttgatttggatttatttatgatatttcctcaacaatctattaggttttgtgctctcactaatttcttatctatctcaaaaatttaacagatggttccttaatttgtagtgagtttggttcccgtcgctggtcctatggtccaattgtattttcagacagtccagcttgcatgtggatttgagcggagtgagttgattaatgttagcgtatacagaccaaatatgtctaacatcccctctccgtttgccttctgatatattcttttaccctgtgggaaagatttatgtaggctatgattgaatgccacaatattgcaatgtcaggcatataacacaggggagtgcagaaattctgttgagagaactcaatctggtaatctgctccaagcctccaatctttttgctattgtttgctttggctatgtactggattgaatttgaagatgtttatttgagcgtatatattattttcattcagcgttactggattaaaattcaagtatatcaaattacaagattgcatataagtgagaaggattggggtgatcattgtctgtaattcaagtgcataagacttgctgatctggtcaccattggaactggtctaatttagaattattggtttaaattgaactcctctgtcggtttcctacagggaagtgctgaatgctaatgccatctaaaatcagttccctgcagggaagtgctgaacgctaatgccatctagactctcagtatcctgtgggacatagtgattccttatttattttcttataacattgattgttcatgagccaatatctttagttgttagctctgaaagacagtatggtatgtttattttgctgtcaaaaaatagacaattaattgtgaagtgtaaagttaagtttggactctttatgtaattatttgtgtagcacatgcacataatgctaaggattaatttgattctaatttatctattaggagatttcttggacctaagtaaaataggttccattgaatacatgtttgtgcttttacatctatgcacgtgtaatacactgaaatactttaattcagttttgttgagggtgatgcattggttcagaaattcaatttatgttgtttcaaaatttttgaatgcagataatgtatctctgatggtacaaataaattgtagtcatatgagttgtaagtgatatcacaaaaatcattcagttttgatggcaaaatttactgtattgactgtttccctttatttctacacagattccaagcaactgactttgattaaagatgcatcaactgagcattgttagcaatacaaaattacctgattggcaattatgaatgcatcctgagcatcaccttcagtatatggaggttcatttgttagtcattcaagcggctcttgcttataacagttgtttatcttcaagttccaatttttttatccctaatgtctcattgttttttagaattattggtaaatcttgtacataaaagttatagtctttggaaaaaatttgtagtaagcaaggctgtttctgatttcctaacagctgttagtgtgcaggaattagagataagctatatatgaagctgcagttgtagaggtacactgaccaaacaaattgttattgaagagaaaaaaaatatctaaggttcccctgaatatttcaaacgaattgtgtgttcttcgcctccataataaactcatgtgagataagagttaaggattttgacctactttttaagcaggggcacttcttggatgtcctaatattatgtttgtttagtgcctttaaggagaacagaagcaatgctaggctcagtgtgctgcgtgtacgttgtagcagatggagattgttcatactacggaaatgataaagcattttaaagatgttttatgtattaatgaaataataaatctaatatttatatattttcctaaattttcggtgccattatttagctttttcgaggaataaactaaacggcatatttgcaaatgaaaaataatttgtgaataaaacttttatatacgtgttcataacgatctaaaagcaaaagctaaaaaataaactacgatgaaaaaaaatcttaaaatcaactccaaatttaagattgaaatttcaaattttgacttatgaacataggtataagcgaaaagatcatgttcttatattctttcaatatataatttataatttataggcaatggtaagtcatgtatgtttcttcatatcactcatctgtcatgtatacttgtacgcacatgtttgatttacgttttaaatatcaccgttgcattagcacaggcatgctactagtaattacaaattgttcaataagcatttgcatttaatacataagaaatacacgcttcgatcattgtatgacctagatattccgacatttgtattacatttataaagtccatgggtccaaaagatcatttttatatcacaaaaatttaatttatgctagtcatatcaccgaatgaacacaacacgcgcacacccattgcctatgagcactcaaatagcacctggtcataactctagtttaagcatcgtcatgactacagcttgctcgctcgtcatctgcatcgcttttctcgcgcactaaacgagttagctaacaaatgagccaagccgagcaacgattttagcagaaaaatagtttttcttcattgattttaaagaaatatacgtgtttacaatgaataggcagaatgatatcgttgtcgcataggagtgatgcgaattcgcggcaagttcacgtggtgagtgcacgacttggcaaacttacgacgagtttggagcngaatactcacgcgattgattgattaattaattaattgaccattatttttaatttagcgtcattagctgtcgattaaaagtgattaaattaatttatgccgcgaagattaatttatgctcgtgtcgtcaatgaggctgagttttttccccaactttcccaactcactttcctcgttttccgcgtgtacgcttttcaaactactaaacagtatatttttttgcaaaaattatctatacgaaagttgctttaaaaattcatattaatccattttttaaaaattagtaaatacttaaataatcataagaaaatatgccgctccattttgcgtgcacgggacctcacctcccgaaccagccttcttctgctaaaaagtaatgtaactcacatcaccttagcaggaactctcttctttgaaggttgtccgtcaacttcacctggatcatctcgtctaatcttgtatcgtagtgcattacagaccgggcatgcttctaggttctcgtactcctcaccacgatagaggatacaatcgttcggacatgcgtgtatcttctgaacctccagtcctagagggcagactatcttcttagcttcgtggcagactatcttcttagcttcgtgtgttgttttggcaacttattttcctccaggagaatattctttactagtttcaataactcgccaaatgccttgtcactgaaacctgaaaccatttcttgtcttccattgcaagaattcaagagtggtacccaaatttttgtgcccctgttcgcaacctgggtacaacggcgtcttgtggtccgctagcatacgttccaatttcttgacctccttttcactttcgcagttttccttgacgtcccgcaacatctgaccaagatcatttgcagcgtcgttatcttcaacagccccgtccacctcgtccgttgtgtttccttcaaatccaccataatgagcccagtccagaatgttctcgtcctctacttcatcttcttctgcttgaacccctagctctccgtgtgaggtccaaacattatagctcggcatgaagcccgtctcaaacaagggaaaatgaatagttcttgatgtagaatactccttctggtttttgcatttagtgcatggacaacgggtaaaacccttatgcttgttagtttcggccaccctcagaaaataatgcacatcgtcgataaactctttcgaccgtcgatccgcgtacatctattgccgatccatctacatgacaagcacaaaaatcgataaaaataatccacgaaagtaaaaccaattaaacaataattttatataattattcatgtaataattataaaataacatcacatattactcatgtttttttatatttaaagttgtaaacaaatattaaattggttgtacttattttaatttcaaattaatttagttttctattattttagactaattttctatctttttactttctcatctcttttatcataagtttttataaatttctaaacaaacctattttctatattttttccctacacaaactttctctctcatcatcttccattcaagtttctagaggcaaaaaaaagtatagaaaactaatctctaaatgtaaatgccaagcaaaaaaaaatagaggaggatagattactaaccttttatacacctcaaagttgtatattatcaccaaaccaaattcacaaaaaaatgggcagcacctcccctctcctcttaaaaaaaatgaagccctgctctggatgaaggaggaagaagaagatataggcatgctaactatagatccaggaactaaagattggaactttagtcccgggactaaagatccctgggggcctgacaacctctgataatcggcgaaccgggactaaaggtcacaagattcctttaaacttattaaccaggacgaaaaatggtttttagtcccgggggttttttttttgaaccgaggctattgcggaatttggccgaccgggcaaagatcacttctctagtagcgaaggatccaccggcgccagtgacgggaggggtggatccggcgccctcttccccttccccgcaggccgcgcggatcccgtcgcctctccgtcaccccacgcgcgcggatcgatctagcgcccgctccccctcccgcgtgtatcccggccgccgcttgtctgcccctcacgcactcggatccggcacccgctccccctcccactgacaatgtgggcccacaagtcagcctggtagttcggtgggaacggataccacggttgttttctttttaatatggcatagatatcgcgtgctttagttatggaaccgccggctatatgtttccctttttgtcggttctgttccctttcggccaaaggaacctcctcaatcctttctaattgctattcatcccccaaaaatattcccacccgtgcattgcatgatcgatctcgattaccaaagggatgataatgcatatagcactgcattcgttcgtaaatataagcattttatttagtgcatcttaatcgattcaatcctacaaaaaatatatatacatataaaccatttatattattaaaatagatatagaatatactatttatatttaattacatataaacttcaataggtggtaggtaggggtgaaaacggtaggaatcagtaacatctcttcggaagcgacgcttgatcggtcgataatcgactatatttatcatttaaactactcagcgccgacattaatacgatgcataaagaaattagaaaaaaacaaaattcataaatacccaaaaacggtacggtaaaaaacggtgccctatatacgaaaacggcgctcggtcgatcggaatttccgtaaccgttttcacccctagttgtaaggatagggttagagtcggctttgtgacccgacaaccctttaaatagagaaaaatatgtcacaatgtaatcataacgactataatattccaataatctaagcttttatcagtatacaatacctccttaattattactaccactcatatggagatggtcggaccaacgtataagccagctaatttagagttggcatcaaacgttgaaataaacattaattagtacatacatgtttgatcacagctaaacttttattcaaattagcttgtgaccattgatacagggatgccagcacaaaagtaaactggcataaaacagtttctagagttggcactgacgtaattcaacgaatgagccaagtatatgctgccatgctggtgcctacgcgcaacatttgttgatgtatgatattagtacaaaacttagtataatagaacaatgatcgatagtttaaaaaaatatcgtaatatttggtataataacttactctactgcataattatcatcggatcataacatacaataattgttacgatgacataaactatgtatattcaaaactcttctaataaataatttaatcagatcactcgtctatcataaaaccgtacttagggtgtttagatgg

SEQ ID NO: 9962 - DNA, 35697 bp, Oryza sativa
  unsure (1)..(35697): unsure at all n locations
tcagtaatccaagagcctgggtcacatgttagtccagatcatcgtgaagatggtggatcatatgaagtcgacaaatatgcacatatctctgacagtttttgtttagaaaagttaattgacttaccagttaagaataatgaattgccagaactagccagaggtaatgaaatgtatcctgttgccaagccaagcaagtgttttgatatattccttaacctatttgatttcttaagtaatgatgccagaaaatgggtctggggtagttttagtcacctggaaaaggagtacaagaaagagcttcagggtggttctttggacaagtttcatctcatcaacaaatacatccccaccttttcatcactggttcagcttaaatcccaaatggacatggtacagtttattgttggccctggtggtagtatcttgtccattgttgaggaagaggcatctagtatgattgcttatgcactattgatatctgagcaacaaggaatatattcggaagctgcaattgtaaaggatgaagttattgctggtagaaaaattgataaagtaacaccaatcaactcgatcggagatactcctgtgccatctgcaattttatctccaaatgattctttagaacaagatcataacctatcaagaaatgtgtcatcgttatcatccgaggaatcaacatctggattttatgattcttttctatctgccttaaaagatctgcatcctgaattttgtttgaataatgaaaagctaactttgaagagcaaatacactgttctgtgtatatatgcaaaacaattctacgatcttcggaagatttgttgtccatcagagattgcctatatttcatctataagccgttgtaaagaatggaatgcacaaggtggaaagagcaaggcttttttttcgaaatcaatggatgacagatttatcatcaaacaaattaagaagactgaatttgactcattcttgaagtttggccttgagtacttcaagcattttggtgtatctcaggcctcagttaaccccacttgccttgccaaaattctgggaatatatcaggtctgccaaaattttgagtacttcaaacatttctgttgaatgtaataaaaaactacttataactaatattgtaattctctctaacaaccatgtcaggttaaggaaatcaggaatggcaaggaggcaaggaccaatttcatggttatggaaaatcttttgtttggacgtaatataatacggagatatgatctgaagggtgctcttttctcacgatatgttcttgactcaaaaaatcctgagaatgtgctattggatcaaaatttcattgaagatatgcgtgctatgcctatctacattgaaggcaaaaccaaaaacctcttggagcgtgctatttggaatgacacggcgtttctaagtgtatgtgtacctattgccagaaacggatttccgctagtgtatatgtattatttttcttcataagagtatattcaggatgctagctcttctttttttgtccttttgcggcgacatgatgatagctctaaagttcacaatttgcatttcttttatttgcagcgcatgaatgtcatggattactccttgtttgttggagtggacaaacagaagaaggaacttgtgtttggaattatagattatttgaggcaatacacctgggacaaacaattggagtcttgggtgaagacatcactttttgttcccaagaacctatctccgactgtaatttccccgaaggagtacaagataagattcagggcattcatgtctcagtatttcctatcagttccagatgcttgagttgatgagttctgaggcgttgaacacactctggcttttggtggctgaacttatgttgagtatggtttggttaaatgcctgtttggcatacagtaaatcatctcatgagttcaactttaagtttcattttattcattttttcaagtgtgggtctatcaccatccatactgcttcgcagctgctgtacatagcatttaggatataggttccctgggggaccacaaattttaagcaagggagcggtgactggacctacatataaccaacatgttccttttttgatgagcattaaggtggagttcaccttttggacaactagcttggagtgttatagagaatatggcattcatgtattcatttgtgttattaggagtaggtttctggaatcaaatacatatctaaatatgtgtcaattatagcttgttggttaagcatccatagtggtatgacgtgttattgtcgtcctaaattcctaatgctatttaaatcagtcaatgtctcttataaactgttcacttatttataagttacctcctaaaagatctgtgacaggtgatcaatcgaaaaaaatatttccatgatttgttaggatttagaaaaatgagttgtgattaatctgcatatatccggacaattgtattttgttgatttagatatatggacagaagtatatttctcctgcacctgtgtaaactttggggtcaacatccaatcctacacttgtacctttgcattctttagctgtttacacaggtctcctccccaaagaccaccacgggacttgagctgccttctggtggtcatgtaagctgtcgatactgcacaccaagtggtaagctgtctagcgcttctgtattcattgagatggagatgtcgtatatggtgaatccacaaactgggtatgttaacaagcttaaggaacgggcaaagatttctacaccaagattctcatatttaccccagagcgggattttacatggatgaggctcattgctgataagtgcggtgcggtgctgtgttgtgctcatgtgcgacccggcgcacatcagcaggcttgtcaccacgatggtaaataactaccagcatggaacatttatttatcttgtatgtgtaatgtagcagaatctcttattaatacaatcaaaattagttgctagaattgttttgcttctagttgccctggaaactcattgcaaaagagcttcaatctttttgccttcttagtcacttggccatctagtaaggcatgtctgtttaaatcattgaatgtcacaatgcaacctttccttgtttcaggtttttagggtgacaaatatgtatatgtttttgtgtacgttgattaggttgatactatagttctgatgaaactattttgcaggtatcatattcaaactgagtttgaacttagtttatcaaagatcattctgattttcagaataacaaaggtaacattttgaggtatgtttacatgagcatgatataactacaaaattatattttccactagtccggacaggctgattcttaagttggatcatttccatagcaaaattattgggctatttatggttttttcctctggtgatggaaatcattctgatggactaagtaatcagcatttcttgttgttatcaactgcagtgtcttgttaatttttacaccttttagaaactgcactctccaaggggcatatacacaagataatatcacaagataactatttcttaagcagatttattggtaccattttcatatggcttgttgagaattgagatagtttccgaactttgagaaagttgactgtgaataccataacgatacatttataaatagatagagtaacttttgttacagttgtcgtaaatctctttgttgcatttttcatgttttacatgctatctcgcttgggaatgcaagcaagccagcctgcaagagggttcaacgctggcttgcttgcatattcttatgcttcgttaccctctagaattgttttatttccctaatatgggctccccagctaatgaaaagaaactccagaataatatgggctccccaaataatgaaaagaaactccagaaaggtcttctatgttgctggtgctgcttaatttggcaagttcaatgttcttaacgtccatattataatgacaatattgttccatgctccactgatacaattttcttattcctacaaggtagtcatactttggttcctgagcatttgctgtctattgatggtttgaatcttgttgcttttgcaggaatgccgtagtctctttaaccactgcgatgtggttacatcaactaacaagaatctaacaggtcctagaggtggtacaatatttttcaggagaggaaaaaattaaggaagaggactgttcttttttctcaaggggatgaaaatgaattgtgactttcaggacaggataaattttgttgttttccattcaaaacaactatgccaggacgggaggtccccatggtatatattgcttccttggtgataactctgaagcaagttgcaacacctgaatataaagcatagattcaacaagttaagaaaaatgcaaaagttttggcaacagctttgcttagaagaaaatgcagaattgttactattttagatgatggaaaatgattagtacatgccgactgctgggcgatggcacagataaccactactttgggatttaagaacttcaggcctaaccggtataattgtgcctaccattttcttaattaatttattttttaatccgtgagcacggttgtatattcatttcattaggcctccctagaaactgaaatgtcattgcatgataaacatatactccttccggtttcataatttttgatttgtttgacaatgacacggtctgtgtttttctattataaatgtaatgtattcctttcttccaaaaaagtcttatttcttttttcaccaggatcaaggtgtaaactcattcatcgtgtaacacaaccaatgaacatgcaaccaataagtattaaaatgacttattggattccaataaaaaatttaatatagcacatattgactccaaataggacttagacttttagaaaaaccaaaaaataaaataggacttagaattttggaaggagggagtatacaataaggctcccatcggatggcctaatcagtaaaagaaaaagccagattttgaattttcaaacttaattttgagattgattttgagatattttcaacgtagtttcttttacaacattggcttttaagtcaccaagaacacatttataaaaatttcatctataaatttatttttatttcctaataagccgttttgacttattaggaaataagccaaacgatggggacctaaataaatacatgtttacttttattatagagctttgaaagatagatccatatatgttattctagttcttttaaactaaatacgtttaaagttattgatagtcaaagttataaaagattgactgcaatctttgtccaaaacgttatttcctccgtttcataatataagacattctagcattgtctacattcatatagatgttaacgaatctagacatatatacgaatctagacatgtatatatgtctagattcattaacatctatatgaatatgtgagatgctagaatgacttacaatgtgaaacagagagagtaactattatggaaccagagggagtatgcttactaaacttgaaacattagtgcctgttattttcttgagttgcttaaagtcttgtcagtggcactattcctcttggacccatttgtttctatagattacatgatgtgtacatgcatatagtttataagtagtatgtaaactagatggatgggcgcgccctggcgcgccgcctgtggatagttggattgccgggtgtaaacgttaatgtcatagcattatcagttcagttaatggagtggatatggtgcaaagaaactgacttagactgtaagagtataagtgtcatattactaaggtttatgaaggtaataaaatgatcagcaacataatataacatagcaagttatacagaaggtggtgcatcgttcattgggtatatgagtaaacaaaatcgtcaatgacagtgataaggttgttcttaacaactacactacaacagtaggtgaagatgatgtctttaacataacatttacagagaaacaagcagcatatagcagggatataaaggttataaatacttagcatagtggggttgtcttacggcagctagtaggtgttgataaagtattttcatgatagtacaaggatggttcttctgcagcgcatgatcaatgcattcacgttatatgtattgttgcttgtagctgattcgtttcgtagaagtggaaaatgcagattattcccacttgtattttattggccgttgcaaactctgaccatcctgcttttagattgtaccgatcatctgttgacttgtgaagaaccatggtggttgatgtgtttcctgcagtatgcacttgatcctttgttgtcttgtgttgggtgagtggctgaatgtatttttctgagaattcttttgtgaagtactgttattaaaagtggatgttaggcatttatattgcataagagtggaatggtagtgagcgaaagatctctccactcttgtcttacttcatgaatgtctggttgatagtaacaagtagaattagaatttgcttgagtgatgcgggaatgtcgcaatatctttcacgtagttctttagttcgcttgatagctttatacttttgttgtagtagcacatatctttgacagtcctttttggttggctgtgtaaaacaaaagtagaaataatagaagtagataagtatttcagttagtatgggaaaaaatattgatgaattgcattgcaattagtatgtaaagtatttggacctgtagaagatgatccagtatgtttgttgaggctgagttggatgtggtggtttgtgtgctgtttagtcttgctagctctatctgctttttctacgtttgaccaaagcttcgtctgaagtgcgaacggagcaagaaagacctgaaaaaaaagttaaggcaatgtatgaacgaatttgaatggcaatctgtaaaaaaaagagaaagaagtggacacgtgcaattggaccaaataacagaaacaatcaaccatagccgaaaacgtggtcagaacataaaggaaagcactaaacactcgaaatggcaggaggaacaaacacgggcggtgacacagaagaagagtaggatgatgattaccaacagcagatgtcctatgaaagaacgaagctataaaaaaaacaaaacaaggaaacatatcattggaacgaatataaatataaaacggggtaaaaattatagaacaacaaaaaaaaagagataggagaatgtgcatttttttattccaaaagaaccaaatagataaatcaaatgacacaagcacgatggaaacatataatcaatgagaaacaaatatcccccgacgaacaaaaacaaatcaaagcaaaacgataagaaatggtaaatataacaaagaaaaaaaggcaattaccaagcaagaacgaaggttcacatgatgtgatgaagatggcgtacgacgaatcactgccttgtgatgagctctagcagccgatgcagatggcatgaaccaatgaaaccagcaacagcaccaaaaacctgacaaaaaaacatgaaaaaggaccatgacaaaacatgaacctgaactaaactaaataaaatgaaggggacaaaaaaaaagaaaaggaatgggaaagaccattaagagaacaacaacaacattgcaactagggtaactatcacgagaagccattcagacatacttataaaatgagagaaggagcaggaagaacgagaacgtgtacaggcatgcagcaaagaaagacatgcacagtgacacctaatcaactaacagtaatagaactcgccagcacacccacgcaaaacagagaagggatcgcatgattgacacgcaaagagatggatcagcacaaacaagacactataataatcaattttagcctctataccccaacatatctgtgtattccaaaaaaaactcacagaaaacaaaattttatcttcttcacattatataatcaagaaagacaagtactaaacgaaaaaacaacaagacacagacagaaagcacaaaggagccatagtgaaatagaaggaaaactgaaggcttaacaagagagagaacagagggagttaaccggaagaagccgtttacaataaccagcacgcgtgtgtaacacacggcgctaatccaggagattaaccggacagccgtgattagccagttataaccgcgggcacgaggaggcttcaacgcaaaccagcgacgtgtaaggcagcgaaatagccagaaaacaattccaaaaaaatgagaaaaccgggatagttaggagaattatcattaatcatagctgaaataactctgtttaacaataagaagaagaaagcatttcttggtacctcaaggccaaaagcaacattttattcttacatcagcactaacaaacgaaaacatccacttgtgtaagatgaataaatcatttttccccaactaaggtaaaaagcacagaaagatatgcatggttaacatactaatagagtgacgcatcaatgcacagtgctcaatcaagtcgaaaaatttcagaaaggtagcacaagtgctagtgcaggaatcacactaaaagcaactgaatcacaaagaacaaacatcccaatagaagacagaagctgacacatgtaaatccagggcgaagaacagacgcgtaaatgaaaagcaccacccgaatctctacttgttttgttggtcactgctacctgaggagaaaaaaaaggcattagcccgcgaaggcgatgtgttcgggcagcgcaatgcccaagccgcacggcgacacagcactagctgctgcagcaaagcaaaaccacacccacgacgccgcggcggcagcggcggcggcggtggcggaaaccaaatgaccggaagaaaaaaaacccaaatggctcgcccgcgatcgccggggcggctgctctcaacctcgacggcaaaataagagcccccatcttacacaagcctctcagttgagccccagaaatcatctgacattcagccacattattaaataccccctgaattcttatagtttccccatgttcttcatactctaaccatttctgcaaccaatcaattttcatgacccccagcccttccaaccaatccatgcctaatatggcatcatacccatttagaggtattagcttaaaattggatcgatagcatctaccttgaagccaccaacacagtcaggaagttgtttatcagcaaccctgaccttaactggcggagttgtggacaccactcctggaaaatggtgaatcatctgttcatcgacaaatgagtgggtactcccagagttaatgagcataagaagttcagtgccttgtattaatcccttaactcgaagagaatgggctgaatcagtgccattccaagcatgaactgagatggtcatgaggttgttctcctctgggttagactcaaggattgtctccaaactgtctgtttcttcctcaagttgaaatgcctctaactccaccacatgcaactggacggtctgagcacacttatggtccttactccaacgttcaccatgggtaaagcataaccccttagaacgtctataagaccttaattgagaaaccttgtcatccttgggagtagttctggcagactccaagattctcttttcctctccaggcgttgccacaggactcttctgacatacagtgccctgaactggtctagtgaaagccttggtgaagctagtaccctcagccttcctgaaagaaattttcttattcccatccaagatttcctcctgaagcatagccactgagcaagcagcatccagatccactggtttctgaatcatgaccactcctctaatctcatctttcaatccatccacaaacttggttaaaaaataaggaggggtgagagcattatcataagaaagcaggtggtgcattaagttgtcaaacctttcaacatactcagctacactgccagtctgtcccacatgaatccattgccttatcagggttgcctgtctatctctggtgaacttatgacagaccatgtcacacagctccatccacgaaatgcccaccatctggtgccgcaccgattgcaaccaaaatgaagcattaccagtgaaattcagcaaagccaccttaacccaattggctggatgcacaccatacacatcaaagtaaatttcacaattatctcgccataactgggtattctcaccatcaaattggggacaagacatgggggggacattaccaccgttgctagccataccatagtatccatatgctgatgactagaattttcaagagtgaaagggcttgcagaagtgaactgaggaaggcgatttccctgtggagtaaacaggaaaggatttggggaattaccattgagatcatcttcattcaacatctgactgggtccttggctgccttctgccttgaacaacaccttctgttgaacatcccgctggcacttctccaaccctgcctggatcgagttcactctctttgccaaatcgctaacagatccccccaactcgctcaccttctattccaccatgggtatgcgcgattccaccaccgccttcaacgactgcagctccgctagattcaacgcatcggactcctcccgtctcctccctcttcttctctgcatcctccatcatcttcaacaagagatcgagcttcccttcttgagccatgatttgagctgcttgtttcgtgatatacctaggtcgctccaggatgaatttttcccggtttcacctcgaatccagccaaccagatcaagggagccccaaaagcttttgcggaatcacactgattaacagcgaattcccacctatctaatggaattttcacgggcggaccaagggaatcaatgaaaccaggaaaggaatcgagggctctgataccaattgttagctacctaacaagaaaactgaacaagaactcaagaacagatagatcaacggggattccaacgaatttccgccgtttccgccgccaccaatcgccgcggatttctttcttatcatcgatagccaaaaacagagttttcttccggtctcacctcaccaaccctcccattacaggccaaaacataggctacacaataacacacgcttacagagcccattccggcccagacaaacgaacattagcctcgcgaagttttctttccctcccgccatcagcttccttctgcatactacttccaacatcctggctatcagcagcaggcgccttaacagttcaccgcgggaggacgccaccgctgggtcaccttctccgttgccaccgctgtacagacctctccaagctgcggtcaaggctcggtgagcatcctggacacccaagaaccccatgcatacactccattcacttagaaactgcctccaactcgacatgcacgcacatccgagatcttccaccgctcggacccaccggcggcgctcctccgatgtccactaaccgaggaaagtagaggaatggaatcgcaatatcatgctcttcatttcgtcttttggtcgcgcccccaaacgagtcaccatttgttgccggcgccggcgagcagaggtgccgccatggctgctctgctgctagatcgatgggagaagaaatcaggacttcactttgtaaatttaacaaactgtagagtcttttcctcaaaagcacaagacacatagtactgttgcaggacctattcgtaattattaaaaacaggaaggactcttaatgaaaacagctattcaacaagtgctgaattgttcaaatctactttaaacttcaaaaatgcataactaattcatcttaactccaatttaggtgaaaccaatttctgtagattcacgaaaatatgaacttaaaagttatgacataaaaagtggtactcacagtatgaaaatttatcactaaaactcatctaatttaagtcacacataaagcatgcacaaacttataaaatgcatataaaattaatcttagctcaaattggtgcaaacttaatttctatagatccaccaacatattatctaaaaacaaagtaaaataaaatatgtacatattttacatcaaatgccttaaaactaatatctttaaaatgactagatttagataagctgaactttagaaattcatatagaattcatcttaactcctttttgggtgaactcagatcctatagaatcatcaaaacatatacttccaggttgtaaaataaaaatatattcttactctataacaatagcccttaaatatttatataaggaataaacaacctagtgtacatttcaatttgtaaaatttgtagaaaattcatctttaatccaaatgaagtgaaccaaatttttatagaactggcaagtaatgagcttcaacatagtaaaataaaatatggcagcttctatacagattatagctctaaaccttaataggtaacctaagagctaatcacatagtaatggttaggcattatataggtgtagtggtatttaaatgcactctaactaaattcaactaaaacttaatagaccagataaaccatagttccattcctatgcatcaaaacttatcacacttagctcatacataaactacttctagattagcatagtgaataattaacatagatcatgcccctatttataaaacgtgtagtaaaatactaaaaactctaaaattatggaccaaagttaaattagttaactcaattactcattttgtacatcactggcaagatggaacaagttatggacctagaacctctatatcatacactatagggaccatatgcctacaacccgttacaacttgtaaaatacattagaaattcatagaaactctaaaaattgtgaaaccaaatgtgttagtcttagagaactcatatattcaccccagcaaactcaaatataataaatatcaccttacaaaagcatttcatagcagcacctaagcaaatactatactataccgataaaacttctaaaatccataactctcaaatggaatgagataaaatggaaattctttcacctaaattcagtttaaaccagcacctacccactgtgcacagatcatgcattttagagcattttggattttccgcatatttcggtgtttaatcgcataacatgtaatttatatagattgtcgcaataacggtgaagaagtgaattaggccctgacttttaccattaacaaggcaagtcccacctccctctctttgaatacattgctcctatgttttggaggttattgaaaatgtttgcaaatcctgcatgtcgattgtacattaatacgctaaaaccttgtaaaacttgttagaataacacctattgattgcattatcacttgaactccacatatatccataacctacattcttagccctagaaacaacaagactttatctttatatatatgagttataatgacactatgatactacgatgcttagccatgcttagtatgattttacttgtcatttgggatcatattaacatgaaaaatgattttatctaatttctggacaaaaatgaataaatggagaatttgagaaacaaaatgatgaaaaaccatgaattttaagtttgggcctcaagtggtacacatgtgttgattagttgtataccgatagggggagagtgtgcccaagctacttaaggacttcactcaatgtctgttcattatgtatatagtacaaccacatgtgctagttatgggatagtcctgtagatggccaaaaggcccgaggcccgacggcccggcccatggcacggcattttggcccggcccaagcacggcacggcccgatggaggtcgggcccgtgctggcccggtccgaccaccgggccgtgcctgggcccctccaccggcatgttgggtcggcccggcacgatgtgccggcagctaggcccgatacacaaaaaaataagggagtaaaaatagacatattatatgccatagatgaaagaatagggatctaaaatagactttttttatctacatatgtcagccaaagaggagggatggaaaatagacttattttagctatacatatgtcagcccaaagaggagggacggaaaatagacttattttagctatacatatgaaatagcccaaagagaagggatgaaaatagacttattttaaaaaaggcccgatgggccacccatgccttcgggccggcacggcacgacccaacagctggtgggccgtgcctgggcgggtggtgcagcccatgggccggcacgacccggcacgaagtgcctatcaggccgtgccggccggatggctgctgggccatgcctagccatggctgggccgggctgtgtcgggcgggccctttggccatctatagatagtcctagcttagtaatctatttatgatttagccttacattctagtaggctggtgtgtatgagttagtggttagctcagaggagcttcctgttacagctgaggcagtagtctaggtgactaagcgtgtccaatacaacggtattgtgccacgtggtgggtttactcgagggtagttcgtcaccacggcgttaagtttaaggcgtgggcccgccacttaatggttctaggtcatatttccagtatgcctaggatggaggaacgcgtatacccttgaattttgtttttgatcttgttcatacccattccgttagttgactgtttaattcccttgaaaaggaccattttgtccttagacatgaaggaaacatgaaaattgtaaactactcattccttctcaaattgatcatcatacaatagaattcaaaatttctcaaattgatcatcctataaacacatggacacgaatttcatcaaaatacaattaatgcagcatgagagaaatgtgtgcatgctaaggtgtaattgggatgatgttttaatcgatacatgcattgcgggagaatgtgtgcatggtgtcttgattgatatggtttaaattattcttggtcttagtgcataaacttatatgatgatcaatatgggaaagagggagtataattttgttacataagactactatattcatgattttttgttgtacaaggtattattcatggcaaagtttatttttacataatgacgtaaaaattaatatttatttacttattaaaacagtatatgtagcatttttatggtagttcaatattttcttttcccagttgtatatattatatagaaatgctttccaaagctatgtttatcgtttataaaatgctgcacgtacttttttaatatatattaaaatttttatgtacaacaaacttatgaatattatggtcacaaaacaaatttctatacttacatcaatatagtccataaatttctacatattccacatatattgaagggtaaaactgacttttctacatgtattaaacgggaaatttaactatttgtcacatttaggtttttcaattatccaaatacccttcttatatttgctcatattttttgcccatcttagatggtggcttcttaactatttgccactttgcctatgtggtatgccaaagtggcaacacaagagaaaaaacagtgtgggacccgcttgtcattctctcccctagctgtccagccggcgacgccagcgaagaggccaaggcggcggccggaggaaagtttgacggccgcggcagcactctcctcggtgcacagagtgggtcctcgtcttcctgcaagttcaaagaaaacgaaaccccttcgttcgggagcgcgttttgatgcattcatccagtggtgttcaccatcggaggtcgccgttgtcatttctctctctatcaggaccatgttgttggtcgcgtttctgcggttctgattttctttattgccaacctccatcatcaatggatgagtctaatcgtggggcacatcctaccatagtccttattaccgtttgatcatcagagcatccacacccatgttgagtattacgagaacatgagtatactatatatgcaatagtggtttttattcatcctaattatcattaaaatttctaatcaatacttagcctaagaaataatttatctgtagcgaagcatgtgtatttcgctagtacagtcaaaataacatatattttgggaccgagacgatgtttttaatttttttttaaaagaagttcaaacaatttgctaacaatcagccaaaaaaaaatatccgccgacctggcccaatcaacgcctcccctcatccacaccaaccatctgcgctgcgctccgcctccaccgccgtccttctcctctctcccccaatcaccgcccacgccacccaccaccatggcctcctccgcctccgtttctcccgccgccgcctcccaccaccgcctcctcctcccctgctccccgcgccgcctcccccgcccccgcccccgccctcgcccgcgcctcctccgctccgcccgcccccgcctcgtcgcctgccacgccgacaccctcctcccctcctcgtcccccgccgccgccgccgccgcgtgcgcctccaccgcctccgccaacgggttctccgactggctgcgggagcacgggctgccgccggggaaggtggccatcctcgaccgacccgtcccctgcttccgggagggcaaggacctgccgctgcactacgtcgccgcggggcaggatctcgaggtgcgttagcaagcggggatttcggggttgattccggtggtaaatggtgtgagatctttgactgtggtgggctgttgcaggctggggatgtggcgttcgaggtgcccatgtcgctcgtcgtcacgctggagagggtgctcggagacgagtccgtcggtgagtgctcttgtgatctattctagtgttgaattctgtagtttggttgctttggggttgagaggaaatggcgatttttttgtttcctggatgcacatttcacagtatatgacctgaatttagcactgcaatagtcctcctgttgggggcattttgtgtaaatggcagaatctggttttaatttatctgatgtccaccttataagtacaccgaaatcagtaaagtatagcttcacttcaaggaattcataattgttagtaagaagtaagatataggttgaattagttgactttgttaagtaatcttctatctgttcacttcaatttatttcaaattttcaataccatgtagggcactggatttgatattgttaccatcaatattaatatgtgtgtgttttgaggaatgctttttgaatgtttttaatccgtgttcaactggttcaagagtctgaatctgccggtttgatatgcaactttagctaatcatatctttcttgcgtatcttcaggatataatcaagtattatcaatctctctttgtgtgaaatgttgtgcattgtaattaaacaatgggtttatagcaatttcatctttcaaccttaggtgctgattcgaattttctctctttttaagcagtctcttcacgagattgcattttctttactattgcatttgtcataaaaggtaaggtcacaatttttaataaattaatcatcaaacaatgttagcatgagagtaatataagaaagtagccctatgtttacaactttgttaaaaatagtttaatgtgaaattgtggatatgtttacattggcatgatatttctgttagataggtcttccatgcattatttcttcagtccttgtatatttgtttgctaatacctgatctgtgaaacttatttgtggtttatgtctgtccacttgcgctaacaccaaaagaagaatatggaaattgatatgtccttttcatgtatggtatttgttttcatttttgtactatggtaaccagctgatattttgaaccatacagctgaattgctaacaacaaacaaattatctgagctggcatgcttggctttgtatctcatgtatgagaaaaagcaaggacaagattcattttggtatccttacattaaggagcttgatcgccagcgaggaagggggcaattagctgttgaatctccacttctgtggaccgaaagtgaactgaactacctgaagggtagccccatcaaggttagtgttttttcctatccactatatgtcaatatattatgagcacattttatgcagtgtcaagtaatatacaacttagattttctaatatttcaggatgaagttgttgcaagagacgagggaataaggcgagagtataatgagctcgacacactgtggttcatggcaggttcattgtttcaggtgctttcttttgaccttccaaaatgttcctgtctctgggattctgttgcactagctgcttgttgttctcatgtcaactgttatgcagcaatatccttttgacatacctaccgaggcttttccatttgagatcttcaagcaagcttttgtcgcagtacagtcttgcgtggtccatttgcaggtaacataatgagcaatgagatttcatttatcaaaaaaattagatattaccccgattggttgttggttggtttaaataattatctctggtgttgaactgaagtttaagatttacttagagtgtacaccatttatgaacagaacagtttagtgctaaataccttgcccatataatagattatacaagcctcgcagtatttttgtcaaattcaataaatttggaaatttgcttcttcaaattatgtagatttgttctgtaagtatttttttttgtttcatatgttttatttgcttaatacttcagtttgggatcaacagttcatagcatgccagccttttattttattactggataaatactgaacctgctcgtcgctaagttatttttatttttcattgaagaacagaaagttagtttagctcgaagatttgcgctagttccattgggcccaccactattgacctacaagagcaactgcaaagcaatgctgacagctgttggtgattctgttcggttggttgtggatcgaccatacaaagcgggagaaccaataatcgtctggtataatattttcttcagatgcattaaaattcttgttgtacctcatcatatttggcaacttcagtgcttatttactgtttgcatatttcatttctgttgtttgtgcatctccactgtaacgtcaagctatgcaaattgtacaggtgtgggccacagcctaactctagattgctcctcaactacggttttattgacgaagataatccatatgatcgtatagtgattgaggtggaatttgttttgctattgttctacattcatcttcttattggatttgtgtaagcaatactgaatcattgttacaggcatccctaaacatagaagatcctcagttccaagagaagagaatggttgctcaaagaaatgggaagctggctatccaaaatttccatgtgggaactatgatttcctttttcttttccatttggaatgcaactacaaatgttgtatattgacatgccttaggtgcattaggtctgtgtgggtaaagagaaggaaacaattgcagaaatgctgccctatttgaggctaggatacatttcagatccagatgaaatgcaatccatactttcttcagaaggtgatacatgtccagtaagtctacttgcccttaattggccttactattagaattttcagaattttcagttacggttagaatttttaattacacatatgagataaaatggagcagggcaaggtgacagtgtcgtacattgttgttttatttattacatttttggggtcattatgcttgcgcagttagccagtttatagtttctgccttttttctttacaagactccaaaagcactttccaatgggctcagtttttatggggcttctgcctttaaatattgcttcaagccttgaagacccagaagtattgatctagtgtcattagtcattactatgtttgtaacaaattgaagctagacaaacaggcatttgatctgaagatcttgtgttatgtgaaatgcaataattacatctggttgaacatttaggaagagagaacatttcacaagtagataatttggaaaatgcctttacatttgaagctttcttttaggccatcacatttgtcattccaggtttttaggatttcattcaagttataagttcatctaacccattatttatttttagtcgggttgatctaaggtgcagattgttcaaaactaaaccggcttgctacaaagcaaatccatcatacatttaaagtgcaatattttgccatgcaaatatcccacagtagcatgtagggtttccattgagtttttatggaagttgagcaatggttctaaatagactatgtggtaatagtagtgttatgcataacactgtgtaaattgtgacatgtttccaactatgattataggtcagtccatgcacagagcgagcagtacttgaccaacttgttggatacttggagtcacgattggctgattatccaacaactttggatgaggatgatgctatggtaacgagttgcaaagcactatgtgtatgtttttttgtaaaatctctgatacgtaatgtaatgaagagcatttcatttctctggtattgggcagttggcagatggcaatttggaaccaaaaaaggaagtcgctactaggcttgtaagattggagaagaaattgttgcatggttgtctccaggctgctaatgagttcataaatgatttgcctgaccacactgtgtcaccttgccctgctccatttgctcctgaattgaaataaggtaggcaaagctcaataagttttcactgcttcccaaagtaaatttattagaccgtttactgtgtaccatgttgatgtaattgatctaatagactgaattttatggatgtgcagaaaagtaaagcatgcagcgagcattaattcttgcaacatgggtgtcacttctaatggtgttctcattaatgatcacatccagttgaagtgcattagaaggtaataaatctgataaattgttactcctttaaaatacattcaagtagtaggatttaaaccagtactaatattgctctggtattataatttttttattgttagaagtttagaacctactgaaagtgtgtaactgaaagataaaataccaaataaaacttatgattcaactattccattgttacttggggtacattctcccaacccttgccgtgcttttttttttcttgttgtgcgcgaacaaaaaatttaggaattgtctatgaatctctgaatattttttttctatttctgaactttcttaattttaaaatttaaaaatagacccttctaaaacttatttccaaaatctgaaccttttaggcacgcgaaccagggtggcgtcgcaaaacaacactgaccccacccacagcgggcgtgatagttttattctaccacgccaactatggtggtgtggcaagacaatgctaaataatgctaccatgccagccaaactggcgtggcagtattgtttttcctactgaaagtattgtttggcgtgaccaaaaggttcaaatcttgaaaataagttttggaagggtttatttttaaaattaaaaataaagaaggttttaaaaaataattcctgaataattggtgaagataacaacatagctatgtcaatggtagtcaccacacctaaatcactcaatactttttaacttaactaaagtagtttcttgagcataatttagctacttcatttcttcctaaaaatagttcctatagttataacaggtcatttggaacataaaaatggcaagaccagaataagaggcacaggaaatcagtaatgcaatgacagaatacaggaatgccctctgtcctgtacgcaacacaggaaagcatagcatggtaaaaatagtcccatttggtctgtgccttgttccttagtggttgggcactgtaaattaaatggccaatttttgacatataaagtagcctctattctctcttatcccagtcctgtcttttgcatctccttatccctcttctcacctgtgcaaacttgaggggagaagccagaccatccgctatgctgcatcaataactttggctaggttgcactgcaacacgcacaacagtaggagtatgtactgtgtagaacttactgtgagaagtcggatgtgtgatcccaggtcccagctgaataaatttctctcttttttttcattttgaaaaacatgtaatttgcagccatatactgcaatcgatttggggaactaaatttaaaagacagatgcatgaatgaaccacaacaagaaatcaaaatacagcagcaagaagtatctgacaacatcacaacaaatgagcaaatcgatttcatgattcatgtgcatgatttgagaaatcaaaggtagacctctagatctgatgcaaagacaacctaagcaaagtatgctgcttttaatgatcaagcatacgtctctgttccttggtgtcactctggagaatggctcgagaccatcatttctcatgggagccctgaggtaatgccagaccaaggcacacagctgctgtcactgaaggtggggatggatgacttagtgctggagctgggctgctggggaccttcctgaactggccaagctgaaaagtcactggatctgtatttgtttttggtttgaccggtggtttggtctgtctcttttctcggacatagaatagactgtcttggatgttgcagtgtagacgggggcggctaatgggcgggtgaccnncccaggcgatcaccccccatcccccctatacactactctctttcttcctcctctccttcttttcttcctactacaccataaattttttaaaaataaaaaacacaaagttgaaaaaatttatgtatagaaatactatatataaaaaaattgaattcaaattcaaaattgaaacgggtatgtaaacttttgacttataaactttgcgtctataaactaatatttaaattcaaattcaaatttgaaccgggtatgtaaacttttgacttataaactttgggtctataaactttaggtgtataaactttagatgtatagaaatactatatataaaaatatttgaattcaaattcaaatttgaatcggatataattcaaattcaaatttgaatcgggtatgtaaacttttgtcttataaactttgggtctataaactttaggtgtataaactttagatgtatagaaatactatgtataaaaaatatttgaattcaaattcaaatttgaataggatatataaacttttgatttataaacttgaggtgtacaaattttaggtgcataaatttactaaaaaaggaaagtaatgcggtgccaaaaaaggaaaccaggtggagggaggggattgatcgatcgccgggtagcaatctcgagtgtagactgtggaccatatttggtgtgcattgcttgtttagtgtgaagtggtaaagataagggcacatcagcagagtgtagactgtggaccatatttggtgtgcattgcttgtttagtgtgaagtggtaaagataagggcacatcagcagttgcgtgacattatgtcggtggcatcatatagggtagcttcccaaaagttagttgtttatctgttctttcaaaattttgtaaatgaatcctcagtagtgcttctttgcaggaaatctgaagcctggctgacgggtgtaatagggatttcactgcccgcatgcagatttggcgattagttgcattgcacacaagtgtgcacggatgttttgttaacctagtggcttttatattcactgagtagattctgtacattctgatgattgactgagatggtaatgccaatgtacatgttcagtctcatttgtcaatagagattctgtacatgttatatttttgggtgttggcatgatttccgccgttctcttttcatggcctgtttgatttttagctgtctgactacacagcagagaattgtatgcaacagtttactgtgatggctgccaaggaatcgcattcatttgaaatgctccaccatttttctgtctacagcaattagtctccctaccctgatgattaatacctttttactgggctgatttcaaatctggatgatccacaaagcatgaacttgagaacaaatcgtgctacataatttgttttcttcacattctgccactactgattaacagatggatgaatcgtgatgatgaaccatggcttgatactcgcgggacgatttgagagcccggtaatattagcagagatgataacagaaaggaagaacttggagtaaatttaggtgtcagtcattttattgatcctttgctggatgaagaatgctcctgtttaactctctgatggaacatgcccaacgcagtgatacaactacgatccttcaaacaaattcgtgacaccaccaaacaggaacaggtcttttttatagtccactcttacaagcagtgtaagtggtggcagctaaacacatttatttcagtgggcctcaaaaaccaataatctcatttaattcttttaatatcaatttttgtttgtgcatctccttccaactctctctctctcacacacacaccatctatgagatgaaataacatgatggcaagaggtccatttcccgagagtaaactagacaagagttgatggccatgctactgagtgcctgagagtcgtttccatctgattatcctatttcatttccccttgctgaaatcctctaaatgattttccttttcttcttgcaatataatgcatatgtacatgatgctcgaccacgaagtctgaccaatattggattgggagccaacaggaaatgataaagcgatttagccacatgtcgcacatcttagtatttaagatcaagtctccttgtggggtgaacaactcatgagtgaacagtggcttgcgctagttcattgctgtagtgatgatacagattgaaaaaacgccggctgggagaatgaaggcatcttcatctccatccatactcttcagcacatggattctgggctgataggattctactacccagcagctgagcatatacacatggtgaaacacataacattttcctctcattagctagggaaagagcttgaatgcttgatgcatctgcttggcctgagcatgctaaattaatccaatccgttatcatgttttcttcctcttgtaatgtattaagttgcttgtcgcgtgcatgtaatcaagtaaaaaagaactatactaattggattggaaggcgcagtgaaatgttaataaacaatattccacccaaatcatgagttaaccatatcgattagttcctcggcattaaatccttacttaattagttgcagattgatatatcatgcccatgcaacatgatttcatcctcacctttcaagtaagcatgtgtggctgcattgtgttatatgtgtaaaatggccaaattcaagaggaattgagcggatttgttaaactatgtgaagaagaattatacgatacatataccagaaccatgcctatgggttgataaattatctaaaagtattggacgttaaagtaaattttcaattaaagtatattaaacaagacataatttccccgcaaaaaaaaatcaacacatataattatgcaccaaagatgggtacacaagctacctcattttgtcttgttagaatctttaagaaattcgtccagcggagaattgatttacgcctgtttgatttttagctcagtctgactacccagcagagaatagtatataaaacaaaaggagtaaattgcattggtagtacacaaacttgttaattgcgtgtaatttagtacataaacttataaaatactcgttttagtacataaacttgtctatttgtgcaaacgaggaccaaaataacttgccaatgttgattttacgaagttgatgttgattaggatgtgatgtacacgtgtaatgagtatgaacactgctatatgtacgactgctctatccgaccggtgtatgacggaacggcagagcagcacaatacttaacggcgtaagtcggaacagcaccagcagcacagctcttgacgtcgtgtaatacgcagtcgtacgtcggtcggacacttaagtggtatgtatagcattttcgaatgagtatgcatacttacatgaaaaagtttttgacagcgtatatgaaacaatttactgtgatagctgccgaggaaccgccattgatttggaatgttccaccatttttctgcctccagaaattggtctccctaccgtgatggtaaataccatttactgggcggatttcaacatctgagtgttccacaaagcatgaatttgacagcaaatcactacttcgaaacaacacatcagtatcggttcgacaaaacctaccactgataatggtttttcatcctataaaacactcgcactagcattgatgagaagataccagtgtcggatcatataaacactactggaaaactgatttttcatgggtggtgtaaaattcacaataatcccggtttaaataggaaccgagactaaaattatttttagccctggttcaaaagaggcacgacactttatgatctttagtcagattggtgttatcaacctggactaaatatcatttttagtcctggtttaacacgttgtcaggctgtgtcaggccctccactatttttagtcccggttgtttataccagccgggaccaaagattgaaaaaaaaaccgctcccacacgcacctcctcttctccttttgtccttatctccttgtgctccccgtccttagtctttatctcttcatcctcgtcctccactcctcctctcctcccctcgatcccagccgcctccccttcccggccctctccgaggcgacctccccctcccctctccttagatccctcctccccttaccggccctctccgtcagccggcggtggctggcgaagccgcgtcagtggcgtcgggcggaggcaggcagcggcagacggcgggcgcagccgcgtcggcagcgtcgggcgaaggcaggcagcagttgggggctagtgacgtcgtcggagccgcgtcgacggagccgcatcggtgggaggaggcaggccacgggcgtctatggcggttggtggcgggcggagccacgtcggcggcggcgggcggaggcgcgtcggcgggaggaggcaggccgcgtcagcggcggctggcggaggcggagcctcgtcggcggcggcgggcggaggcgcggctggcgggaggaggcaggccgcgggagtcggcggtggcgggcacgattcggtggtgggtggtggcgatttgatttgtgaggtttttgtgaatgtgttgtgatgtaacatttgatctgtaaattttttatttcaatatgatctgtgaatttttgatgtcaatttgagtatgtttgaatttgtgatttgatgatttgtgatgtcaaattgagtttggtgtgaaatcaatatgcaaacaacaaaaaaaacaatgaaaaaaaataagaattttagtccactaaaactgggactaaagatgagtatatttagtcctggattaggcgtcccggttgtatactcggaattgaagggagttacgaattgggagtgaagatggtttctccagtagtgaaacaaccggcactgattgttccacgtaccatcagtattaatttataagaacattgatactgataattaaccaatcggtgtcggtttaagtcgcttggagtggatgagctggcgtattggtgggaaaagtcacctgtcacttatggtcattacttcctctgtccaaaaaaaactcaacctcgtactacgatgtgatacatagtagtacaacaaatctgaacatactctacgtccagaatacaagcaactgctattctaatgattggacaattatgacctaaactggatgtgtcagatccaactctcatcatgatggccaagtggaaataacccgatctctctcacatacttcctccatctaaaaatgcaacctacaaggagatgtgacccctccttcttctagtacaataaatcatgtgacccctcctagtacgacatatctggacaacgtatgctcatattcgttgtacagtaggttgaatttttttgaactgagggagtatgcaatcagcgatatcgaggttggacagtatacttgataaaaaaaaagattggacggtgcaggtaacgtgctattacagaaacaaaagccgaagcgaacgaaatcaaacagctgagaaactgattgtgatcaaggagattttatagcgacttaaatttagtaaatccgattcctttataagttttgtttgtgcaactccttccaacttgcttatatatacaccaccatctatgagatgaaataagctagaagagatggtggtcatgcttaggtgagtgcccgagtgtggtgtatccatcttattatcctatttcattttcccttttgcagtagtccagtaaaaaaaatgtcctttcttcttgcactgcataaatatgtgatatttgctcatgatgttcgaatcatatgggattggaagccaccaggaaatgataaaatgatacagccgtatgtgttgctcgccgtgtgcatgtgtttcacacatcttacctagtgaaaagtaaatttcaaaatgctactaggatgagccacatcatcaggtgaacaatagccattggatcgacaaaaaaataaaatagagagaagagagttgaaccattgattatagaggaaaggaaaagacgaagaactttcgaagctttccagcaatgcggaacgcgagagaaagggaaaagaaagaaaagcagtattgaaagagagtgggggcgttggctggtttatggcatgtgatataatttgcactatgcacactcagtaaaagttattttataaataatccttcaaaattatttataaatggactcttggcttataggctcatatgttatctatagataatccttacaacctactaattctaaattatcactataacgttaatatcacaaagtttgttatcacataaacatctaataaaattttctatgattttaatgttgtaccctggatcacctctttagcgtaaaagctactccctccatcttattttgatcatctctaaagagcacaaaggccaatattgaaattaattcgtatccaataaggtgctctatcgtttcattttcaacaaaaattaattcacactttaaatgttgcatgagttgagccaattaaaattaatatttattggttgcatgcatgcagggcgttgctccatgcacatttactctttacacaaataaacaaagaaatactttgttaggtgatgattattttgggaaaacctcaaaaatctaatgtgatgatcaatttgggaaggagagagtgataggtggggcttaagaactagtgtttcatctatacctgttgctttcaggtcattactgatccattacacttctcccaagcacatacttaacaaaatgaactttgtttactgatgccaatttaaataacatgctcatatacacatataacatgatggttaaagtcgtgcgaacgtgtgacatcataggccaattcaaactgaaaggtttgaagaaggttgcaacaaccaactatgccacgtcagatagacataccaatctcacctatgcatttaatgtttttaatcttaaaatatgtgaatagctagctcttgcatgagacccaattctctttattttttaattttttcttctccacataagtttatagcctactattatacttgctctaggaggtgagctaggctaggtactatttggatcgggcttttctttcatgggttgcatcgggagctagagagtagtgcaagcaaccggcacatcgcatctttatttcctcgctcctcatccgcagcctcgttttctctttcctctggcaccacagtctaccggcgatgggccgacctcgagccagtgacatcgcagcctcccaaagaatgagatgctcttcgtcaacctcaagggaatcatcgctgttgctgcttgccacagccgatccaagttcatgctgcggctaacagtgtatctagaatttaggatattgatggtccaacttaaattttttttaaacaccgtagatctaatgatgctaatatataatacaagtatagataatgaaataaaccaaaagtgtaccatgataaataagacatcttaaaatacataaaattagtaattaagtaaaattttgacttatatggacaaaaaagtttgaagaagattaccatacttcttctagcttcttcttatcgggtctacgcaatatctctatctttctttatttttaacaaccagtaatctacaatatagtactaatatcacaatgctcattgcacaaaagttaaaatcttatatagtgaaagtagcaagctttcttgcacaaggatgtgccacatcattaaaaatatattagccgtcggataaagagttcggataaataatggtcattagatcgaaaaagtgtatgtattaaaaaaaatcacaaatgagctaaacatatggaaatttttggaggtttctgttatctattgtcctagccaagtatatatactttgtaaacaaattaacttatattaaaatcttattaagggttaaggtaaactaatagaccatatataaaagttcttaaacaggatcaaaagtcacgcagagcgcgactatatgactagtttaaaactgaaaattgaaaagggtaaaaaacctaaaattgaaaaatcaaagtcatcccgtcggccgtcgcggtcttgcggaacagaacggagagagtcggagacgcgcgcactcgcagccacgcaggccggccgggcaccgggcacgtggtggcgcggcgcagacagcggctggctgcgggcggcggcagggcgggccggcggcggttggagtaggcagcgtcagttaagccgtcggccgtcgcgtggttggtcctcactcatccgttgcgaatgcgatgcgtgcagcggcagcgagaggtggtggcactcagcatgcggcgtagcagcggggcggccgtgcggcgctcggcgagtcggcggccggcgctcgcggagtcgcccgtcaatgaagccgtcgccgtgtcgcgtactcgctttgcctaactcgcgagtcgcgtcgttaatcatgatgcgatacaatgccgcgcgtgagaaatgaggagtcgacgaggagaggtgcgtgagtgcgatgacatgtcatagacagtgagtggtaaatcattaattggcacatcttaaaagtgacaaataatcaaatgtcccgatcattggagtcattgcaggcttacagctcaccgggttcactcacctcacaccttcacccgtataaactaaaaatgtccgttccaacacctacatggagaaggataggatagagaacagccaacactatgataatagcttaacaagaacatgcatatattggggataaaatgactccactgccaagaagaaatcaagccatgtccagaagcttttattccattcaggattcagctcatcatttcataaaaaaaaaagaaagaatggaaaacagcaaggaacatgcatgtgattgaatcctgattcccctccgcggttgccttgcctgcatgcactcgatcagcagcagcatctgcagtggcgcggtgctcgctgccgcagagacctcatcttggctttggctccaccgatgagccgtggtgtccccttcactttcttcttcccaagaacgccatcatctacttctgtgaggctcctcttttgccctccagaacaatcacaaaccaaagacttgagtttacggagcgctcctgctttaagtctagagagttcttcaagtttatcggccttgcgatttatggaataatatagtgagcaatcaactttttcccgtgcatcatctgccgcagcatctgcctcctctatctttcgtaccacatcagctggaaaacactgtgtcaatccataaaaaaacacatttatttgttttatctatatatttcataaatattttttggttgcgaatgttaatttatacagatatgaattcatctactaccttggagggtaaccattttaccatcatttgaggggtcagaatcatcaccataacatttgcatacttcgcgtgatccttgataatcgtgccaatgccaggaacaagcttgtcacattgctcacgcagcatcttgccgtatgcatttagcagaacatcagctcgacacagctcaccagcacaagctataaatgttcttctatcaatctggatggatcaacatgaacatgataaaagaaagcattacagaacttggtcaggctgtaaatgacaattgattcaaagcagcatcaaccatctctagccattaaaaatcctggacttagaaataaaccagacactaaccattctgaattcatgaatgaataaatttttcaataaaaaattgacatcaattagacacaatagagatatcaagttttgttttctctgggtcatcgggccaaccaaaaactcaattaattgaactaggtcagaattcaatgaaaggaaagtgtgataactgataactactgtactagctaagggcaagttttatagtaaggacagttgccacgtttaattttatctatttaagataagatgtgatatatatatatatagacaatacaccacatctacactacctccaacatactaagccaaatgattttatttgtttgtccaatcccctctttctttcatctcatttttcttagggtttgtatggaggttgcctctaacatgaggtgtggctcacttactctttcctcacttaggcccggtttggttcccaaaaacatcacatcgaatctttagacacatacatcgaatattaaatatagataaaaagaaaaactaattgcatagtttgcatggaaatcacgaaatgattcttttgagtctaattagtccatggttagccataggtgctacagtaacccgcatgtgctaatgatggattaattaggctcaaaagattcgtctcgaggttttcaggaaagttatgaaattagttttttcattcgtgtccgaaaaccccttttgacatctgatcaaacatccgatgtgacacctaaaagttttcttttcgctaactaaacaatgccttatttcttccacctcatcatccaattctatttggtatttttagaggcaacaaatcaaccattacagtacttgccctaaatgacccacactatgctaccaccattggtttcagtgtttcactacttggatccctacacatacagcataacaactggcacaacagtaagtctgaaattaagcagaaaatataagggtgcacgctagaaaagggcacaactgcaagaaagctcagttcttaccgttattttggacatattgattctaaatttagtcatgcaatcttttaacacttgaggtaatgggccaagatactggctagtgatgttttccctttctgctggtacaaattcacacagaagattccttaacccccacatcagttcaggcataacacgggtggagaagtgctttttactcccggttcgtaacccccctatagtcccggtttttcaaccgggactacgaatatgggactaaagatcgctatctttagtcccggtttaaataaccgggattaaagatggatcttttagttccggttggtgttaccaactgggactaaagatccttctttttagtcccggttggtaacaccaaccgggagtaaagagagaatagcggcagttccagatggtccccttttttttattttctccctattaacaaccaaatttggtaatatcggcatcgggaaagaagattagatcgaagtaaagtcggaggcggagatcgagttcggaaacagagcaggaatcggttgtagtccagatcggctacgattaggatcggctgggtctgagtcgggctaggtaagccgatgcagccgattccgacaatgcaacttgatgtatgacatcgggttgaattgaggtgcttcaaggtgattgccgcacatggatagagtcctgagaaggcaattgtatctattaattaggatgttttatgtaattttcttagagatatgcttgggcaaaagtctgccgcaaagacttatggtatcttagagtttgttagagatagttgtcgtgtccgttatggacatatcttgtaattttcgggtataaatagacccgagccctatgtaacttttaacacacacgttcaatacaatctcggcgcatcaccaccttttttgctttagttttatttcgacgagttcttgctttcgggttgagctgcatcggtttcgatcttcaacaagaggtaaaacttgtaatggcggtttgcattctcgggattagtgcttccatctttatgacactttaatcttgtttatgtaattcgtcgagttatcatatatcctacataatccttggcaatatcgatatccaacctacaataggctaacatccgtcaatagaagacagccgattaggttaaataccgatgttgccttagattatataggatatctaccactctatgacacatccaacggcttgattgtctagatattgtccttcttttcatacttatagctgcatcagttaagtttgaccttatgagtcgtgattagaatctcaatctctagcccgcttcttggttgctgattagggtagtatcggagtttcagccgatcttacctgatttaactacttttatccctttacgttaagatcttgctgcatttaagtatattaggcttgtgtttagtatattctacttgctttaatatcttaatatagagtagtatcggagtattagccgatacatgctagatctatctgatcggctatgttatgaacgtatatagtctcattattaatatatatttcgatctaagtgatttatactgtctcggcatggcgaccgatctatcccaatcacttgatttaagtatatatcgatataaagattatatattggtaatatctgcagccgatcgagtagattcagtccttccttatttattaatgactgccgatcgacgcatatatgacattggctcaaagataaatgatgtcatcggcacctagctgatcagctatcatttatagatttaactgcggtttctttgcttctatttcttgttgattacaggatcaaatcaactggcacgctcatacattcgaaggcgagctttggacctgcactggagttaagcagatctcccaggcctcgtattttctgtcaacactcccaaatcttattttctcccaaatcaagtgggaagcatatccccaaatcaaagtaacatcccaaatccacatcacaaataaagtaacatcacaaatcttaaagttacatatatacacaaatcaaatacatcacaaatcctaaaaaattacacacaaatcaaatacatcacaggtcatcttagatccatccaataaatcacaaaattatacatgtgaatcacaaattaaaaaaaaagagaaaacaactccgttgctgccgcccgccatggccgccagcccgccgccgccgtcgccccagcccgccgccagcccgctggccgccgcctgccggatgggaaggggaggatgggcaggaaaagggagaggaggaggtggaggagaggggaggggatgaggaaggggaggaggtggaggggaaggggaggatgggcaggaaggggagaggaggaggtggaggagaggggatcggatgaggaaggggaggaggtggaggggatggatcgggatgaggatgtaggaag

SEQ ID NO: 9963 - DNA, 34381 bp, Oryza sativa
caaccgaaactaaagtggtgatctttagtcccggttggtaacaccaaccgagactaaagatcctcggccccctgacatcaatctgacaggggatgaaccgagactaaagaaccaactgggactaaaaatcatagaatgcctcttgggttttcaaccgggactaaagatcatttttagtcatgggattattatggttttgggtcgacccagcaaagatcatttctccaccagtgtaatatgatctttctgggagacatcaactttctagcaagaaaaggttacagagattagtcaactgtgactacgattcatgcaaagacaaaaaatactactccttccatttcgaaatgtttgataccgttgactttttagcatatttttgaccgttcgtcttatttaaaaacttttgtgaaatatgtaaaattatatgcctacataaaaatatatttaacaatgaattaaatgataagaaaagaattaataattacttaaattttttgaataaaacgaacggtaaaacatgtgctaaaaagtcaacggcgtaaacatttcgaaacggagggagtactaaaaatagatgtaccgaccagatcggtttcgatggcacctctaagtttttcatcctcaacaatcaacggttttccacatttacagtatctcaagatgcgctcagcaatctcctcaggaagaccatcacaatgccacactgtcgactcatcaatcttaatgaatttgatcaataagatgagctggtaacaacagtcacagcatgatattaggtatacaaaggttaaggcgcaaagtcacaaatgaaacataggagccctgcatctttccaacagattgctttttgtcattattattttctggtgtagggtggctacttccgcattattattttgcagtctaagattatttgattttagtcgtgatgtacttttagttgtagcaaactctttaaatgacagtgatagccaaggaaaccacataaaactaaattaagctagtttatctacggatatgagtaataatcctggatgaaagtaccaagcagaaaactctctctaatgaaagtaaatatggtagaatcaggaagacccaacttgtctaacaaaatcaaacttggcaaaacgcgaccacagatgctgcaaaataacaatacagagtgaaaaatcataagaataattacagacaataacctgcaattaatgatgacttgggatatatattgcgtatacatacctgttcagaacaaagtgtttgaaatgcaacgaagagagcgaatcccgacggcgtcttcagcaccactagattgtccacgtattcgagttccatatatacgctcaggccttctttaattgatccagttcacaagagcacaacaaattaatcctagttagttcagcgcacactcaactcgattagggcaactattacagtgacgctttgcatctggatatcacaaaaaacgtacattaaaatcagtgggactgtggggtacaccagtttacaacaatatatatatatatatatatatatatatatatatatatatatatatatatatatatataattataatgattcgatcatatcaggaaatgcctcacacaggaaagaaatatttgctcatggatagatcgatgctagagatgactaaatcaacaagatcgttgacatggaccatcgataccaccacagctcgaatttgactacaatatcaagctactacctatatacgatatcccgatccagatcatcgatgccaagaaaggactcgacgatgcatagcaaaacgaggacccaatgctattacaggagaggtgtaggaaggaagaaagcccgtggacgcatgcgcccgcgtacgtacctcgagtgcaggctgcggattcagcccacggtgcacacgaggtggagggtggggttatataggagcattcctagccgcaaatctaaatttgatccgttatattttccatccaattggatggctatccagaaaaaaaaaatcctctccccatattcctttttcactttcttctatattttagtattacattccaactaacgttaataacgcaatatatactttataatggcaatatctgtaaatcttgctaaaaaatccaaatttattgcattacaaatctatatctatatttatatctatacctaattaaaaaatacataagggttccgacaattttttttcgtccgtgcgtattcttttcgccgttttttttttcgtcgtctttttcggttttattcccatccgcttcttttcatgggttggcatggctgttgggcccgaggatggtggcccgaggaggaggaaaggaagagaggtggctgctgggcccaagtagagatagggatgacggcccaagagggagggatggcagcccaagagggaggagaaggaagaatgggccagatttggcccagaattaggagagggtttttagtttgtttttactttaaattaattattaaaattatatttgtattattaaaattagcaattgagctttgaaaaattcaaaacaagtctagatagtatggttcattcgtgaagaatttaataaaaaatatattcagtattttattttaataataacatgttatttaattctaattctaatctatacctctatacctaataaaaaaatacgtaaggatttcgggtgatctgtttaattgtcgggtcaaaaccgcggttgatatagtatatgtatcttccatgtaatcacctctctcctttttacacatatattacttgcactgtgtatatgtgggcctctcctggaataagtctactttccctccctcctgtcaaatcatatttgcgcgcaaatttttttttcctcgaccactagcacggaacatgcacatccggttgatgaaaaatcaaaactatagcacctctttcttcaacaattttttgatgattataaaatcttataatgaactagtttttaattcaaaattttaatttaattatattatgtacacaaaaatcctaattgtaactcatgatttttttaaaatatatatattcaagcaaattcccacattgaatttcaccttaactagaccgtataacaacaataagattaaaataaatttcagccgttgcaacgcatatacattttttctagtatatatcaattaccctaatctcatttttatgttcctctgtcatatttgtccaatcatatttctcttcctctcttctttatacctatcgacatgagagagtgatagtgcaggctcaagtgtgggcgcgggtggagaacaaaatgtcgacaagggtggcacgggtgcgaggcacagtcggcgtaggcacgggaatggggagctagggtcggcgttggcggcacagcctcgagcgttggtggagcaggcataaggcccgggtggcacggccacaggcgtgggcggaggagcgggctaaatttgggggtttctttcaccgggatagtgggcgcgctaattttggaggcactgatgcgtatcagctgcaatttagttgatggattggatgggatagatgagctgctgagaatgctctaataagataatgttgtggtctaaaaatggtgaggtattggattcggttttgacagtgttagtgatatgccctagaggcaatcatagagatgattgtatcatatactatgtttacatatttatccgatattgttccttgaaatagataactcattattggttaatgaatatgtgattctttcatgagactctttatgttatgtgttactatttctaaaggattcctgatcaaatatcatatgtggaacaaatatgtttagatgatcagcatatgtattaattgatgatcatgtctcatcgatcatggtatagagataccaaaataataatgtggacacatgttagtgaacatgttattagatagacccaacatgagacactgcaagagccatatgtgttgtgtcatcagtgatctcatttagtgttggtgttgaatccatagacctgaggttatcatggtttctaacatgtgtagtaacttactcagggactgctaaacgctactccgtaactggatagttataaaagtagttttcgggtatgctatgaaacatgcagtgggatatgaataatcaagatgggatttgcccctcctatggagagatatctctgggcccctcgatgttatagattatggaagtgcatggccataccaaaggtgattgaggagtcaatcacaagttatataatctatcaacaggttcgagtgaatgattaagctattagaggatgacacatatctagccttgagcttaatcgatatcgtgaggcaaaggggttcatacaagtatacactataggttcatccgatatgatctttatgtatgcccggtgggtcaatacgttctgctaggggcagctgttgacgcgtggaccgaaaaggagttttcgggttacagccgagtatatatgaacctacagggtcgcacgcttaatgggccggaataaggggattgcatagagatccaatatgagcttaattcggatagggatccgaataggagtcctacgggccttggaggcccgagtgatagatcctatatattcgtgaggggtgtgaccggcagaggcattgcatcacgtgagaaaccctagccgtcacttccctccccgagtaaaaccctagccgcgcgcgggtgctagcacatctgcgcgtggcgttccgtccctgtacgtgtggataccggtagaggcgccgctggtttgcggtgctgatcggcgtgggagtacggcgaggagaacgcacgaggaggagaaggtcgagccggtgcgatcgactacttcctctacatcgacgcgcactgcttcgcgagagtttcttcgacttctcagcgtcttcttccgctgcgcagcgcgtcgagtggtaacgatctatgatctaatatttgcatggttcctggtttacgtgatagaaaattttgatttatgctatcgtagcctacgcgtatcccaacagacagcataatgtagcttggtgctctggcggcttggctgatgttcaaagtggatagtcggtgtcttgctcgtttttgcgatgcctttggcaacgatgatgtgataattgtggagttggagctgctgtgtcgctaagcgacaaggtcggcaacaacacttgcctcacgaagtcaaagcctttgaattacttgcaacaagctctttatcaatggctgtttttttgggctccgctattgtccttttttcacggtcttagttagaatgttgtggttgtggtttttgccagtttctcctaattaactgtgcattgtaaggtttggtcatgttttcttcttaaaatatgacacattcttctctatataaaacgccgcaacggcatgaccgttcgaaaaaagacaacataatgtaggggcctaatgtgcagcaaacatatatttttgcatacaactattggccaagttttagttaactccattaactatccaagctgtgttattttattggctcctttttgtgatttgcatactggtttacgctgatgtgctaatgacatgggactaaatgagcgggtatgttggatgtttagatgccatatggcatttaaactctcttggtgcgcacgagtagcggcaaaaggagaggaggaggatgagcgccattttataggccgggggaggaggggaatggctggcaagcaaggtggccggccatcaatggcgacagtttgtcggagattaaatttagcgaattaaatccaaattgaaaggggcaaacatgggaaaataaagaggaggaagagaggaaccgatttttacaatcaactagtaaggtagcccgcgcattcgcataggcatgtatcgtagactgtgtttgagaacttataatgatgaaatgttaatcggaacttataaaagatcattttatttatttatattatttgagcacatttaaaaaaacattaagtaattggactattttctctaattaaaggaactcgatgttttatgcagtggctcaaactattcatatttcagttagttatttttgtttacgaagtgtatgtttaatttagctatacatgtttcaaaacatagcatggtgcgactctatgttgttgagttatttctttttcttttggcaaattaaatataaaaattttgttctggtactattgatttaatttagctatgcatgtttgtagaatttttcataatgacataatatttattgtcaaaattttaaggtatttagatgtggtgcaaagtgcatgggtggactgtgcccaaatgctataattcttatgcagcaaaatatatgcatatataaatattacattgttagtttaattataaatagagaataattagatagaaatcagaaatgtatagcttataaaaaaattgtagttgtttcaacattgattgtttctcttctagtttagtagctacaaaaataaggaatgggagggcagtgttttctacatgtgagatagaggaggtggagggattttagtgaaaactgttgatgcaaaaacacgaggcctggaaaatctgcttaacttcagtgcaggtccaaaaatcttgcttttaggttcgtgagtgtgccagttgatttgatcctgcaatcaacaagaaataaagacagaaaccgcggttaaatccataaacgatagccgatcggctagttaccgatgacatatcaattatctctgagccgatgtcatatgttaattgatcggcaatcatgaataaataagaaagaactaaatctactcgatcggctgtagatattaacaatatgtaattcttatgtcgatatatacttaaatcaagtgattgggatagatcggtcgcgatgccgagacagtataattcacttagatcgaaatatatactaacaatgagattatagatgtttatagcatagccgatcagatagatctagcatgtatcggttaatactccgatactactctatgttaagatattaaagcaagcaaaatatatcaaacagaagcctaacatactttgttgtactaaaatcataacataaagggctgatttagcatgtcaattatgtcaattatcaattatcattcataagatataaagctaaaccaggtaagatcggctaaaactgctaccctaattggcaatcaaaagcaggctagagattgagattctaatcacgacttataaggtcaaactcaactgatgcagctataattatgaaaaaaaggacaatatctagacaatcaagccgttggatgtttcatagagtggtggatatcctatataatctaagtcaacgttggtatttaacctaatcggctgccttctagcaacagatgttagccgattgaaggttagataacaatattgcctaagattatatagaatatatgataactcgacgaattacataaacaagattagagtatcataaagatggaggcactaatcccgagaacgcaagccgccataacaagttttacctctagttgaagatcgaaaccgatgcagctcaactcgagagcaagaactcgtcgaaacaaaacgaaagtaaagggtggcgatgcgccgagattgtattgaacttgtgttgttgtattacatggggctcggggtctatttatacccgagattacaaaatatgtccgtgtcggacacgactcttatctctaacaaactctaatataccataagtctttgcggcagacttttgcccaaacatatctataaggaaattacatgaaatatcctaattaatagatacaattgccttctcaggactcaatccgtgcatggcaatcctcatgaagcacattaactcaacccgacaacgtgcattacatcatattgtcggtattggctcaatcggccaacctagtccgacttgaactctgtctatcctgatcatagccgattcggactttagtcgattctcgctctatttccgtaacgatctccatctcgaattccgctttgattctatcctcatctccgatacttggatttccaaatttggttgttaacacatgcccctcaagtccggaatatttggtaatgtttcggatttgccatatccgtgtctccgagagtatcgctcattgccatttttccgaccgttaccgcctcgctttaaatactaaccgtcgtccccgagaaatttcacaccattagctccgttttcaccgcttaagccaaccttgtttctttctctccggcgatcccctcggagcaccatacgtccccaaggcgatttcccctccggccaaatattctgcccgcggagatgtcgtcctccgctagtccgttcgtcgcgccatcggccgaatacgcagaggtaagtatccatcggctagatcctctcttttcgcaatagattggttcttccttgcctcatcttgttttcatcttctctgttcttgtttacatctgtagcacttgtccaatctggtcgcgatcccaagtttgtcacatgagcatcactattttcttggtccgatcggcaatcttgatcccactgagttcatcatcgccgaaaccaataggatcccttttagattggccaacccgaatctaggtcactagaagaataccttcaaatcttggccttctcttgagaaaactttccctgagaaaagttgggctgtgtggtataagtgtgtatcggctagcaagcaagttcgctgggacgaattaggaatcggccaagcgcttgctcttactctagcaaattcggccaaggatgaacccctgatggcctccgcagcatacttttggtccaacaccctcaacgctttcttgttcaaccaagggccgatgattcccactctgctcgatatcaccatgcttactggattggatgtaactgcatcggctaaccccatgagcttgaacaccaaaaaccagtttgattttaggaccaagagcataggtggctggtctggctatgttgctgcatacacgggcaaaggatctgtcacccccgggagcacacggcttttcttctgatgtggcttgagaaattcctcttccgcggatcaagctgtggccctaccaccaattggcaattcttagccgaagcccttgagaccaagaggcagttccctctgggtaaaattcttctcagctatctgtaccaaatgttgagcaatgcatcggccaagatagccacaggctcagtagtgggtgcaggtggaccatggtggcaattgcaaacatggcttaaccttgttgtcatgatggttatgaatcgaccacctttaacatagtctgaatttccaaggttggagcccactactaatgatgatggggcgccgatgcctatcatatggtgaagctgcatcaacaccagccaattctggagcaaagctatcggctaaactgctcaaagactggttctgcagtttctatgagggcttccagagagatgtagggtttggttcccatatgaggattcagtgaattttgatctcccggtagacttcacatttgaggatatcaattctgaaaaatttgacaaatctagagaagtcttctcgactgctattagtccatgcatccttcctgtcggcatccatcaaggaagaaacatacaagcttcttatgagttttaccatccaatgagctcagctagatagtttggaatgggacagctatcaatcgacttgttctttgccgataagatccagtacagaggagaaatctcatcaacattgatgatggatcggctgctcaacatcccaggacctcctttaggcagtatcgagaacatagagctggcaaggttcaggagtaggaattttgacagatggtgggggtgaatggaagcagcatatattccatcagccggcctctatgtacatgatagatttatttccagatgttgtccctcaggtatatttttactttgtcaattctgttggaataattgttagccgacttgaatcttgactaacttctttctttgccttgcagacaacagaatcttctcctcctcgcaagagcaacagtggcagggacatagaatatgctccaggccttctaccaaatggaggtggattagctcccccagtcatcggctatcatgcccccaagacctcaagtctgcttcaagggcaaatgagagaaccagccgatgttggcaggttatgcattcgaaatcatgaatgactaatgcataaaataaagatatagaatatagggcatttatgctcaaaggagaggaataataacttgccttgctccaacgcaataaatccgagatagccaacctgattatccaatgcttgaaataccaaaggttgccatccaattataatagactctactgaagaagaggaagaactaaattcaataaaagatcgataagcggctaggagagctagggttcagggtatagtatctcctttatagggtatagggattattgggctatcatttgttggcggtaggtttaggtagtataatagctagggtttagttatatgagagtcgattgtggaataggatagcatatcggctaggctctatattttatatggaggttccagagggttggaggctagaggggattaagcaactactgtcacttatattttatgtgaaggctctcgtggtttggatgatagggaatatactagatatttgatatggttaaataggtatgtggctaatatgggtcaaggttgggctttggtagaatagtggttagggtttagttgtttaggccggtatcgagataggataaatatcggctagggttttgggtgtttgctagtcgtcattagagttgggcaacatgacgactagatttggtatcttctctagccggtgtcggtggataatatatcagctagagaaataggaggtgggtgcaggtttagtggggcggaagtgttactccgacaaccgtgagttgtgacggagtggctaagattacacagagcttgagagcaaactgtgtggcctgctgtggaggtcgaggaaatagtgaagctccaaccgttgtacgcgtcgaggcgtggggtgctagagtatcaattcaaccttgggtttgggttttgctaggttttacaaccaacagtttgacgtcatggccagtagaccgtacggacgtccacatagaaggtgtaaagttttaaccggcggcttttagtggctaaagggtattttaaaaataacaggaaatatttgaaaggtaaatataagtttcaattataagtttaaatcaaatatttattcaaatggtatttgaataaattaaggaaattcaaataaaatcttaaaatagcaaatttgatatcaaaatgaaggatttgaatttaggtccaagttttactggaatcggattacggtttaggagatatgggcttctaaagattggattttgaattaaatctagaaattgcgaaatagtactgtagggggcccacctgtcattagctgtcctttttctttttcttttttttttctcttcttcttcctcccgattcctcttctctttttctgttggcaaccgagagggagagagaggagagggcgagcggggcgccggccctccggtggccggaatgcggcgacgccggtggcatatcgtgttcccgctcgatgcgtactcgaggaggtcggtggctggtagagaggaagaggaaggaaaccagaacggaggcggcaagaacttgctctgaccgcttaaagaagtgatgatggtggctgctatggagtgggagagaagggggaaacgggaaaaatgggctcgtcggagggaggcgaagccggtggtgcgaggagaggggaagaggagctacggatggggagatcgaccgacgacgtcgacgatcggccatgggaagagagagacggagctcgaagagatcggtcgatgtgggaaaaacagagggggttcgttcacttatataggccatgagaggcggtggcggatgacggttgtagaggagaaacacaaggacgattttgcgacggcggcgtggaaaagaaggaggcggcgccggcttcttcctgcgattggttgggcagtgatggcgtgaggacgtggcggccgtggaagagttgggcggcggagtagggcgcacggtacggcatcgacgtcggcgtatgaggtcagcaggtgacggtggcacaaaccacggcgacggcgacgctgtgggcggcggcgcactaatggcgcacggcagcggcggctgtggcgctacatgcgcccacaggaagaggagggaggtgggaggatgcggctcagcagtctgggccggcttgggccgcgtgagtgagagaaattcggtccaaagttaaaaaggaggaagtctaattttcctagagattcaaataattgatttagaggaatttggacggctagattttgaaaaggatttgaattcggagatattgatacatggagaaggattttaaaataaggatgctctaatttatttgagtgcaatattttgagagatagaatataacgggatttatttaatgcactcaaatgagagggaggggaaataaataggatgttagccgcaaattatttggcaaggattttggggaagtatttgaggctaataggggacttggattttggatgaaaagataaaacctattttcttggcacaagagtaattattcacaatatttgtaataatattattcttgcaccgagaagggtattctagccacacgattcaaatcggtggctaggtcaaaaggaaggatttggatatttgaattgaggtttaaggataggtttaagatcaaaggattggttaacaattaattccaataagattggaattgctttggtttaggttctagcacaatatgggaaggtttcttggaccataattcataatagtaaaaaggttttcaaactaaatttaaataaaagaaattttaggaaaaagaaggttttagattgaaaccaaatcaagaaatacctcaagataaatttaaaataaaaatcacaaaagattttgaacatcaaagagagattttatgcaagttaattttaggagggccctctaattatattgtcctaggtttaggaggttattgagaacataagaatcatcatgatgcaagattagaaaatagttaattttcaggatgttacatgtcacttgaacacatacatgacgtgtgaaggggtgggaagtgggtcttttccgtttttatattgttaagatagcagtagaaaataataagtataccatgtttaagttaaaataatcgatggttaggtgtattatgtaatttctttagaatttctaagatttattgtaaactactggaaaaaccatctttggtcggtcgcccaaaaaccacaatagtcccagttcgaataggaaccgggactaaagattatttttagtcccggttaaaaactttttgatctttagtcccagttgatgttaccaatcgagattaaagatcatttttactcccggttcaaagaagttattgggtcaagttaggccccaatcatcttagatctttagttccggttctttatactacccgggaccaaaaatcctcccgagcgcacgtcgagtcctctctctcagttttatagataagaccgataaaaaccatatccacttcctctctcattaaaaaccatctccactctccagcctcctcgatcccatctcaatctcaggtgttctccttctcgatcggctctagcatttttagtcccggttagtaacacgaaccgggactaaaagttgattttttttttgtctcggttatttcaccagggactaaagatttatactcccggttgcaaaaccgggagtatagggggttgtaaaccaggaggaaataccatttctccaccagtggtagtgtcacatggtggcttaggagtgttcataggagtcccgtgtggtggtttgagagtattttgtaggaattttagttgacttttagcatataatggatagatatggcatgctaagttgtcgaaatgtgtgcctaatatatctctacatgtttctttagggaatatatttctacaagtaaaattatactggtgtaaactacatttttctgacattgtagatctattttatttacatgccagtgaagttattatatagcatgaaacaatataataatgtcactttcttttcataatttttacaagctaaattatagttaagaggtgtattaaattctaatttgtgattttagttataataatgacacaaatagaacatataatttcatccgatagcaaaaaaaaaaacttcctttaaagagaaacagagaggagttatgtacatgcgtatgcacgggaagaggggacacctctttgtaagaaatagaaaaatcaaactaatccaagtatccaacggcttggagtggtgtgcctattaattttagtgaaatcaagggctaggtttttttctcagattttttctaatttattggagcgtcacgtggcattatagaagcatttatataagcatcatgtgacagcttagaagcatttatagaaattttcacggacttttactatataatataatagatagattggatatcatcgatataatttagcgaaacatatttgtagaattattgaaggtgacatataatataatatgccaactagagatgaggggagagagggaatacgtacgtacaggaggccaggaggggaatgtacaggtggtggggaccagtgtggagagaggaggattttatttttttatttgatctaatggttaaaaatgttggagccaccaatttaaaagaaaatcaacggttatatttttagactgtcacttggcatcttaggagcgtttgtaggagaacacgtggcggtttaggagtacaggtggtggggaccggtggggagagaggaggattttattttttttatttgatctaatggttaaaaatgttggactaaccaatttaaaggaaaatcaacggttagatttttagactgccacttggcatcttaggagcgtttgtggagaacacgtggcggtttaggagcgtttgtaggaagtttaatggacttaggaggattttattttattttatttgatctaatggttaaaaatgttggagccaccaatttaaaggaaaatcaacggttagatttttagactgtcacttggcatcttaggagcgtttgtaggagaacacgtggcggtttaggagtacaggtggtggggaccggtggggagagaggaggattttattttttttatttgatctaatggttaaaaatgttggactaaccaatttaaaggaaaatcaacggttagatttttagactgccacttggcatcttaggagcgtttgtggagaacacgtggcggtttaggagcgtttgtaggaagtttaatggacttttagtatataatagataaataatagatttggaggagaatcgatcatgaagcaagatcaagggattggaagcgcttgagttcgtcggctgggagaagaacgggtggcggctggggaagacgacaactcgtcgcgtccctgggtcggctgggccgagcccgagcaaggagggaaggtaactggggtgaggcggctgcagcccaagggaaggaggggagagggggattgttcaggagagatggtccgagggagaggatggccaagagggagggagagaaggaacaaattcaccttatatccataatttgtcaccgagtttaaaattcatccacaaaccaaaatactagatataatggatctctcaatttacaaaactggatcacctgaggttctaggtagtattatgcccggttttagctaacctggcaaactgagtcagcgtgagacccatgcgggctccacatatcaatggcctatcttcctctctctctctctctctctctcctctcttctcctctctccgccctctcttctactctcttcccaatcatcctggatgccgatcggccgaccgacgccatgaggaagctgttgctgccggccccacgccaacatgaggaagttgctgctgatgcatgattggacacggcctgtgtgaactggaagttgaggggccaagcgcggctttggccgatggactccaacaatgacgacggtggctccgatgggggcacacgacggtggtggcacgggtccgcattccagcggccacactccataagcacccgatattggctctgtttaaaaaggaaagattatgaatttctgacatcaatggtcacatggcttaaattacaactgactaattcctgagaggggcgacaacgacaactgacaggtgggccccacacggcgcgcccagaggtagccagtatggtgcaatcagtgggaggaggcgcctatgcctgatgatcactgccagcaaccatcggtgcggcaagacaaggagagggggcaggtcaggaagaaatgggtgaggcctcgcaactcactgagacgtggcgggggcagaaacgagatgaggcagggatgggcgacaagggggacagtggcattccattgatctccaggctcaacaaaggggtggatgaggacagcgaggatgaaggtggtgaaaccggcgacgacctgtaagtggctgcggcggtgccggccgcacgcacatgctaggccggcccaaggccaagcggcgaggaagagagggagggaggtgtgtggggtcaccttgctgttgttggggaggaggaggaagaggggcagaggctgtccctcgagatctggcacgtggatgtggtggggccagcagggactgacgacttgttgacggtccataagtaaaaaatatatgaccatcaattattgcataaaaccaattggaataaaacatcaaacttagtgatagtggtcattactaatcatttccgcacgagttggtgaatatttgtttgtaggtgaattatggacgaaaactactagccatgcgatgaaagacacccccggacaattggaaacgagtacatggattggaggccccacatgttaatcaaaatcacctaaaattaaacccatgtaaggtacaacatgcagatggcccaccatgcaacctctcagccgaaggattaagtttgttttagttgcatttaatttaactttccttcacaaaattgcgagagcatcgccaccggttggacagagcaccactgtcggggtgtgcagccatagtcgctagcatcactagagcatgcattgcttatcacctgatgcatacccagagggcattggttaacacctgatgcatacctagaggttagacaaaggagccgacaaatgcattccaattggacctccatgtagccgaataatagattctcactgcatctagtgtgttgttactgaaaaaaaacagatatacggttttgtttggaatctatagagctggacaaatagaacattttctaactagtgtagctttatagcaactagattgtctagtgtagctttatagcaactagattgtccagtgacgttaggggatttcaatataataagaaaggaaagtgagaaaagtaaaaagggttatagtagatagagtttcttaatgcaataattgagcaaaataatttaatacagtttatgagaaattagatagtattttggtctcaaatgaatcattttcccatggtcatggtgaaggttagaagtttagaaaggttaatagagcaacgctccgctgatttctacttgcagtattctactacaagaagaattaatctcgaccctttattttaaagggtagattagtaatctcttaataaagattaggggtaattttggcatgggatatttctctgtcttgatcgctcgcatcaggtccgatcgctactcccctaaaaaaagattattgctactcctggccggtggcggagcgactggcggcgctgccagcgttgatggaaaatcgcttcaatctgcttgcacacatcgggcgtccctcgacgcgaaggaagccaacgcggtgatcctgcaatcaaatcaacaagaaataacgacaaagaaaccatggttaatcctataaacgatagccgatcggctaagtgccgatgacatatcatttatctttgagaagacgtcatatgtgtatcgatcggcggtcataaatagataagaaagaactaaatctactcgatcggctgtagatattaacgatatatactcctcatatcgatatatatacttaaatcaagtgattgggatagatcggtcgtcatgccgagacagtataaatcacttagaccgaaatatatattaataataggactatatatgttcatagcatagccgatcagatagacctggcatatatcggctaatactccgatactgatctatactaagatattaaagcaagtagaatatatcaaacaaaggcctaacatacttaaatgcaacaagatcttaatataaagggcagatttaacatatcaacgaagcatatagagtaaatatagttaaatcagataagatcggctgaaaccccgatactacctgttggcgatatagcatgaggcccttcgaccaaacctgccgaaaccatgcgaccagtgggcccatgaacctcaattatattgtgtacccatgtaaatgtctctttcataagggcaactatgtaaattcccctgtataaccaaaaccctagtagtaagaacctataatggggctataaacatgtaatagggggatcccccaagaaaaattctcaagttaatacacttcttttccaactactgttgagtaaccacgtctttcgacgtatgcagttgtcgtttcgacaacactaccctaatcggcaaccagtaggcaggctagagattgatattctaagcacgacttaatagatcaaactcaactgatgcaacattaagtatgaaaagaagaacaatatctagacaatcaagccgctggaagtttcatagagtggtagatatcttatataatctaaatcaacgttgatgtctaacctaatcggctgctctctaccgacagatgttagccgattgtaggttagatagcgatattgccaaagattatgtgagatatatgataactcgacaaattacataaacaagattagagtgtcataaagatggaagcactaatcccaagaacgcaagccgtcataacaagttttacctcttgttgaagatcgaaacagatgcagctcaacccgaaagcaagaactcgtcaaaataaaactaaagcaaaagggtggcgatgcgccgaaattgtattgaacgtgtgtgttaattgattacatggggttcggggtctatttatacgcgagaattacaaactatgtccatatcggacacgacttcttatctctgacaaagtctaaaataccataagtctttacggcagacttttgcccaaacatatctctaagaaaattacataaaatatcctaattaatagatacaattgccttctcaggactctatccatgcgtggcaatcatcttgaagcatatcaactcaacccgatgtcgtacaccaagtcgtattgtcggaatcggccgtatcaccaaaccaagtctgtctcgaatttagccgatccaatcgtagctatcacgcccagaaatttagcccaaatttccagactattttgtgtattaaatccctgtccaggactagccagggtacacaaaacgacaagtaataaacagttccaaacgtaaataaagcgtaaaatacttacaggagaggcacttagtcctcacaccgaaacaaaagcagcggcagcggaaaagacgatcctagcggggcttcagcaccactccacaggcaaaactcaactgaggtctaagccttggtcctctaacttcgtcctcagctcagaagcactacacttctgaaaagggggaataatagcaaggctgagtacaaccaccgtactcaacaagccacaccaatgatgcaggcgtgcaaggggaatacaaggacggtttgaggctatttgcataaaggcggttgtaaaacattttattgagcaaaaccgtaaaactattgagtaattaaagtagcattaaatctccactgatcaacgctataccacgttgaacaggcccaaccaacccacctgaactacagtgcattgagtcgatttattaaggtgggactaatcacggtgaatctggtcgaccgctcataaccgcgggcacggctattcgaatagttttactctgatcagagatgtacaactgtacccacaagacacagccccacgacacgtttccgtgcgctgacatgccaccacgacataccggaaagaggccgtgacaggacccttcgcataaccccctctaaccaagcacaccacacctcaggtttcacccccaatcctcgcaaggcagcgggcagtcccctctcgtgcctaggtgaatccggaagccgcataggctgtcgcagggcccatccaaactccatcacgcccacccttgtctggatgcgtcagctagaggaaagctacactacaagcccagccgttgcccacgctggcttgtggtaagcacgataaattcttccagggtttccgcgaaccggtccttaatcgccatgggcacgactagcaaaaccatgcagccacagcctaccatgtagtcacattttagttggataattacgaccatgaagcatggccagatgtctcgagcacgcagctcattctgatactaaaaaggtctaatactgtaatcagctcatcaactgagctagtggtaattaagcatggctaagcatatagttctagctaggtcacataagtaagatgagctagtcgatttattacccaaggttgacaaaggacagatatcaagtaaatatggcacaagcaaacagataggtaatacccggatcccatgtaattagcaacacatgcaattttatttgcaaacgataaaacatttataaattaggatcaaaatgctcaaggggaatgtgtgacttgccttgcttcttcacttggatcttctgaactcttttcctcgcgaccgcgatcttccgaaacgacggattctacacgctggcaattctacacgctggcacgcaaaacgaagaaaaactctaataaaaaccaaggaaacagtacataaaaagtaaaaaaacatgtagatctcaattttagatgaattttgcaagttgaatggcccaatttggagttcgaatgaattagatatgaattttagaagttctgagccatttaaatgaatttctataattaataccaatttattgcgcaattattaaatatttttccaaaggaaatgataagtgctgacgtcagcaaaggggaagggtgccgacaggtgggccccacacgtcagcgggtcaaagggggtggctcatggtggactcggtccaccgcagcacaggcgcgcgggcacaccacgtggaagaccacgtggcggccacgacggcacggcggggcgaggtggcaaaggcatggcgccgaggtggcgccacgtgggacaccagcgcggggcggcgccagagccacgtggacgacccggatcgccccgaaggggatcgggcggccacagctagcgggaacggcaaaactcgccggccgaccggccggggagcgacggcgagcagcccagaggtcgccggcgacgaccaccggcgcgacggcacgcgcgagaggcagcggagggaggcagaggagggagatggggagctcaccaagcgcacaaggcacgaaggcggtgcgggagagcggccgacaacgaggaaaggcgacggcgtttcctcggggaggcacggctacggcggtccgatggcagtccgcgagcgaggagtggcggatgacaactggaagagcctgaggaggacgaaggggggattagaagagggagaggacgggcatggcgaagggcaatagtggccgaaggccgaccgtgagtagaggagctcaccttgcgcggggaagatggggttcgagcgacgattgatggaggcggagggatggccgggctgcgggcgacggccgcggtgccggggaggacaacagcgcagcacggtgtggaccggagaggcggcgcgacgcggccggaggcagcaaaagcggcgccggcctcgggcttgcggtggaggtggtgattcggcggtggatcgaaggagcggtgtggtggccaggcttgcccgcgcaacggcgaagctagcggtggcggcgacgcggcgcggcgacggctagagcggcgagaggcggcggctggaggcggtataggcggcggtggctcggcctcgcggtgggacggtgtttcgcgggtggaagagggaagggaaacggatgccggggtgaagcgtggggcggcgatgccgatggtggcgacgacgcagtgcggcgatggcgagaacggcggctagaggcggccggagctcgccggagagcggcgacggctcgattttgcgtggggagggcgggggagagtgcggggagtacgggaaaattggggaaatggacgagggtcacatgggaaatcgtggccgagaggggcggaatcgggcggcaaccggccggcgacgtggggtggtgtcacagcctgaattttcgttttaggatttataaattatctaataaattattaatagaatttttattaaatgttctttaatttacaagtgaagttaaatgtgggatataaaatttcctaaatataaagcatggatggatttaatttttattaaattctccatgattaattacactctctgaaattttctcggatttttcagagctcaattcctaaatgatacaaagaacagttcagtaattagttaatcaattaatgatctaattataattatgttaagtgcttttcttgtttaaaaatccttaatttataaattgttgtctaaaaggaattattagaaatgatcttaaaagcctagaagagaagatctattttttttaaaatttgttaaatctcaatataaaagtgggctagaaaaaaattcattaaatactttacttgattctatagttcctagatttttctgggatttatttgagccaaggaagtatttttaatcaatggaatatcatttcatgaataatttaaatagaaaaaggttttaaaatctttcttttggttttgggccgaaagtcagcccaagtctctctttctccctctcctcggactgcttgcatctggcccagccggcccagtccgccgcgcccctccctcctctctctcagccgctgacaggcgggacccacctgtcggggtcgtcgccctcctctcgtcgcccggccgcgcccgagccgccaccgctgcccttccaaattccgttgcccctctctatttccggtcaaattgattgagggcaaatgatccttgagatctcctcttccttttctcttttggaaacattggctaattttctttggaaaccagtggatttgagttggattcggattcatctctctcctctaaccctagagtttccttctcgccgccggtcaccgtgggcctccgtcgccgcctcctagccactataaaagcatccccgggacctcctctatccgccgccacctttgccttagcccgccatcgcgtctagcgccgcctccgcgtagccctagccgtcgccgtcgttgccgtcggtccagccgtgcgccgccgtcgctccagtcgtcgccgtcgctcggggaggtcgccatcgtggtcgccgttgcgtcgccgtccccatccaccgcttcgccgccgctgtagcacgccggagcaccgccgtcaccgtcgacccgaagaccgccgccgcttcaacctcgtcgccgtcgtcatccgtcgtcgtttgtcgtcgtccaagagctcggtgagttcgccgcgtcgctctctacccgttggtgtcctccttttgcgtcgtcgcgccgtcgttcgccggcgagcatgtgttgccgagccgccgccggtgatgacgtcatcgtcgctgtccccgtagacccgctgtggaccattttgaactcggccgcccgttttggatagaatcgatctcggccgttcgtttccttagactgtcccgtgcacccggtttaccgtggaccgccttggatgacgcaataatcctccttttccttttcaaaaataattcattattgcgtcataattcaattaaaatccatataaatgctttaatccggtttaatctttaaaaattcatatctaattcattgtaactcggtttaatgtggttcaagttgcaaaagttgtgtaaaataaagatctacatattaaaattatccataaattgaattaaatttatttaattctttttaaatgggctttaattagatttaatctagtaaaattcataataaattcatatgaagtcagaatgaggccgttcaagtctcataattcatctaaaattatgatctacatgtttgtttactttttatgtactgtttatttggtttttactagtctttttcttcgttttgcgtgttagcttgtcgtttccgtcgttttgaaggttcgcgagtgcgccggaagtattatttaatgatggcttaataatagttcacgatggtcaatcgtgattggttaattaattacttgccaactaaaacttgataatggtgggttgtgagcacatggttttgagagtcgtgctcatgacaattaaggaccgcttcgcgagctactattgtgaaacattaaccgtgccaaccacaagccagcgtgggcaacggctttaccttttgtatagcatggttcattgcagagcaccagactgagaagtggcggagataagcccacgggggtcgctggggagtccatgccttgtttataagggggtgattatgatccaggaacggtgcactgctttgagttgtgttgtgcgaggggtactgtcacagctcctttccgaggtaccgtggtggtattgaggcgcatggtgacatgtcgtggggctgtgtcttgtgggtacagtggtacacctctggccagagtaaaactattcgaatagccgtgcccgcggttatgggcgggttgagcaatgtttttcgtgattagtctcacacctctcacaataattattgatgctataactggtaataatttgtttagctcctggtttggagttagatctgtacagccgggtatggttgttcaggatggttgggcctgtgcagcatgggtgtgctgttcagtgttgattaaaatttctgattaattactctactgttttactactcttaactctttgctaaatgctgctttcgcaaatgagactatattatgccatcctttggtatccttgtgcacttgcatatttgctgtgtggcttgttgagtatgtcatatgctcattcttgcaataatcaatcaacctcagttgaagaaaaaggatccagaaggggaagacgtttggtttataccccagttgagctgcttgtgggagtggagccggagcttcgctagaccgttattccgctgcagttttcttttcttttgtaagtatgtaacgttattattgatgattctgtatattaaattgtcagtttgtgtacctcggttgattcctggacgagggttttatgcacaaattagttcggaaattactagtgaatttctgggcgtgacaggtggcgacgtggagcttgagagaggtcaaaccggcgtgatttttggggaaaagtgggggaaaatgaggaggagtgggtggcgaccacgtccgcacggtcggacgtgcgcgcgggaggcggcggttttagcggcggggtggggcggcaatggcggcagttgccagtccatggcgatggggtggctggaggtaggggaaggggatgacatgtggggtcgcaggtcccacctgtcaaccaatggaagagagaggggaagccgggtgggggttttctagactttgggggggagaggggagccgagctgggccgagcggcccaaagaggagaggggagggaggcgggccagaggggaagggggaaggaatttgggccgagcccgaaagggaggaaggggaagattattttcttttctttttatttaaattgattaaatgaactttgtattattataattatttcttgagctttgaaaattcgcagaaaaatcctgagagtattttagggcacaaagaatattacaaaatattctcggccaatgatttttaaaggaaaatttcaaattctcccattatttcacttgattgaattgacttaacttttatttaatttctagaaaatgcattatttaatgatttttaatcctgaatgaaaatcgggtcgttacagtagccgatccgaactccagccgattcttactctgttctcgcgataatctttatctctgattccgccttcctttccaatgccgatgttaccaaatttggttgttaacaccgcggccggcgtgccagtgcctcgcagcgtgcgcgcaactgtacatgtccgtcatctcctagctccaggagaaagatgtacctataaattacaatagtacccctacgcaaattattatccctggacgaatatacccctccatatttctactaccactaactttggtggaagtagaactaaatcgcaaccctacaattaaatatgatcaacgtctcagattactttctactctaagtagaaagcaccggagcaggactctattttctgatcatgtgccaattctggtagatacagtacatatgtttgtccctcagatatacataggtttatttgagcaaactttattttaacttaggttaggttagtttttttaagtgtcctaatttacgctctttccattttaattagcacatattcattttaaaatagattcacttttatcctcttatctacccttcgttaataaatccatgagttttatttccccaataccccttatctacttattcactaacactgttttcttgttaattagaaatactttggtcttttccctattaatttgaacttaattggcaagaaatgaagttagtttcacgtacggaggtggtaaaactttaaaaggagtggggtcctggataatggcatggatgaatcgggatagtttagactgtttttcctcacccaaataactataacttgaccaatatagcatccgtaggaaatacgtagtccatcttgacgatctagctagatacgtaccatgtcgcataaattgtcacttggggtactattttttgtcttgaaaaaatgaaagaaaagacggtacatacaggactttttcatcagtttgcaaacttttcatctcaggcttgtaatcattaacgcctggcacacgtggcgtagagtggccgacgcgttaacagccaacgaaagagtcatcagtcacggaccgcatccacgactgttttcacatgtacgttttgctagctacaacaacaatttcaccgtctcctagctcagatacgcctgctacaacaacagagttgaaagcatttgcctcatactcctccgtggtgttggaaacgcccatgagtcaattgggagcccaagggacaggaaactccgagtcaaccaaggcggctgttggtgaggtggtgtactccgacgaggtttcgacacagctagtgaagttggcaacgactaaggtactttctactgaggttgctgtgcagctagcaggaacagatgaggtggttacgaatggcaaagagcaacaacaagaacctgtcagcattgcacaagaattacagcatgtttcagctagcttgttgtctcccgtggagcatgtattggattgcaacgtgcagtctgaattgttccccgagaatagccggcttgcaggcgatggaagagtagcatcgactaagaacttgatggcagtactagcaaccaatgaagaccaacttagtgcctccagggctgccacatctaaagcccaggattcagcacaggcagttggagctcgatccccgacaagaaggcgacctcgtcgcccagtggaccctattccaactaggcaaagtgaaagatagaaggcgatagcaaatgcagatgcgccggtggcaaaccgggcagagctgctaaaaaaggttcataaccttgagacgctaacaggtaacaagtttaataccacaaattctgttgtttcaattccagataagactcttgctacaaatttttctaaattaggggtttctctaggaaagaatgatttacaaataaaggaatccattaaccagattaaaatttcagaagtggatagatttgctactctttatagtagtgctgtagcgtctactagtaatgtagataaaaacaacgatgaattgttaaaattgtcttctctccagcacttatgtagtgactggctagaagaggctgagagtaatgacgatgagtctatggattctcaggccatacctcgaatgaggaagatttcgaccaaagtcaaacataaagtggtatgtcctcttttgactggtccaaaaaagaaagctaataagtttaagaaatgaaaggaatattttggaatagttgtggctttggtgatgcatctaaatttagatttatatctgaatgtgttaaggagcaaaatttggattttattgccattcttgagactagaaaaccatgattcaccccttcaaatcttaaaaacctttgtggtggaaaagattttctttggcatgagaaacctcctatcgggcgatcaggaggaatacttttaggagtaaatttaaatgtttttgatataggtgaaatttcagaaggggacttctatgtgaagtttcttctaagaaataaagaggatggtttcaaatgggtttttaatggcagtagcaccaataggattacaacggttgctcacaaagtcattcgcccgacccaaacggcgtttttgccagatagaaatatcatggaaggggtggtgattttgcatgagactgtccatgagttacacacaaagaaaatggatggtatcatattcaaaattgactttgaaaaggcttatgacaaagttaaatggcagttccttcagcagacattacgaatgaaagggttttcacaatcatgatgcaattggatttctaactgagttgaaggaggaactgtaagtgtcaaagtcaatgataatgtatgaaaaaatttccggacatgcaaaggcttgagacaaggggatccaatgtccccaattctttttaacatagtggctgacatgttagccattcttattgaaagagccaaagccgatggccaaattagaggggtaattccatacttagtggatgatggtttgtccattctccaatatgccgacgatacaataatatttcttgaacatgattttgaacaagcaaaaaacatgaaggccattgtttgtgtgtttgaacatctctcggggctgaaaataaacttttataaaagtgaatttttctgctttgggggagccaaggaaatggaggaccaatatagacaactgtttggttgtaattctggttcctttccattcaaatacttaggaatccccatacactatcgaaaactcagaaattctgattggaaatgtgtggaggataggtttcaaagaaaacttagcacatggaaaggcaaaaacagctcctatggtgggagattggttcttcttaacttggttctttcgagtcttcccatgttcatgttatccttttttgaaatacctcgaggtgtacttcaaagactgaattactatcgatcgagctttttctggagcagtgatagccagaaaaagaaatataggttaagaaaatgggattatatatgccggccaaaagatcaagatggactgagtgtcctaaatcttgatatcatgaatagatgtttgttgagcaaatggctattcaagcttcttaatggtgatggtctatggcaaaaccttttgcgcaacaagtacttaaagggtaaacccctctcccacatgtcatccacagagagagagccatctctctggactgcactcttatagtcgacagctctatgtggcttgtcaaccaccggaccgtagctcctcacaccaagaaacccagtcttcccccagaagactgtcttcctcgactatacattctcctaccccaaacactctaacccagacagcattcgttaaacggtagcttccgcgcccttcctgcctgctgaaattgatgtgaatgatcgtgtcttcgacatcaatttcagtctgattagatatgtcattgaaacaaatccgttttgtctctgttttcttttcggatgagccagaaccaggaacatcccaattttgggctggcctaataaaagtaaaagatcaattttttcagtatggatcttttaaacctggtaatgggatggaaataagattttgggaagacatggttgggcttgcaacctctcaaatatcaatatccttctctgtacaatgtggtccgaaaaagacattctactttggcagaggttatgagcacaacaccgttgaatgtttcattccgacgatcaattgtaggaccaaagttagttgagtggaatgatttgatctctcgactagctaacataaccctgtcaaatgaaaaggattgctttatttggtcgctacataaaaatggccatttttcggtcaaatccatgtataatgcgatcatcaattccaatgtaagaatccacaagaggatcttatgggaggtaaaggtaccactaaaaatcaaagtatttatgtggtttcttcacaaaaaaaaaagtaatcttgacgaaagataatctcataaagagaaattggagaggaaacaagcaatgttgtttttgtaatatacaagagaccatccaacatcttttctttgactgtcatgttgcacgttttgcttggcaatgtgtcttctttgccttcaacatcccccctccccacaatgcaaaagatatttttggtgactggctaaggggagtgcctagacgcacaaaaaaaataattttgtttggagctagtgatttatgttggtcaatttggcgttgtcgtaatgatatagtttttaaccataaaaaatgcctaacatcatgcaggttatcttcatgtattccaattggctccactcttggtgtatgatgctttcacaggaacaacaggatactatgcgcaatggtgctacacgcttggaattagtagccaaggaacttttattccagtttggatggcgtagtacctacagaatttcgtgatagaatctacgtgattttgaaaaaaaaaattattttagtagatcatatcatcggcagaagttgggggtttgtcccagctcgccttttttaacttttctgttcacgtctgaattttttggctgtgtgcctacgagcagaggctggagatgtaacccatttccattatctaaaaaaacgtttttcgagctacaaatcgttgtgtttttaaaaggaaattctaccttagagattgttgttatggagaattaattactccattttttttaatttaaaataattaatacttaattaatcgtacgctaatgactcttctcattctgcatatcttcatagttctctcacttttcattcactccgatggtcacacatctcatcctgacaagtatcaattacagcaattgagcaacgaaataagtgttaaattgtcttttttttccgtcaaacacacaccctaagttgtcgtgttccaaacataaggggcttgtcttactttctaggatcatcatcgtcacaattcgatggacttgactgatgctagagctaccgagtcattggtgactgctgaaatgagatgtttaaattaaggttgaatttaatgtagtaaggcccggcggctatgggcatcagtacaagcaaacgataaagaccttgtacatgtctaattatttaaaaaataaagccaaatcaaagctctactctataatactcctccgtgacaatgtctagaaatatagctacctaacactacgtatctggatagggttatgtttagattcgtagtgttaactagctactccctcgatctattttaggatttttaatttttagtaaatattaaggttaattcctctttagtaaaaagatttctttctaactaattgattggcttttaaatcattgaaatgatgaaaataattgaaatattagttcaagaacctataaagcatttatatttttgaacagatgacgggggattatcagtcaaagaaaaaccaaagagactgcaactagtgcaatgcaaacacttggagacgatggaaaatggcggttacattctgtcgtcagtcgacctatacaaggttgcagttattaattaaataccaaggtttccggtcaatccttccagatcatctactcactctactacgtcagatacgtctccatcaatctgtgattctaatgtaaaatagtactcacttatactatttttggtcaaataatccctctaggcggctgctaacaggttccaaatatgtccaaattagcctttcgtcatttattctttgaatgcgatgtaactaaattcacacagatctgttcacattggacatcacttcgcctatagaatatcacacatgtattgggtcatggtttgatggtattaaaagaactatttcgactattttaacaggtactagtgctagtcaagatgccaccttgtaaaccatgtcaatttaaatgttatacatttataatagggtggatagtcaaactagtcctccaaatttcacctacatctcagtttgatccttaacttttcaattctaccttccatattagtccttaaaatttttattttagttcagactcatccttagagctatttaggaagccacatgactaaatctaatcaacatcataaataaccctaatacctctctcacacatatataagaaaagaaaaaaagtatatatagaaactatatggcaggcatcacccttttatttttactggcggaataacaaaacaaatgcttggaaaatttattggaggattctaagtcacgagacgacagcaaaaaccaacttcccatgacgtgcacttaggaggtccgccataaaaaataactctatttttttaggtggacctcttaagtgtccgccaccaaaaaagggtagataaagagcaccgttgtgaaaaagattcatggttttaaaagttgcacatccactgcccaacacccaccaaaccctccctctcctctccgccctatctccgctccctcgcctctcctccttcctctcccttaccctcctttcttcagcttctcctcggtgctctcggagatggtgatggcagccgtggtgatgacgacgacaatgatggaaacgagaggtttgttcacggcggatccgacagtggggcgggacgtgggcaatggatgtggcagtgaggaggcatccaggcggtggatccggcggtgggaggtgcgcaggcggcggatccgggagcaggaaggcacgcggctatggatccggcggtgggaggcatgcgggcatccgatccagcagtagggaggtacttgggtggcggatccagcggcggagaggctcgtgggtgggccggtggagcatggctgcgcgtgtgggcgggcaatgaagctcagacggcggcggatccagtggcagggaggctcgcggtggcgagcgggctggtagagctcgggcacgactatgtctacggacgaggcttgcgtgtgcgggtcctgcggcatgtcggccacagcaaggacaactaatcagcgacatcgacatcgcccctccgcaccggcaagaggagctcgacgccggcgtcaaagagtgcgttgaggtggtcgatttttttatcttagtgtgatacattttatggtttgttatttgtgatttcttgaatttgtggttgtgggattggaggatgtgatgtttaatttgtggatttgttattgtgggattagatgcaaattcatagaatctgtgattgtgggatgtggtgttcgatttggatttatgattgtgggactagagacaaactgatctggactgtgaatctggtttggttggttctaaaaatatatatatattttaccaaaaaaatattttttctggtggtcggttctgaaaatgaaaaacaaaattgccaaaaatatttttgctagtcgtccgtataacctagccaccagtgaaactgattttggtaagcgggtgaggtctccctgcgatgatcatcatctattgtcactgacccatgatcgcaagcagctaggtggtcccctggtgaaaatgtgtagttatatactacctccgttttttaatagatgacgccgttgactttttctcacatgtttgaccattcgtcttatttaaaaaatttacgtaattataatttattttgttatgagttgttttatcactcatagtactttaagtgtggtttatgatatatacatttgc

SEQ ID NO: 9964 - DNA, 4343 bp, Oryza sativa
aagcgctccaccttttttatgttgaagattgcctcgtcatcgcccgctaccagcaagtcaatcctcccacacttgtagcaatcatttgcccaataagttagtattgtctgctcttcatctaggacttctaattccacattcttcctgcagcacacaagctcaagcaaaatcaccccaaagctataaacgtcgaccttagaagtaatccctatgttcttgaaccactcaggtgcaacatatcctcgagtaccccgaatgccggtgtttgtttgtgtctgattcaccggaagaagctttgctaggccaaaatctgaaatctttgctacaaaattatcatcgagaaggatattctgtggtttcatatcgcagtggatgatttgtttattacactcctcatgtaggtagagcagtcctcgtgccaccccaagtgcgacttgaacacggaggctccaatgtggatgggtatcgctgaagaggaatgtattgagtgatccattgctcatgaactcatacactaacagcctttcagttccctcgttgcaaaaaccaagcagtctaactaagttcctgtgaaatgtctgcccaatggtttggacttccaccaagaactccttttgtgcttcctgctgaagcttttcgattttcttgaccgcgatgttagtcccaaactcatcttgcagctgtcctttgtagacaacaccagaggctcctgtgccaagtacttcttggaaaccaccggttgccttttccagctcgctgtaagtgaaaatctttggaggtaatccagagttattggacggttgcgataactgggttttcttcctcgaggtgatactacaataagtaccaaaaagcataacagagattaggagaaagttcaccaatacagagcttccaaaaagtaatgaactcccaagaatccaatactttttggtcctccttccatttgcttgagccgctgctgaacacggatggtgaattggtgctcctaggcaccttaataagaactgtcctcggtacattgacatccattttaccgttcgacaaagggaaccttttcttccaacaagtgcttgaagctttatcgaacacagctacggcacagaaacaatcagtcacacacagccttcggcattcggtctgatctatgggattgtattgctcatagtcagatagaggccaatcaacgcgatcgattggtgccatgtcatactgcaacattgctgtcgtctcatccagatcacagttttgtggctcaaaatctggcctgcagcctttgtatttccttttatcatcgatgaacttataattctgtgggcataaacaacttgtcgtgttcttggtgccatcaatggtgcagtaactgttaaagccgcatgctccactacccaccattgtttgtattgactggcagatgttttctggaagtacatcgactgcagtccattgctctggccataagggcctggcatgtatgttttttgggtaaacatattgccggaacacaccatctgtgtcaagggtagcacgatggaagaaatcacccatagagtccacccctgcagaagtgatatttacctgtgaaccattaattatagtgaagtatatccttccagtttcattgaacactagctgtgagccattgtccactgtgttactagcccaatatggatcgtataagtatccagaaggtacagcatctggatacataacaagattaccatctcgttgaacttttagttgaaatcggccattggaatagtctgtggcgaggagacggctgtggagtgccgtccccagtgaaagcacttgtgtgggtaggatggtatcagaagggtcaccaaaggactcccactttgttgcgccatcggtgcctaaaagcctgaaattcccggtgtcgagcattctagcatagcccacatcagtgacttgtggattccatacctcattgccagatggatcgcgaagagagagtgctccatcagcgagcttgaggacagagccagattggacttgtaccggtattgtatcatctttcccattggagctagtccttgcgtaccagacgacggtcttgtcagcgatcttgttgaaccagacggcgagcaggtaagaggaggagtttccatctaccgccagaaaaccgaatgcaaaatcagcagagggcgagatccatgagttgtttaccccctggggtgtcaaagaggagcctatactgatgtttagctgagcttgggcagatttcgtgcagtatagtagcaagagttgcaggatgggcaagaacaggagatgagccattgctattgatcaaccttttgctcgtactgatgacaacaaaacttatagcccttggagaacggcatttgttagtcttgagacctgtgaggcaacggttgaacctgtcaaaagcaattacaaagctgtcaatatgatagacatgagagggagattagttcacatttcattatcagaactttagaaaatgtcggctttgaatgcattaaccatgctgggttctcctgacatgatccttgctggtctttcctaccgcgtttcagaagaacagttttgaccagcttaggttatggtcaacccaggtttaatcttatcatcataatataggagtacactgtaacattaattgatcaggttttttttgacagagccagaacctgctttgctgatcgtaaggccattcctactgggaggttcattttgaggtttccaaaagtcacctaatctaaataagctcggattaatggatgaaacatatagacctccaatttacagtttcatatagatggtattgttttttgacaatgtccctgtggcatttaatttaatcagaataaaactcttatgcatgaaacctgcactaaaaatggcctaatatatgttttagccatttctaccacgcaacgtcagtgctccattcaaggggagctaggacacattgactaatgatgtccgtctatctaatttaattagaatgaaactcttatgaaaccatggtagcaagtagcaacatatattttgaacattgaactggtcaattggaatcagtacctcctgagtcctttccaagcttgcgttgcagaagtcttcaagtctccctggtccacgttaggtcaagacggcttctagaatacttgcttctttgacagaacagaaggcaaactctatttcagattctgtttacggtaagtacaatgattgtgcaaagtccttttttattggctaagcttacaggtaggtatgaaaacggtcggaaatgatcggaaaacagcctcaaccatttccgtaacctttctcggaaacgaaatcgaaaacggtaaagtcagaaacgaaaacgatatcggaaatatcggaaaaccggaaacagaacaatacggacagaatgtcggtacagatcggaaaccggtattaaatacgaaaacattaaactataaaaacatatatttaactttacataagtatgttatatgtatacataaatttaagcttatacaatataaattataaattaactccattttagccatgcacaaaagttagatatttgattgaagagtcaatcaatctgtaagtagagacatgccctataaatatcgacatatttagaatacggtaattatcatattataagaaacggtaatttccacaagaatacggtaaatacggaaacgattggtataatagcaaaaccatttccgttttcatttccatattttttaccatttccatttttattttggtcgattaccatttccatatggctcaactggtagaaagtcgaaacgaacatcggtcggcggggaattactgttaccgttttcacccctacttacaagtttgcacaacttcaatccccgttaaatggctaaaaaatgggttaatttgatctgtgccattgcaaatatgtctgttcagataaataccattataattcatttatgcgtagccgtgccactcaaattttacgaaattagaaccatgctatcactgtcaggttttccatcttccgaatcggcacatgggactcacccatcagattcttcttcttccttacaccctccattatcttcttccttccccatctcttcgtcgtggcaaggagcgcgggcaggatgggagggggtcggcgacgtgtatggtgtggccctataggagagcaccgactaaggcgacgaggccgtgagcccctacgcttccatgacctagaatgatgggacacgcagcacggtcttcgcctccctcctagcggcggcgaacgagcggatggacacgccgagcgcggcatcagcggtagcgagcgggaggaaggcaaggcgccaacacggaat

SEQ ID NO: 9965 - DNA, 2310 bp, Oryza sativa
caatgtttaaaacattttaaaagcaaaataagggaaatcaaataacatttgagaatggtaagctcattttacctctttttcgctgcccgagtggatcgcaagttgtattgcgtgggttgcgtcccctgaggcgcgtcgggaagctgtgacatgtctatctcctcggcgtctggtgcgacgtagtcctcatcctcctcgtcctcatcgtcatcgtcgtcgctaggtggagccggcgccttcccctttcccctcccttgcttaatgcgtgacgacgacgagccaccaactccgtcacgctcttctatcctgatggagtgtcgagcagtacttggacgcgcggattgaggtagtggtggtggtagtctccccggttggtacacgtcgtccaatccaaccgacctgcaacctaatcttgctgcaagtttccggcacctttgacgaactttctgcatttcaaaaaaaaaaaagtttgttaggcataactcaagtaatgcaaagtgctaaataaattttacctctaaaacattgcggagcgtgttctccgtgtcctcaccacccctcggagcttggagggcatgccccatttcattcacactcctgaggagctctctcgactgaaagcgtgaaaagatatatgttagggtctagggtgcaaatgtaagtaactttgacaaatgcaagaaaacttacgactctgtctctaagtggggcgtgctccatttgatatccaactctagtccggacatcatagggattccgcccctcatcggagtcgcggtcatcctctatgtcggcttccgtccaagtagggcggaggaacagtctatatgtcctatgcagccaacgaaggtactctgagaaaagatgattttggtgtatagtttcgatgtacctatcgttccttccggctattctccattcatcaatgtatctattatgctctagcccccagtctttcaccttctttgttctcaccctgtcatacctagacaagtagaaggtgatgaaatagtagtgagcatcgacaagggttaaatggtacaaaattgaacattgacaatgaaagcaaacaaagataagaaatatttacttgtgtaattcaactccagttgagatgtcctcaaccggccaatcttgtttcttcccgaactgtcgcatgacacggtgcggaaggtggtactcaactgcccagaaacaaatcaatgggcactggtacatgaaatagtcagagtctcgattgcacatcgagttcagggtcaggcttgaagcctcatttgtgtggtatggtaaccactcaatctgcaaaagttgaagagatgtcgttggttagtatctcaattaaagaagtaaatgtctaactagaagtgatattggaagtacttacatgttgaggctgcaagcagtccatctcattgacataatgcttgtatgccacatcccggtgagcatgtgcagtggcagtactctcaaaaaggtaggccactgtcttctccatgtctggctcattgtagggccaaggagtgaagctttgcctccacttaggccttccaaccggtagtcttaaccacatccacatctgaatcaatagcacacaaccactcatgttggatgatggtgcctgacgacaacaggcctcacagagctgtctatatgtccacgccaacactgctgacccccaactgaaacggcccagatcaccaaggttggcgaccaaaggaatccatatcgccgaagcaatgtcacccccagcatcaggaaacagaacctctcccaacaagtgcaagatgtatgcacgggcataacactcaacacgccatggctcagcatcgtcgtcaagatgtgagaagttctgactcagccaagacaggggtattccattctgcttcttcttccccccttgcccctgctcaatgttcagtggaatgccaaacagctgctgcacttgtgcatgccatccaggagtatctgtcctgcccgtcacggcatgcccccgtaatgggagggccaagatcatagccacatcctgtagagtgatggtcatctcaccactggggaggtggaagctgtgtgtctcaggcctccatctgtccacaagtgctgtcaacgcaggagcgttgaacactggcattcctctgctcacgaccaaggccaccccgagcaacccggcagcccttaggtacgggatgtacctatcgtcgaacactgggggggcatgagctctgactcggagcggttgaagtacctgcattagcaattgtaaatcaattagttaatataatgtcaaatacacgctaccgatacttatgcaca

SEQ ID NO: 9966 - DNA, 16194 bp, Oryza sativa
cttgttgtaggcaaatagatctaggatttactttgctatttatgctgactccgaaaattttcggatatatccgaaaatttcggaaatatctgaaaattattgcttccgcttttaattgaattttttgaattagcctattcaccccccctataggccttattgacactttcaattggtatcagagcctaatctcctaattcggcttaaccgcttggagagatcatgtcgggccaagtgggggatgggaataatggtgataagggagctaagattccttatgactatccccctacatctacatcttatgtgagtacatttagcggcaaagcttcatacttcaatggtacggactatgtcgcttggaagcataagatgaagatgcatttgaagtctattaatccatctatttggagaatagtcgaaaaaggctatgttttgcagaatcccgaagatcccaccaaggaggacgacgagaacgagcacaagaacgctcaagccgctaatgcaatacttagcgccttgagtgaaagtgagttcaactgtgtggatggcattgagagtgccaaagtgatttgggacacgcttcagaacttgcatgaaggcacgaatagtgttcgtgagtccaaggtggagatcctcaaggggcaatttgagaggtttgtgatgttggatggtgagagcccaagcgacatgtatgatcggttgagcaagatcgtcaatgagatcaagggacttggctccaaggacatgaccgatgaggttgtggtcaagaagatggttcgagcaatcactccaaggaactctaccttggtgaccatcattcgtgagcgtccggactacaagactctcacacctcatgatttgcttgggcatatccttgcccatgacatgctcgtgcaagagtccaaggatgtcatccaatacatcaaccaaagctcaaccacaagcatcaagaaggaagacttggcattgaaggcgaagaaagaagaagaagagaaccgcaagagcaagagcaaggcagagatcgatgatgaagagatggctctcttcgtcaagaagttcagcaagttcatgaggcgaagcggcttcttcaagggaggttcttccaaccactactccaacaagtcaagtggaagacactccacaagagtgtgctacgtgtgcaaagagcccgggcactttattacggattgcccccacctcaaggatggttcccacatcaaggaagataagaagaagggtgagaagaaggatgagaagaaggagaagcacaagcatagcaagcgggaacattatggccaagctcaccttgggatgatattcggctccgactccaagttaagctcaagtgatgaagaaggagctgccacgttcaccgtcaagccttcatcaccaccgagactcttcgaccactcaagtgatgaggatgctcccatttgcctcatggcaaaggaatctaaggtaccttctcctcacaagtcatttaatgttgatcttgttagtgatgaggaggatgaggttctggatgacgaattgtttaagtccataactaaggaatccctaccacacttgagtgagttacttggaagaattgaggaccaatatgcaactcttgagaggcaagaggctttgctcattcgtgagaaagagcggtcttatgaactcaagaatgagctttctaaggagagagaaaaatgaggcttaggtacggttttacaagcaaaccaaagagtctcatgctaatcttgaggtggcgaacgctcaacttcaagagagagtggatggcttggacaaagcatacctctctcttgaagagaagttcgaaaccttaaagaatagtgtctctctccctagcgagccatcttgttccaaaattgtcccaagtaatgaaccatgtgtgagatgcaaagatattgatattgaagcttgtgctactaactctatttctttgagtgctttgcaaaagcaaaatgagaagcttatgggactccttcacaatggcctacttaagtgccatataggtagtaaggccctaaaggagtacctaggctatcaaagggacaacttcaaccatcagggtcttgggtatgttcctccactaaaaggaaaggtggacaagagtgtgatgatcaataggccccaaggtcttagcaattttgttaaggccaaaagtatccttcctaatgattatacttcacattgttcttttgatgcatcttatgttcttaggaagaatgctagtggtcgtgttgttgctaagtatgtaggcccaaggggcaagaatatttctatcaagagagtactttgggtgcctaacgcacttgttactaacatgggaggacccaagcaagtatgggtacctaaaactagaaattgatctcttgtaggaatatgtctccggtggaagaagttgggtgattgatagtggatgcaccaatcacatgaccggagaagaatcaatgttttcaactcttgatctgtcacgccctaaaaatcctaagtatataaattgttgtttaattggaattattagaatttattttaaaagcctacaagttaaactctaataatctaggaaaattttcaacataaaaatggtctagataaaattttattaaatactttgcttgttcctctattttctagatttttctaggaattatttgagcaagggaagtatttttaataaatgaaacaacatttcacaaattattttttaattgaaaaagttgaaaaatcctcccctaagtcgttgggccgatttcggcccaactcttctcttccccgcgcggccgaaccggcccaagccggcccagccgacgccgcccgcccctcctcctcgggtcaccgacatgtggggccccggacccatcttcctcctccagccggccggttgccaggccgagccgtccgagccgccgtttgcgccgtcgattccccacatcctcctctatctttccccctaaaaatcggagcaaaccgttgagtattctctccgaatcgaactcgttttcgagtttatctccaaaaccgagtttcgtttttcccgagtcgatttcttgcgggaggagtccgatctcttcaatccaaggctataaataggaccccctagtcctcctctttcgtttgccctctctcccatcctctcccgtgctccgtagcgccgccgccgcgcgtgtcaagccgccccgccgccggtcgaagtccagccgcgccgccgcgccgtttgcgccgtcgccgccgcttgccgccgccgccattgggtgcgccgtggtgagaggaagctcggccacccttcctttttcgtcgccggtcaccggagctctgccgccccatacaagccaagccgccgccgttgcctcttcgtcgccggccgtcgttgttcgtcgtttggctcgagggtgagtaccgttgggttcgtctcgtcgtcctctacgtgtacttgtcctccaaattcgcagccgatcatccaatctccggcgagcttgccatccgagccggccgccattgatgacgtcatcgtgacatcaccatcttttcttttttcccgtttttctaatagattaaatcttcggaaaatcataactaaataaccgtaactccgattcgagtggttcaagttgctaaatttttctaaaatcaggatctacatgttaaaaatatccacatgtactgtttatgcttgtttttgtactgttttgttaatttttgtttaattgctttagtttccgacgttccggaggagagcgtttccgttgaggaagattccgaagcgtttgcggaagcccaaggcaagtcacacagatcccaaacaaacctttgagtatgttgaacccatttaaagctattattttatttcaactatgcattgttttcgaatgtcatcgggtggtgaacctttcccaattaattaatggccgaagatgatcttattttcctatgggttataaatttgattagcatgaaccttatatgttggattggttcagctaaatgctatatgtaagtctgcttagccatgcttagaaacattagctaactaaagggattaattataaactatgttacattattattttatttatggttacattaaatggtagctcacgatggttaatcgtgtgatgttaattaattgataattaaaacctggttaaggtgggttgtgagcatatggttttgatggttgtgctcatgacaattaaggaccggttcgcgagctactgttgtgaaacatttatcgtgccaaccacaagccagcgtgggcaacggctttatcttttgtatagcatgattcattatagtgcgccagactgtgaagtggcgagaagtccacgggggtcgctggggagtccatgccttgtttataagggggtgattatgatccaggaaaggtgcgctgtaaaggattatgttgtgcaaggggtattgtcacaactcctttccgaggtatcgtggtggtactaaggcgcatggtaacatgttgtgggattgtgacttgtgggtacagtggtacacctctgatcagagtttaatctattcgaatagccgtacccgcggttatgggtgagttgagcaatgtttttcgtgattagtcccatattattcattaatggtaattgtgataattaatttgactcctggtttggaatggtacgttcctggtatggaggttagatttgtacaaccggggttggttgttcatatgaggttgggcctatgcaacatgggtgtgttgtatggtgttatttaatattgattaattattcaactgtttttaccattcccttaaatatttattaaatgttgtttctgcaaatgagctatattatgccatcctttgttatcctgtgcacttgcatatttgctgtgtgacttgttgagtatgtcatatgctcatttttgcaataatcattcatcagaagaggagtatctcagtgaaggtgatgatctggaggattaggcttgttcctggttaagatgcctgtggagtggagtcgccatagctgttccgtagtttgttatagtttttttttccgctgcgtagaaggtttttctttgagaggaactatctacctctgtagtaattatttatttgcgaatatcaaatagatatttatttgtactctattatcaatttgttattgtgtgcctcggttgattcctggacgagggtttaacacacatgtaagcgtttggaattttggatagaaattccgggcatgacatgatccaaatggcacttcacaagataacatggtcttcggggacgatggaaagggaaaggttatgggattgggtaagattgcaatctctaatgatctttccattgccaacgttctcttgttaaatctctaaactacaatctcttgtctatttctgaattatgttctatgggttacaattgtccttttaccgatgttgatgtgaccgtctatagaaggaatgattcatcggtagtctttaagggtgttctcaagggaaagctttaccttgtggatttttcctcaagtaaagccaaacatgagacatgcttagtggctaagtccaacacggggtggctttcgcatcggaggctagcccatgttggtatgaggaatcttcacaagattctaaagtacgatcacatccttggactaacaaatgtttaattcgagaaagatagggtgtgtagcgcgtgtcaagccggcaaacaaattggagcacatcaccccgtcaagaatgtgatgaccactacaagaccattggagcttctccacatggacctcttcaggccaattgcttatctaagcattggaggtaacaaatatggtcttgttattgttgatgacttttcacgcttcacatgggtgttctttttgcatgacaagagtgagacacaagccatcttcaagaagtttgcaagaatagtacaaaacgagttcgacctcaagatcaagatcattcgaagcgacaacggcaaggagttcaagaacacgtgcatcgagagtttccttgatgaagaaggcatcaagcacgagttctcggctccatatttacctcaacaaaatggagtaaccgagagaaagaataggactctcattgagatggcgaggaccatgttggatgagtacaagacatcggaccgtttttgggccgaagccgtcaacaccgcatgccacgccatcaaccgcctttatcttcactaccatcttaagaggactccctatgagcttcttaccggtaacaaaccaaatgtctcttactttcatgttttcggtagtaagtgttacattcttaataagaaggctagatcctctaacttcgctcctcaagtggatgagggattcttgtttgggtatgggtcaaatgaatgcgcataccgcgttttcaacaaaacctccggtattgttgagatcgcgcgtgatgtgacatttgacgaaactaatggctctcaagtagagcaaattgactcacatgtgttaggtgaagaggaggacccgagtgaagcaatcaaaaggttggctcttggggacgtacgtcctagggagccacaacaaggagcctcttcctcaacacaagtggagccacctacatcaacccaagccgacgatccctctacctaaagcttggatcaaggtgaagaaggcgagcaagtgctaccctcctcgcccaagaatccaccaaagtatccaaagagatcatcccaccgacaacatcttaggagacatcaacaagggagtgtccactcgttctcatattgcaaatttttgtgagcattactcgtttgtgtcttctcttgaacctctaagggtggaagaagctcttaatgatctagattaggtgatgccgatgcaagaggagttcaacaatttcacccggaatgaagtgtggactttggtgtagcgacctcggcaaaatatgattggcacaaagtggatcttccgcaacaagcaagatgaggccaggctcgtaataaggaacaaggcgaggttagtggcgcaagggttcacccaaatcgaaggattagattttggtgaaactattgcgccggtagctagacttgagtcgattcgcatattgcttgcttttgctactaacctcaattttaagctatatcaaatggatgtcaaaagcgccttcctcaacgagcctatccatgagttggtatacatggagcaaccactgggcttagaggatccgaagtatcccaaccacgtgtacaagctccacaaggcactctacgggcttaagcaaacccctagagcttggtatgtcttcgcaattttcttgtgaaaaacggctttgaaatcgggaaagccgattcaactctttttactaaaagacatgataatgatatttttgtttgccaaatatatgtcgatgacattatatttggttctactaacaagtcttttagtgaagagtttagtaggatgatgaccaaacgttttgagatgtccatgatgggtgaattgaagctcttcctcggccttcaaattaagcaactcaaggaaggaactttcatttgccaaacaaagtatttgaaggacatgctcaagaagtttgggatggagaatgccaagccaatccagactcccatgccatcaaatggccacctcgacctcaatgagcaaggtaaagatgtcgatcaaaaggtatatcgttccatcgttggctcacttctttacctttgtgcatctaggcccaatattatgcttagtgtgtgcatgtgtgcaagatttcaagccgctccgaaggactatcaccttgtggccatgaagagaattcttagatatttagtgcacactcctaaccttggtctttggtatcctaagggagcgaggtttgatctcattggctatgccgatgcggattatgccggatgcaaagtggataggaaaagcacatcgggtacttgccaattcttgggtaggtcccttgtttcttgttcttccaagaagcaaaactctgtcgccctatccaccgccgaagcggaatatgtttcggcggggagttgttgtgctcaacttctttggatgaagcaaaccctgagagactatgacctcaatgtatctacaatcccactcctatgtgacaatgagtgcgccactaagatagccaacaaccccgtccaacactcccgaaccaaacatatcgatattcgccaccatttcttgagagatcattccacaagagacgacatagacatccaatatgtaagaaccgacaaacaattggcggatatctttaccaagcctctagatgaagctaggttttatgagttgaggagtgaactaaatattttggattctcggaatgtggcttgatctattgcatgcatgtttgcttggtagaataggtttgcataccactttgtgacaaaatggtcattcaactcatggatggacactagtcacttttgtggagaacttgaatctatgtgtatggggatcttatttttcaatgaattttggtcctagcacaacttgaaatagattcacacattccctctctcgagggtgaattatcttgtatcatggtaattccctctcttttgatccctcggatcgtccatttgacttgtggctattgttttgtgtgattgattgtgtgctagtcacaagttcaaatggagcctctagtgctcgaccatccctcctttcctaaatactatcaaaaacctttgagaaatgtgtttttgtcaaaaatttcccggtgcttgtcccttgcaaaatccatttcaaatgtttgcaaaatagtttcatcaaaattcctagcgaaatccccttgcaaaactgtgttttccaggaattttcggactttccggaaaatttttggacttcccgaaaaattttcggatatatccgaaaaacattagaaccgtgcgcaacccttctggatccgttcggacttatccgaaaattttcggaaatgcccgaaaatttcggggtctttatatatcaccccgtggactcccttctctctcctttccactttttttccccacgggattgactccctcctctctccccaccggcgaccacctcctctccggcgacttcctgcggctcccctcctctctatcctcgtgggagcgcgcttgggggacttcttggggcttgcattgtcgatcttcaccgcgttcttcaagtgttcttcgcgttcttgaggtattcgccctaaaatcaaatcctttgattcctcaagttttatcttgcgattccctttggtggagatgttcccctagtgccctagaacctgcggattcaatctcacaagtttttgttggcggatttgtgcggcatctgagttatagggttcggcaggattcttttcggacttttccgaaaattttcggatatgtccgaaaatccctggccgacccctatcacttcagttttgcacgattcttaccttcacttacttgtttcttgcctttttggcttccattcactggtcccttgtatctcgcttgtttgaaggatgcctcccagcaagcaaacctcccacaagtccaagcgcccgagggatcgctctcccactccatcctctcatgatgattcggacagtgattggtctggtggagaggatgcggttcctcaggttgccctggtggctcggggtggcaacctccctcctcggcgatctactcaagctcttggtgctggtggtggtggtgaggactcctctcgtcaactgcaaacgccgccgcatcaacccaatgtccccattggtcctctccgcattcatacccccgagagggatccagcggtgattcgccaagtgtatgattggaggcggaagactgaggttgttgctccctggtgggatgaggatccgcgccctcttcaccactccgccacgaatccgcggttttggactctctttcaacaagacttttatgagtcagtgatcaagtccaaagctcatcccaccgttcccatgcaatggatcaactgggaggagttgcaggcgcataatgatccggtgctaaactctgtgattgcaaattgtgagcgcatggggattcgctctttcatgactttgcagcaggattggtgcaacgaagtcatcgctcaattctatgccaccgttttctttgatccacaccgtgccatgcattggatgacccaaggatcttggtattctgtctcctatcctcctttggctgagatttggggtttcgacttgcatgacttactcaaccttcctgatctgcataatctacccattcctaccaacactgatctcctccctctttacattccaaatgatcctaatgtggtgttgggtaaggtcgacggtctcaaaccgtactttgcctacttgaaccggatgtttcgccggtcctttgtgccaaaggatggtgatgctagcagcattaaccgcctctccaggactgtgcttctcaggttcgatccccctcctcatcgctttcatccttatcactttgtgtgggaagaaaaccgcatggcttccattcagtacaggaaggggttggtctatgctcctcacattatgcggatgatcgagtctgtcactcagcttcagtttcgccatgatgtgtctcattcctagcttcacttgtgccttgttaaggcgccccgctcctcagccgctcgggacatcccctcctcttccactcagccgcctcctgctcctgagcgcccttcctctgtggctcgtcgtgagccgtctcctttattccgcattttgcagagtctttttggtctttgctccgcggaggccaaaaagaactgccgattgcggaattcaacgaagaaaacggctcgcgacgtcaaattcctcaaggcaaggtattatgaggatcatcacatcgatatccctccttctcctccgggtttcgaggccgagcccgatgagctagaggaggaagagattgaggatccatttgctgggtcgcctcctgacttcgacttctttgtttatgcccatggctatggctatcctcctccaccacctccagaggatcctcctcaggccccccttcgcttgagtcgtcgtctcatcgtcctctctttttggtgtcttgatgccaaagggagagattatctatcatgtctttagggtcgagcacatttggcttttatttgtatgagactatgtgtgatttctaagttaagtttaatgctttgtaagactttattgtttaattatggatgcttgagatgtaatggatcttattatgtttaatgtggtgcaatgccttatcctctttatatggtgtgtgtgatgagatgtaattattcttatgcatgtgatgtgttggatgtgatgagcaaatgtgatatatttgttgtcttgtgagcttcaatgtggatgcaaagatttagggggagctctctacttgcttttatgcacactcttaggaggagctttcactaaacctttgcaccaaaaccttaaattatactcattctctcttgtgttctaatcgtattgtcatcaatcaccaaaaagggggagattgaaagtgcatctaggcccctaatgattttggtgattaattacaatgcgattagagaggactaacatttttatttaagcaaatgtgaagcttgttatgtccttaatgagttagcgtaatgcatatcccgccaaatacgttgaagtgatgtgttgcggcaaatgagcaaatggtattttgtacccttttctttttgcttgagtcaataggaaagccgcactattaagagggatgatgcattgacaaatgagcagtgatcaaagtgctcaaaatcaatttttaaaagtgtttctcctcagttatagagttctggagtttttcggagttttccgaaagtcattttcggactttccgaaaatgactatgaaggcaaaaatgtttctgtgtattttcggacttgtccgaaagtgattttcggacttttccgaaaacatccagaatgatgttttggctatgagtattttcggatttgtccgaaagtgattttcggacttttctgaaaacatccagaacgatgtttttggctctgagtattttcggacttgtccgaaagtgattttcggacttttccgaaagtgattctagaacgatgtttttggttctggatatttttggacttatccgaaaaaatttcggaatgtccgaaaattctctcgttgactttgctgttggtgctgaactggaatttttggacatgtccgaaaatctttcaaaatatccgaaaatcacaattattgtgtataacaggcagaatttaggctgtggctataaatagccccctcccctcacttgtgagggctgctggtcacattggatatttttgtgcccttggcttgctcttgttgagattcacttttgagccttgctttcttgtttcccctctcacccatgttcgattcggatttggtgtgtgtgtgagagttgtggattcgagtttgtgtgagtgcttgttgttgacttcgtgaagatttgtgagcacttgcatcatctccgggagttcaatgcttcatttgttactcttggaggttgaggactcctaggcggctaggtgtcgctcccgacccaccgatctacatgtggttggccgggagaagtttgtgaaggtcggatctcacctccgaaagggaagagatacccttagtggaaggaggagtgcttagtgcaacctcttgaggaaagggttagctaagacccggctcttagtgagctcctcaacggagagtagaatccctcaaggattcgaactttgggaacaaattcgtgagcttcatctttggtgactttacttcctccctctccactagctttgcttatttgagccgctataggtctagttgatgtttgtgctagcatattcttgttgtaggcaactagatctaggatttactttgctatttgtactgactccgaaaattttcggatatatccaaaaatttcggaaatttccgaaaattactgcttccgcttttaattgaattttttgaattagcctattcaccgcccccccccccctctaggcctaattgacactttcagctctgatgtaatcaataatctttactcagggacaagtaaatgctcaatgtgatggtgttgttgacggtcctaaagtaccaattccgaccgtcaattcatgcacaaatgcaaatgaaagagaatactaaacttagaggtagtgcttattactaaccatttccacaagtcttggtgaatatttgtacgtgggtgcattatggacgaaaatcacccgccatacgacaaaatacatatctagacaatcagacgtgagtacacggattggaggccctacatgtcaatcataatcgcctacaattgagcccatctgaggtacaacttgtaggggggccactaggcagcctcccagccaaaggattggctgggaggtgggccaatggggttggccgaacccaaggtcttttgaaccacctttgcctctccttgccatctgccgacgcgtggagcaagatcttgaagccccaaaggtggttatgcttgattaccggcagttaccgaccttccaaccgacttaaggaggctataaaagaaggagctcactacactctaaaattacacagcaagtggagtacaactcacttacacatttaggctgagttcgggagtgagcgttgggaaccctcactcccaacatgcaaaacagagcggtgattagtgcataatttattaagtattatgtaaaataaacttgaaaaatggattaatatgatttttaaaacaactttcctatatattttttttttcaaaatgcacaccgtttagtagtttgggaaacgtgcacgccgaaaacgagaaaggtgagttgggaaaagtaggggaagaacacagtcaaagggtgtgttcgggaggaggggttgggaatccctcctccccagcacggaaaatgaagcacgtattattgcatgattaattaagtattagctattttttaaaaaaaaagattaacatgattttttaaaacaacttttatatagaaaaattttgcaaaaacaacaccgtttagcagtttgaaaagcgtgcatacgtgccccaaatgtcggacttctctccgaaggagtgctagagatgtcgacattcttccaaggagttctagaggagtgccgaagatgtcagctctctgtctctctatctctttgatcttgtacctcgttggatgcttcttttacataagtatttgtgatctcatttggtattaacttttcttatttaagtaagatatattctcatcattccaggttcatcgctgtacttagagtaccttaatcttatataagtgtgacatcgagattggggtaataatcaatagcgtagacatggtgttaaggctagagtttacgtttgtttgttgtgtgctccacgggttgtagaagtagatggcaggtggtaacagccatatccgtcctttgtaattctccatgttcggtacgtcatcgagctgtaggccggagtctccttggaagatcacgagtaagctggtgttcgaaacaattgatagagttttaacttaacttaattaacccataggaatccgctctttcctaagcatcccaattagttgttgtccttggttgaatcttgttcttagattacacgcacatgttccctgtgatttgatacccttggaatactctaaagtgaagtgctacttcggtatccatgttcttgcggatttatttatgactgtagcaaataccaacagcgggccactattatgttgtcgctagtcatgcattgtgcacacattattaatagatgaggggtctcgacaagccattgcgtgcaataggtgatgacatgccctcccaagcaattagagcaagtttaacagtagagccaaatattagctataagatcatattagagttagtatgtatagtagatgggctctaactttgtatttatttttcttctcctctctctttctcatgcatatacatttagtgcatttattttaatgtgtgtgaagagttagctcttggataccatcagctcgccattgttgaagcccttaccactgcctaggattggggacttggggtgtgaggcccagagagaggttaggagatgggaatcggttgaatggttgaaacagaccagaccgggtggtcttcacgggtggcagggaaatcttgtcttttcaaaacatttctcttcttgtataggctaaaaataataaaataattgacagagcatccttcagcagattaccatattttttttaggatgtactcagaccgttctatatttttgttatgtctacatgcaaaaaccacaaattttcaatgtgcggtaccaaattttgccaaacaaccaccctggaatgataattaacaagtatgaagtttgttacaatcgtctcaaacttatttgttataaagttattgtcaaagtatgaccattaataccatggaaaatgattaaaaaggacaattatcgttatattggagggaatataaatttgtttgtgcagttcattgatacaaatatgaaaaacaaaaattaaaatgcccagtggatagacctcatgaatgattttgctatatggtttatatatggaaagtggcgaataaatatcatggctagtgtagtgggcaccttatccaaacaatgcataaaaagatagcttgaacttgcagctaaattgttcctttattccacttctttttttttattctcccaacagtggactacgcatatctgggccacgttgattttttttttccgaaaatggccacgttgattcggtggtccaatttaatgcacttgcgagcaactaattccgttccataaaaataaaccgatataaaaataaatctattatgggatatgactgtcatttaaattaagttgtgctaatatgatcctaatgtttccgctgtcattttaatttatttcatgcttacaagtcaatcaaactacagtatatatgttcaagtcaaacaacaaaagaaagctagatcaatctgtgcactcatgcacagcacagcagtagcaaagcttcaaactgactgtaatatgtaatcacatgataaaagtccattgaacatcctacaaacacttctaggctgtcacatggtattcctataaatactcctaagtcgtcatatggcactataataaaccaatggaaccattacattcaactactaaatttatctctttaggaaaaaaacttaatgaattgattt

SEQ ID NO: 9967 - DNA, 26601 bp, Oryza sativa
  unsure (1)..(26601): unsure at all n locations
cgtcctattctacaaaccaaacacccgaatggaatcatcccaatcctcaaatcagggatggtttcatcccatcccacctagtcccagaaccaaacacacgctaattgagttttgggattcacttttcacctgtaaagaccaaagtttttcatacttgttgtctatgtctgttccacatgtaaggggttgcgctagaaaagcctagaataatctgtcttgctgctttttaccgatcagatccaacgattttccttcgtcctatttctctatgggatggttcagtgttttttattacttggatcaattaggtgttgtcttgggttttattgtccctgactctgaaatgctagagcaaactggatcctaatacaatattcatggtataataactgcaagcttagtgtaacttacaatagaaccagcaccgattccctcataatttccagtaggtccgtttaccattaatgcccatgatgcactaagatcattttgtcctcgcacttttggctcatagacattgattgcaacttgtgttccatatatttcatcatatgttgtacacccagctctctacatagaagatagagtcatgtttattattagtaataaaaacaaaaattttggatagaagaaaaacttcacacacaacacaagtaacactaaggtgagatttcttgattcctaattgttttagggataaatttattacttgctactaaaattgtactcattcacttagtttgccacttatactgtcctaatgacagtacgtgggggtttcaagacacgcatgtcagtaagaaagtctgtgtgtagaaatttgagaggaaactaagaaattgccataaaagacattctttttttagcgtatctggaacgttgatctggaaattctttcaaaatcgttcttacttgtggagctctagttgatagagttagaacaagggaagaaaaagatgcagaaggagggcaaggtttgtgcaaatattaggaaaaaaatatatgctggaaactacatatgtagtggtaaacctggaaactaccattagattgaaaaatggacgtctgagattcgtccacgtcaccacggatacaaattttactagtaggtttatatttttactcatggtgacgtgtacgaaatctcagacgtacatttttcgatccgatggtaattctaggtttctactacatattttccaaatattagtgttaacatttatctgcattattacggtgaacttttatcattgttttattcaatacaaatagtcgtagaaaaatgccaaatttcaatatcatattatttaaatattttatgggcatatattttctaggttagtgcaaatcaaaagaacatttgtaacgttacaataaaagaactacttgactctggaaagtattcttttgattagtttgaggagtaaattagaacatacctcccctccacgatgatgggtattaccgattggatcaaaactaaattgtgtcttcagatcagctttactattttgtaacaatggtattgttccctttgggcatgcaatggtaggcagatgagcttctgtcgctatagtgtctgatgatgatttgattttcagctctgatggataagaggtgggctccatctggttgaaaagtttacaaataaaaaaatgttgggcaaatgaaacaagtcataaaacactatcacattactatttactccctccgtccccctaatataagagattttgatattttccttgcactgtttgaccactcgtcttattcaaaaaatttgtgtaaatataaaaaatgaacagttgtgcttaaattactttagataataaaataagtcacgaataaaataaataacaattctaaaattttttgaataagatgaatggtcaaacagtgcaagtaaaatgtcaaaatcccttatattataggacagagggagcaatatttactaaactacaaacatatgcagtcatatcccctttccttccattgataataaagaacaacctagatgctcaattaattttgccaaatcaagcagttgatttgcgccaaagaaagaaaacaagtccaaccacaccttttttgtgtaattgactaattgagaaacatgagttggattaaggacttatttgtactatttgattatggggttaggatgagaagaataaagcttgataatatgaaaacggagaaagagagtgtgaaatagcaacatacctgtattatgtgccctttcaacaatggatgagatagtgctggttgtagattgatatcgatgcaatgaaacacgtcgccgtctccagtctattaattgtgaaatttatattgcttgtcaactagacaaaggaattatatatgtaaatctagaagaatcgaaattatatggagatatgaaatgaaaaaggtgtgtagatagtacctcaatgatcttgttgataatcttgtcggaaataggttgatcataacttgcttcatgctttacatatctaccttcttgtattcctgccgcaaggaggacaagatatgatatgaaaattatcactggaagttctagtggtttggtcattgagaaaactgaattgttcactattctaggatacagacctaccgttttataggacatggagggtggctaccgctcttacagtaacccccgttttaatgaatttggtggaaatgaactgtcatgtctttgactcaaaagatatagtgaagatggaaaaaacaaaagacatgatgtatataatctgcgaatgatgtacgagtattagtagagaaatcaaatatgaccgctcaagaagaatgaatttaatgcctccagagaatctcatttattgcagttgccaactaagaaagatatagagcaataaacttaataaatgcatgaaactagtctatatttattagaaaatatataatctacagaattattggcacaaaaaatattgcaacgatatataaattgttgcaattagttagtcagtgattgagtccacgactcctcctcgttgtaaccgtccatgcttccccattcttctctctcgctctgtccctctctctcgccacgcgcaaccgttgtcggtcgtcgagacgccgccactgtgtgcctcttggctcccagggcgccgccttcctgttcttctcctcttcaactcctcatgtactattcctcctctcccaccctcatctctcccaatgtggcggtgttccttcggctagatctaaccatccctgatctcgggtatcagatccggggcgaggccaccatgtagatggggagagaggcatgaatatggcttcagctcgggagcttcttgcagccaccatctccatcgtcatgtcccttaccggtccgatagaggaggtgaagaagcagatgctggtgctgacaaaggtgaagctgatgtgcttgactagttgggaaagaatattgcaaaccatattcttttgatgttgcacataatgtttacttggtgtttcaatcagtctctttttggatgttgtacaaattggtacaataatttcttgatgttgcaatattctggttttgtgtgttgcaataagtatcgttgaatgttgcatgtgattgaaacatctttcgatagagcaatgaaacactcttgatcaagtcatggcacgctgaaacaattctcgttgaaacattttttcatcgaattatgaaatatatgaaacattttttttggatgtgatggaaccctatccgatgtttcttcttccatcggacgtccgatttgtagcgctctcccaataaaatatgcattgttatcatattttagaattttacttgcaaaagctaaaagttaccatgatgaaaaatattacacggtttcaattttcattgtaataaatatgctctcatacctcactatattgatgtggtaaaattatttgaattttctttgaattataaataagctattgcgacaattagataactattgaaatatgcttggagtagcctaaataaaactctgttgcctggattcttacgttacagaactaatctcagcaaagtacagccacaaaccagcccatctctagttctccaccttcctagcaaatccagccagccagcccactatacccaagtccttctagatggaaataagttcaccggaggtccctcaacttaacaacgagattttttaaggtcccttaactacaaaatcagaaatgtgtacccctaatctcacacaaaccatgcacttaaggtcctatggcagtatatatgggtgggtttgctgacgtggcatcctagtcagcaaaaaaatatttaaaaaagtacgtggggcctgtatgtcagctgcacattttttttttcttctccttgtcttctcttctctctcttctctcttctcttcctcttcagtgagggaggccggcggagtggcgatgggcaggcagcaggcccgtgcagcagcggagtggcgatgggcggtggcaggcagagcggcgccgggctgtgggcggagcggaggcgggcgaagctcatcttggggcagctcgcgggatcatggggcggggcgcatccaaagcgcacattcagatcactatttgtggaatgatattttgcacaaatctggtttgcgatggaatgaactgagaaacgagcatcatctcccctgtgtcgtcctctgtgccaccgtgagagcacacgacacacctacaagagttcagacattcatggaagcagctgcaagggacccatcatatctgctggaagaagacaactaacatatttcggctgggcagaataacattcgtatcaaatccaattcttgggtgcaaactctaacatattttggcttggtttgatcgcaagtataggttttggacaactgacagatttttttttatcatagaccagagactgacagatgtgctctctatgagggagaacaatacaggaggctgccctccacctgctgctggcccaaatatccaacagcgagagaacaaaatctacattaattttattacggcaaggagaaattcactttgagtacatcgatttggtggactcatgtagagttaaaagtactctactaatttggttgggagtaacgttaatctggttaatttcgattaagagcaaccaaaatactgtattttctatctataaaaaaactccaaaaatacaattttttttatttgagaaatgcattacaaacgtagatactcacaatacacatacacccatataaacgcacacatacacccaacctttattagcgcctcgaaaagaccgaacttgcatattttgagagtgacaaagtcatcactggtacctcgttatcgataagtacgttgtctagaattgaaaaaaataattagctgtaaatatgagtactaaaaaatatattgtactcctctatgttctatctattatatgcaatacaaatattttcagttctgttatcctaaattcgattgccccaatgtgcaaaactctccataggatacacacatcactctaatcctccattacctatgacaaacacattcattccgtgtgaaccacgtttgatttagccaatcacattcaccaaggcaaatttggagcactcaaattccaattttgtattcatattcccattcaacaaacccccacagcataatttaaaatgtaggcgtctgtgtgctgcaggaaacgtacgtccaatccacaataatttatacacgcgtatatacttcacggctacgcagactgccgtttacacagaaacacaacatcgtacacgcaccgtatgtgcttacataagttcgtaccactgactatatataccaatgcatcctaattccaattcaccaaaccaaagtagagttcacagaagcagcagcagagcagcaaccaacagcagcaggatcaaggtcacacaaagcctgatcgatcatggccatggccaaggctctgctcttcgccatcctcggatgcctctgcctctgcagcgctgttctagcagctcgtgagctgagcgatgacgcggccatggcggcgaggcacgagaggtggatggcgcagtacgggcgcatgtacaaggacgatgccgagaaggcacgccggttcgaggtgttcaaggccaatgtcgccttcatcgagtcgttcaatgctggtaatcacaagttctggctcggcgtcaaccagttcgccgacctcaccaatgacgagttcaggtcgacgaagaccaacaagggattcattcctagcacgactagggttcctactggattcaggaatgagaatgttaacattgatgcgctgccggcgaccatggactggagaaccaagggcgtggtcactcccatcaaggatcaaggccaatgtggtaagaaaattcaggctactcagatgacattcttcagtatcttttatgatagagttttgtgataacatctattgtgtccaatgcattgaacatgaatgattattgcaggttgttgttgggcgttttcggccgtggcagccatggaaggtattgtcaagctaagcacgggcaaacttatctctcactctctgaacaagagcttgttgactgtgatgtccatggtgaggaccagggctgcgagggtgggctcatggatgatgccttcaaattcatcatcaagaatggtggcctcaccaccgagtccaactacccatacgcagcagtagacgacaagttcaagagtgtatccaacagcgtcgcatcgatcaagggctatgaggatgtgccagccaacaatgaggctgcccttatgaaggcggtggctaaccaacctgtgtctgtggccgtcgatggaggcgacatgacattccagttctacaaaggtggtgtgatgaccggctcatgtggcactgacttggaccatggtattgtggccattggctatggcaaggctagtgatggtaccaagtattggttgctgaagaactcctggggcatgacttggggtgagaatggtttcttgaggatggaaaaggacatttctgacaaaaggggcatgtgtggcctcgccatggagccttcctaccctactgcatagggaaagctcaagtgtgatgtggatgatgtatagggattgatgaataatgtgttgctgtggttcatactttgtttgttcaaaatatataatttataatgcacttatctacgagatgcatggataacatgggttggatctgataaaataggtcaagtatatattgtccatgagcaaatgagcctttgctacaattaattaagatggctggtaaggttataagtagaacaaataacatgtactgtcataatttataattcaaattgttgaaatcactagcaatcacatacactactactttctctgtttcatattataaatctagacatatatatatatacatatttattaacatctatatgaatgtgggcaatattagaatgtcttataatatgaaacggagggagtatagaaaaggaaatttgtgctggttgggagatgaccataggtgccagattttccaacgccacccagcaaagcaacacctttgaggtcccaggaatgaaaaaaaactggcttgatgccttgaccaactctccgtcatcactgagatcaccatcattcacatcaaacacaatcacaatcatcactgagatcaccatcatcacaaacagacaaagaatgtcaccatcacatcgacgaccgggccaaccccgtggtcgtggcggtggatcagtccctgtgttgacagtggcgttggttggatggagaagaagaggaggaaggaggggtggtggtggtggctaaggaggaggaggaggaagaggaaggaggggtggcggtggggatgaggaggaggaggaagaagggcagtagcggggagaaggaggaggcggcagaggataacgccagtcggctcggttggccggttttttttaattataggcggtcttttaaagaacatgcacatataatatcagtataggtatcgatttttttctagaatcggcacctgtatgttcttaaagatgccagtttttaattttttttatcccatgaaagtggaaattggtcaatagatgccggttttaaatgaattggcacctatgactatgagccgtttcctattaaggtttccattgtagtgttataatttataattataataatttatatttttatgcttcttggtgtattttgttagataatgtcttggtgtacttatgtaccattaaaattactactgatgcttggtattacaaagctaacattttggaaacatgtcaccatatttttataatattaattatcgttctatgtaaataacttaaaaggtggaaaattcttcgtaaaatgtcttatccctattatgatatataccagttataaaaaaaagaattcattttagacctgctatgtaaagttaatttatgtctgctgaatcctgagtaatctagcagtttgttctccctatatacttttcaagtgaaaaaaaaattgtaatttccataacatctggactggctattctcattaattaagaatgcattcaaagaattctattcatttcaaatattttgcagcgaattcagtaatatttttactagagctccctcctgaactcctgcattgctttcttagctttattcaacaagctcgcagcatttcgcctgtatttctctttccgatctccatccatcatcacctcgctgatgcacctcttccctccataagtaccattcttgtcccattgcacctccgcgcacctatgccccacaaggtctccatatagtatgcaatggttggttgatcagcccattgtgcattgccaaaggggcacaccgttggcaatcgcctccaatccgtgatgagcccacttatttgagtaaaaattaaaaagagaaatattgattattcaccacttgaataatatttatctcttctctccctcccttctctctcgctctcttctctctctccccctcccatctctcccgcagccggcggaggcgatagtggcaaccacgccctccgctctgccagatccggtaggaggggaggcggcggcngcaggaggggaggcgtcagcgacaggcaggggtggtcggatcctgcgttggcggcgggtggggtggctcaagaaagggagccggcggagggctcgcccgtggggaggagccctcccctccgctagatctagcgggaggagagacggcagtaggggtggtaggctcgcggggggttggtggtggcaggcggcgggctctctgaagggagacggcgcgatgggaggtggcgcgacggatgaccgtgcaacggcgacgactgaagaggtgtgatattttttattccataaatttgattagagtgccaaaatttgtgtcgtgggatgaatgctgccaaaatttgatatgtggatgattccatctttgcatgttgtgggatgaatgttgccaaaaaaaattttcttgttctttctattcttccaggtgtgggaggagggactgcttggctcaatgcattggctcgattgagctaacgcatcgagccggcttttttttattcgtcgaacctaaaaggtcccggttctagaaggtcccggttctaatgaaccggcacctttttgatttcaaatcagtgccgcctcccttgtgccggttgggaaaaccggcaccggagggggtttcccaaccggcactaattaccttttctgtagtagtgatactagctttggaaacaaaagtacataaatactaatgttataattcaacattcaacaaatcatacgctttcaaaaatccacattgccacaatttgttatagcaatcaagctaagaaaagcagcagacgaaaaactgtgcaaagggaaaacacaacaataagaaaaaaaaaagagaatatgagataatctaacttgtgaggtagcaaggtctcgtgcctcaagctcgcagcgaaaaggagaggggagggtcggaacaactgaatctagatccaccacctagggatcgaactaccgtaagaacagggcaaggccgtcgtcacaatctccgtgctgacttcccgggccttcgtgatctcacgacacagtcatcgaccatggagccaccagatctgccaccactccctctccttagatccccaaccagcggatccaagtctccgccatcactcctacttaataagctaccattgtcgtcaccgccattcctaccaatcaagcactatcactacattctctgcccctaacttctcgtcccccacgtagtggaggaagcgctgcaaggaccggatctagaggaaccctgagcagccccgagatttgggttttagatctggtccttgcatcgcccctcgctgcgtcgaggaggagggaggagcaagagagaggaggcatgcagcgatgtttgggacagcaaaaggagatccccatggtagggttggggatgcaagtgggagagacatatcggtaggcaaacagttctcctcccccgcgtagtggaggaagcgctacaaggactagatctggtggtaacccttagcagccctgaggtttgtgtaacatcttgaaaattcctgacaataaaaatcactaaaattttgaactttttaaaactttttgcatcatgctagatgttatggttgttattgcttgccaaaccataaattgacacaatggaaaaatcaatctaaagatttacacccgagcaataattacgatttacaacgatacggtatttattatcaatcccataaatatttatgcacatgaaagccaagccaaataaagtacaagttaattattaaaccgtgtagtataaatcacaaatcaaatattaaataatcaaaccatgttgatagcctgatttcatatttaacaaaaggaaacaacatggttgaatatgattcacttgaatccaatctcacatgagatataagaacacatgaaatgatgatcaccactataatgagatataagccaatgccccgttcagggaatccaaaacctctgtatcagcaatttcatagacaaggaactacaccacatggatggaaaggaaaacagaaaaggaagatgtcaccactaataacctatgctgaactggatctcagtaaaatgggaatagaaatcggtgatttgcctgaagaagttgacgagctacaactatggcaacgaaagagagatggctgttgtttttcttgtggacaagtcggacattatgcaataggctgtatttaagacactagtgaagaacaagaaacactgccttcacagatcagcccagaagaggacagagttccagaaccatccaaagaactatcgaaggttaaggcatgtactctttgcggagagataggacactatggtagtaattgcgttactcaatgcccctattgcgaccaagaccatccagttgaagaatgcccaactacgaagatcacctgcttcctctgcgaaaggatggatcatgtgcccaaagactgtcagctgagcccgttgcttaccaagacggcagaagtacaaagagtgacgcttcgcttcgctcatcaactcatgaagtcgggaagccacgaagaccctggatttcctacattcgattagcatgtttgtctatcgatcaatatttaatgttgaactagtttaatgtcatcgtagttccaccgaatctcgaggacaaaatttctttaagggggtaggtttgtaacatcctaaaaattcctgacgataataatcactaaaattttgaactttttaaaactttttgcatcatgctggatgttatggttgttattgcttgccaaaccataaatcgacacaatggaaaaatcaatctaaagatttacacccgagcaataattacgatttacaacgatacggtatttattatcaatcccataaatatttatgcacatgaaagccaagccaaataaagtacaagttaattattaaaccgtgtagtataaatcacaaatcaaatattaaataatcaaaccatgttgatagcctgatttcatatttaacaaaaggaaacaacatggttgaatataattcacttgaatccaatctcacatgagatataagaacacatgaaatgatgatcaccactataatgatcgtgtttataaataagtaattcaccggaatatatatagattgatacttacaacatttcgccgagttcctcatgacatgaaaatcactcatataaaataatggtcacataaataaattaatctttatatataaacaagaatatgtgagtgtttaaaactagattaatgttgtaccgagtcttaatatactatttatagaataaatagattcaacctatccgtgtaaaatatattgctatgcaaataagttcactcaatgtgctattgtaataataagggccacattaggatattctaattaattttagaaccctcaaagcctccaaaattatttaggttaattttagaattagacctcatttaaataatacaatagaaaaatatatatgagaataaaatatgggtaatattaaaatttggtaaactttcatctaaattaaaacatataatgggtaaactccatttgtgtgaaaattagggtttatggaacaagaattgaaaaggaaatcaatcaaatagacaacataggaaaagtcactgttcattatggcctaggtgtttgatgtggtcccctagcccttcccccctcctctgccgcgctccccctcgcgccccgcgcccctgcacacgccgcgccgctgccgccctctgctgcgcgccgcctcgcgccctgcgccgccatcaccatcgccgtcgcctcgctccgccgcgcgctgtcgcgccgcctcgcgccccgcacgccgtcgccgtcgccgtcgcgtcgccatcatcaccacgccgcacgccgtcgccatcgccgtcgcatcgtcatcaccgccgcgccgcttgcctgtcaccgtcggctgcgccgcgccgagccccacgccactctcgtcgccgccgtcgcgtcgcccgtcgcgtcgccatcaccatgcgccgcgagccgtcgccgtcggcctcgcgccccgagccgccgcgcgcccatcgctgccgccgcaggccgcgcgcctgtcgtcgtcccgcccgtcgcgtcgccgctccgagccccgcgccgtcgcgtcgccgcttgtcaccgtcgcctcgctcaccgcgcgccgcgccgtcccatcgccctcaggccgaccgccctccccgcgccctataaacccccccccctgtcgccattaccctcatcaccttctctccctttcccctctctttcccatctccggcgtcgccgcctatttggaagccgccgccgccgccgcggagccgacgcgccccgccgccgcgctgcgcctcgtcgccgcgccgtgctccggcgtcgaccccgccgccgtcgtcgccggaccggtaagcccttccgccttccttcgttgccggtagccgcgccgcgccgctcggctgtgagagagagaagaaagaacgagagaagagattagtgcacagtaattacttagttcaccccggataaatgagcctatgacgcgtgggtccggatgattagaaatctaattaaaatcaacattaagtttacactctatgacgtatggggcccactggtaattaaacaagcaggtttgaccctaagtcaaccagggccggtcccacatgtcaaccacagtgggttttggataatgtttccgattaaaaataaatcatttatgaacagtacatttttacaatttctcggattaactcaaatttgaatctttaaactagcataactctctcattttaactcggatttgagtgaaacttgaacctaaatttatctaaatttataagctttccaatggtatataattcactatttgataaaatatatttataattattaaataattaatactaagataatgcataatagtcaacttaaaaatgtgctaacaaataaaattagtactttacagtaaggtagatgtaagaatatttgtctctaacatgctttgtcaatgtaacagccacacaaactaattttaaaatatgtctcaaattaatgtataggaagatactagtactattaaatggttgtataattaaacccatgacttatagattatttaaataataaagttagccttataattaggcaaataaaatatggatacacatagatcgttcctaggctttcttgtgagataataacatagccatcctaatcacatatatcgaatagcttacggtaaatagcaactattcagtaaatgatccaatgttaaaatattgttgcacacacgtatattgtacatcccaatttagatgtacagtatatcaataacctacccttttgaatataataaactaaggagtctatgacaaacatctatagtggataaatactaaatataaatcatgacctaatataatctaagttcaattgtaagttaggattattcgttgtaaaattatgtggtgggataatctgtaaccataatacgattagcctaaacaactctaacatacaaagcatggataattattaaccttttataacttattgtgacaagtaaaatatgttcataattaaagtaaagcctccatcaattaaataataataaaaatgattcaatatttgattgatcctaaatccatctaacaacagaacctctagtatataaccgtcctatttacatagatgtatacatagtcataatccttccatagccatttcatatatatatatatatatatatatatatatatatatatatatatatatatatatatataccataaatgctatgttggttaactcctaaatagatcacgatgacaatagaatgattaagaagctttagcccttagcatgattggaatccattagcaaacacgaatagtacattttattgtgcatatttgattgttgtttgaatattggtttttctcgcgtattatagaccttgtgtatcggttagtcgtgaggcaacgtctgcaatttctaggaggagaaggttgatcaagattatatcaagaataaggactatcctgagcaggcaagtcatcactattctttgatcacgttgatcccaattgcgaaattaatttttgtttacaaataagattgtatgtaatgatgaacatcctacttgtgattatgccatgccttgattattgtttacccttaaatctttgaaaccatgattacgtatgagtccctagtcaactatgacacttgcttagaaatgctactttagaatcttgcatactcatgtttatcaaatattatatgcttgggcaattacctttgggaaggtaattgagatgcggcatgtggagacatgagcaccacattgccttgataatgatgacatgaaaggaattaaaaacctttgttttagaccggggtggacggtggatttgggtggtatccgggaaaggctagtaccgtccccggtcaattaaggaccgagccatgaagttaagcatgaaacgaccccgtacaaccacatttctcgaatggggatagacctagcggagtaaatagccgagcggaggcagtatccatgcatagtggtttctcatgtgtaaggcagtggctctacaatggtgtcgccattgctaggactgccgtgtgttgagttgaacctagttataacttaattacatgggtgtaaaacttcccttcccgggtgcgccagaactcctctcactactagaaactgtgtacgcctagagtgcatgaggatgaaaagttcatagagcgggtattgccaatgcgaggttatcgaaaagctttgtcgtgacgcgtctcatatgttgagacaaggctcatgtgttgggcagtcgcggggtgtgggtaaagtgtacatccactacagtgtaagtaaaccaaatctattcgaatagccgtgctcgcggttattgagcaccgggacatgtattacacttggctagactctaaattcttaacttgtgtgggatgggatattgcatgatgaattttatgctgatggagccacttcttgagaggagggaaggtggacgtcctcagaaaaccatgacgactcaatagcgggaagctatccttgggattacaatggatgatggacagaaccgtcgttgtttaatgtgaacactggtattaaaacttgatcagtctatgctaggtcttaggcttgtgaaaagaattgcaaaactagctttatgcaaaagaacctgaagccgttccttgaaataccttctatcatacgcattgttgttgtggtggcttgctgagtacggttggtactcacccttgctatttatatatcttttaggagagtgtcgaagagaagcccttgtcggtacgcttgcgtatccaacaagatgatcggagtgcagtcttgttctaggtctcgttccccagtcgactgcctgtagcatgttaaccgggccctattattattttgtcttccgctgttgttctctgatagttgttggcctacctggccttaatgtaagtatttaactcttatagcctgaattcattcgtgatatgttgtgatccaactatgtatgtgtgtaccaactactgatccagggattggtacggataaacatagaagatttccgatttccaaaatcaggggtctacagtttgggtatcagatctggtccctgcaccgtctcctacactgcgtcgaggagggaggagcaatagagagggggcatgcagcgatgtttgaaagagcagaataagatgcacgcggtagaattggggaggtgagggggggaggcatatcggtgggcaaacggtcacatcaatggctgtggagagcgaaaggattgttatgtcaacgtgtgagaggaaatgtagagatagcttatgcgcaagagccaagcttagacttatgtatgcacgcgttgtgacctgcgttgactgtttttaccatcggttaattaagaaaacaagcaccactgtctattttttatcatgaacaaataggagtatttttatatcacaatgaattcattaataaaccggcctgaatagtatcattaataaaactgagaatgatataatttccagaaacaactttaaataatccggcaatgacaatgaggctccggttgatggttctgtgcgatagggtcgttacgcaagattgaagtctcaacatttttaaccatattatttacatgagtttttccttgtgctattttttagcttcgtatagtatggaaacttgtaattagtaggagagagatatatttttgtaatggcaagttctaatagaaaggatggattaagtggagaacataaataacagtttgtctggtggaggaaattaaaatgcacatatgtgttctgtaatttagaaagacataacccttgtgctcccaaagtatggaaagcttaaagaattatttttttttgtcccgatatgtctatgcttagcttgttgtcctcgacgaggacataagctaataacacttcaggtaaagtttggcgtagctctggatacgagatttcttaaatttggtcgtacctgcaaatctatggagctgtgattacgtgaataatatttagattaatcatttgttcctattttagatgaaataagaaattttaaaacagtataatttgatatagaaacttcaaattcagaagggatatggggtctggagttatgctagacatgaccttcattatgaaataaaaattgtaagtaatataaagtaccattttacacagtccgtaaacttaatttacttctgctgaattatggaaaacatcagctcctcgacctccatgaacttttctaggaaaaaaaattattcataagctagaacatctctaggctaatagccattctcactggattgtcatttcgaatacttcgcagcaaattcagcaatattcttgtcagaccttcctccttcatgcattgcctctttagctttcttcatcaaccttgcagcactcctcctatagtcctccttcctatccccatccatcacctcccgaatgcacctctcaacctcttccctttgtatgccgccactcttttcctgccacactctgacacccatgccccacaagctctccatatactttgatatggttggttggtcagccaaatgtggcattgccactagcggtacaccattaacaattgcctccaacgtcgagttccatccacggtgcgataaaaaacaaccaatacataacatattttattctaattgaaaacgacttcaattgagctattgttgtctagtactcattcactagtctactacacactccctccaggctaaaaaaaataactttgaccaatattttctattaacatatatatataaacaccaataaatatatgattttattgaattgaagtactttttagattaattatacatatggtttgcatatttctaactcaaacattatacatgttatttatagtcaaatttttaaagtttcacatatttcttataaaaatgacaattattttcaacctggaagaaaattattttgttgtcaaaataaataatttaagtttttgttggttccatacctgtggccttgtgagaaagcacctccagctgggggcaaaagggaacaattagtcctctcttcccacacttttctcgaagttctcgagataacttgtgctcctcgttggacctcacaacccaaaggaatggcttgcctgaattgcaaaggccattgccgacctcctcgagcttggctgcgtcgtagccggagaaagtcccatacgacacaaacacgacagagcgaggaggctgcttgtccagccattccatgcacggcacggtgctcgtgaagaggttgaacccgtacgccgtgttcgacggcaaccggccgtcgccgaggtagaacgacggcaacaacgggccgaccgtcttcgcacgccatgtcgcctccatgtatgctgcctcctgctcatttcacagccaaaatgtgtaacaattttgggaccaaatgatcttgtttgttgcaatgtaagctggatacactagattacctttggctcgaggtcggtgaaggagttgacgagcacgtcgtcggcgtcctccagcccggcgaactgcgccaccgactgctcacagaacgctggtgtcagctctggcgtcgcgacgaacggcggcaggtcgtcgtgccccagctcgacgcctagcgcgccccgcgcgtacaagccgctcacgtccgccggcgtcaccggcagcgcaaggcgcccggcgcacacctccccgtagatgaggtcgacggcgcagggctgcggcatgaacgcggcggcgcccacgccggcgtcgcgcgccacgcggagcgcccacggcaggtgcgggtcgaacaccagcacgcgcgccggccgccccgcgcgggcctcggagacgagcagctccgccagcgtccgtgcaccgtgagcctcgaggctgcggtggtactccccgtagtccgggagcgcggccatgccgccggcgtcgtcgtcgaagccgtcggagaaggcggcgacgcggaaggggtcgccgggaggcgggctcctggagagcacgtagcgggtggcgacgagggtggggcggaggccgtggtaggcgaggcggcggccgaactggagcatcgggttcatgtggccctgcgccggcaacggcacgagcaggacgtgggcggtggcgccaccgtgttgatcattcatgctcgccatgggttcgaatcacttggtgatttgacttggaggtagcaagctcgctcgcggcgacgatgagctttatactaggtgtttgaagggttgagaggcagagtggcgcgcaagttaattttggttgtgctggcgcgcttgacgacgacaagtttgtaggcgaaatggagactcgctttgtccagggactatgactatcacagcctcacagaatggataggtgttcgcgtggtcgaagagaagttgctcaccgagattcctgcccttgaagtccttctgtcaaacaaaacaattgctcttagaggtgtgcttgggccgactagtagacaatctctatctctatctctattataaaaatagaagatgtttttgtcggtattttggtatgttatccatataagagtcagtttttaagttcgtttgcttttgaaaatacatatctgtatttgagtcagtttctaatatcattcacttttggtaatacagaatgaatcatataagaaatctgtttaaaaaaaatcgcatgctaacttgagacgatcggactcttaactgcagttcatgattttctatatatatatatatatatatatatatatatatatatatatataagcgaactctcacagtgaatttcatcttaactaaaccatataacaataataagattaaaatatacttcactcgttgcaacgcacgggtattttttgttgctctaactaaaaagccagaaagcatgtttggggttttgtgcagctgcaccccttctccgaaactccatctatctactatatgattaaaacagcctagaaagaaggtaacacatttgttttggaaaacaactaggggttatccatcattggcatgacattagcatttcatcaagaaacgacctgcacacagcactgaccggccctttattatcagtcataactggcattaatggcaagtcatactcactttgaaaacaaatgtaaataaataccaatacgataaattcaccatttaacaaatcatacgcattcaaaaatcaacagtgcctccatatgttgagaacaatcaagctaagaaaaggaacagacaaattaaaagttgtgcacagggacaataacaataagcaaaaaagagaacataagacaatctaacttgtgcaacagtgaggtctggtgcctcaagcttgcggtggagatgagggttggaacggctgaatctagatccaccaccgaaggatccaacctctataagctcacaacgaggcggtcggcgcaatctctgccctgagttcccgagtcttcgtgagctcctaacatagtcatcgactacaaagctaccagatctgccatcgctctccctccttagctagatccgctaccagcaaatccaaggcttggccatcactcctagtctctgagtcaccgttgtcgtcgtcttcccattcccaagccaccaccattgttcctgcaaatcaagcactccaactccatcgatctcctcccctaaatctctcccgtgcaacgaaggaagcgctacaaggaccaaatctggttgcaaccctgccagatccggtccttgcactgcctcctcccctgcgtcgaggaggatggaggagcaacagagaggaatcatgcggcgatgtttgggagagccgaaaggaggtacgtagtagtagtgggaaggggagtgggggagggggcatatcggtgagcaaacgggcacatcaatgaatgcggagagagagagaggagaggtgcgtctgcgtgtgaaaggagaaggagcgatagcttctaggcaagagccaagcttggacttatgtatacacgcgttctgacttgactggctggactgctttaattttgccatatggtttcaaaaccaacaagtaccactaccggtttttaccgttaatagatagtaatatttactatcagttcattaataaaccgcctggaatagtatcgttatattaaactgagaatgatattaatttcagtaacagttttaaataaaccggtagtgctctggttgatggttttgtgcgatagggaagttatagaagattgaagtctcatcctttttaaccatattatttacttgagtttttcattgcgctttatttttttgctttatatactatagaaacttgtaattaataagagagatatattgttgtaatgccgaattttagtagaaagaattaagaggagaggataaataacagtttttccggtatcagaggaaattgatgcatgcacatatatatgttctgtaatttggtaagcaagctatgtccggtactctcaaagtatataaagcttacataattcatttgttgtcctgatatctctaaggtagcttgttgccctcgacgaggacataagctaacgacacttcagttatgaaataaaaattgtaagtagtataaattaccattttacacacactgtaaacttaatttacttctgctcttaatttacttctgctgactcgtggaaaacatcagcagttcagcaccttgacctccatgaacttctctgggaagaaaaaacaattgtattcagaactagaatatctctgatatatagctgggtgcttgagatttcagcaataatttttgtcaatttgaatacttcgcagcaaattcagcaatattcttgtcagagctccctccttcctgcattgactccttagctttcttcatcaaccttgcagcattcctcctgtagtcctccttcctgtcaccatccatcacctcccggatgcatctctctacctcttccctttgtaagctgccgctcttgtccagctgcactcgcacgcccgtgccccacaagctctccacatactttgaaatggttggttggtcagcccaatgtggcattgccacaagcggtatgccattaacaattgcctccaatgtcgagtttcatccacagtgcgataagaaacaacctatagatgccatatttggtgccaattaaaaaaaacttgcatttagttattgttgtctactacttattcactagtcttctatatactttttgttatcaagattaatataatttgagttcttggttagttccaatacctgtggccttgtgagcaagcacctccagctgggggcaaaaaggaacaattagtcctctcttctcacacttttttcggagttggacagataacttgtgctcctcattggacctgacaacccaaaggaatggcttgccggagttgcaaaggccattgccgagctcctccagcttggctacgtcgaaggtggagattgtcccatacgacacaaggacgacagagcgaggaggttgcttgtccagccattccatgcatggcacggtgctcctgaagagattgaacccgtatgccgtgttcgaccgcagccggccgtcgtcgaggtagaacgacggcaacaacgggccgaccgtcttcccacgccatgtcgactccatgtatgctgcctcctgctcatatttcgcaagcaaaatgtgtaacaatttgcaatgcaatgatcctctttggtaatacctccgtttcatattattataagttgtttaactttattctagtcagatttatttaagtttgcttaagcttataaaaaaataatagtactttcaacacaaaacaaacatattgtcaaaatatatttattattagatttaatgaaactaatttgatatcttatagctaatttttgtataaactatgttaaatttaaaaaagtttgagtcaaacgactcgtaatatgaaacggagaggtatgttgcaatgtaagctggacggaagcacacttaattacctttggctcgaggtcagtgaaggagttgacgagaatgtcgtcatcgtcctccagtccggcgaactgctcgaccgattgctcacagaaggctggggtcaactctggcgccgcgacgaacggcggcacatcgtcgggccccagctcgacgccgagcacaccccgcgcgtacagaccgctcgcgtccgtcggcgtcaccggcagcgccagccgccgcgcgcacacctccccgtagatgaggtcgacggcgcacggctgcgacaggaacgcaacggtggccacgccggcggcgcgcgccacgcggcgcgcccacggcaggtgcgggtcgtacaccagcacgcgcgccggccgccccgcgcgcgcctcggagaggaggagctccgccagcgtcggcgacccgtgagcctccagggtgcggaggtactccccggggtccgggagcgcggccatgccgctggcgtcgtcgaagccgtcggagatggcggccacgcggaaggggtcccccggtggcggcgtggtggagagcacgtactgcgtggtgacgagggtggggcggaggccgtggtacgcgaggcggcgcccgaactggagcatcgggttggtgtggccctgcgccgccgggaacggcaacaggagcacttgcccgccgttgttgttgtcctcgatgttcgaggtggtggcgctcgccgccggtgtgctcatgctccccatgatcttgtttggtttgtggtactggtatgcggcggcccgcggctgctgtgtgtgttttgagtcagaaggattattaataggagtgcagtggagtgacggccaagattgcttcctgcacggtccaatttgcggtgtacactctttcaggggtgtcgggagccttgattagcaagtaaagggtaatgttgcacgtgttgtatcacaaggtttgttttcttttttacagaaaccgcagatcgatgtagtcagacataccactatgcatatgcacaccagtgtacacgctcgttttttttgaacgtctcgtactgacagtgccaagttcgtattgataaagtagaaaaaaattacaagattacaaccttgagaggtcataaccagttaaaaaaatatatcaccacccacacaccgacaactctaatacacaaacccgggggaggcgctagtaccgaccggccgccgctaagcgtgaccgaccgccactagaccaacaaaggaactacagccgagatcgtccaaaacctaacccttagaagcgacatgaaatcccgctctatccacatctttgggattgagggagagagggtgagagagaagaataaaaccgctctccccctaggccctccgatttagccaacttgcataagctagatcgccgacataagaggacgttaatctagagcaagcttgcgccacttgtttgggaggttttggcaaaaggttgcctagacaacatttccaaggagagaagcgacggaagcactgccatcgccgcccgtcaaggtctcaaagagaaccgagactaggctttcacccggccgacccgctagagggatgagacggcacgacaacgccctcagaagggggagtgacgctcgaaacgccaccgttgccggcccgaccaaggcctggctgggttttcactggccgtccgccgcctgcctatccaccgctgacacatcattactccaccaccatctaaacctcttccagtgcgtgggcaccactgcattggcgccccccccccacacacacacacctctcgccgtgtcgccaccggtcgtgcctcaacgtgatgcaccagcatgcacctcgccggcctatgccgaccacaccttccactgcgccggccgcatctccccgcgtcgcgctggcctccgctgccggcagctattggtatttcttacgaccacagataaatccacaagtgcacggaataccgccgtagcacttcacctccgagtgacctcaaaaggatatcgaactcagggaacatgtgtaatctcctgaagactaagtccatccaaggacaacaacaattggtagactagctaggctagagagggctttcaatgtgttttagttatctaagctaaattaaaggtaattttctatctgctgctttgggcactgaccctactggtctgccagcgtggttctggctatagctctataatgtacccgaatgtgaaggattattaggacggaattcagagctgtcaccacctgtcgtctacctctaacaaatctatgggatacacaacaaacaaatgtaatatgtaacctagacaccacacctaagttattaattactactctaatcctagtactagagcacttagtacgaatactaaacaatgaacccgcaagatggaaatctatcttacttagactaagtaattaaataacataagaaaaaatcttgaatgcttactttatagaagatgtttctccgaactcggagcagagtgtaccgacagctccaatactcctccagaattcctcctagaaacctacactcgtcaaggtagaagtcagagagattgccaaactttcaagcactcctccagagcttccactcactatctaactattttctaatgtgtaaaagatataatagaacctcttgtaattcagctcaaagttgtgtgccttggaagtgagatgagctcatccttttataggctccatatgacagttaaagccatgggaaatgtccaaaataccctccaaccgtcattgaggagtaattagggacgtacatgtggaaaatggcgatcaacggcgccaggatgggttcggccgaactggtggttcgtccgaacccaaaagcccacctcctagcctctccttcagctgggaggttgcttaatgggcccccaacatcatgtattataatttggcttaattctaagtagctttgattggccctccaatccgtgtaatcgcgttgtgattgtccggaggtgtattttgtcgcttgacgggtggttttcatccataaaatacctgcttacacctatttcaccaacactgtggaaattattagtaataatccctacactaagttggataccatattttatttcattatatacaggc

SEQ ID NO: 9968 - DNA, 14613 bp, Oryza sativa
gccgccgccgccctccccaccaatggatccgccaccaccgagccccccgccgccgctgtcgtcgagcccgccgccgccgccgtcgtagagcctaccgccgccgccaccgtcgcccgagccatctaccgcgccgtcgccgagccccccaccgccgccgttgccgagcccaccgccgccgtcgccgagcccgccgccgtctcccgaggaagagcgcacgagcaaagcggcggtttcacgccgtcgctcgtcccaggtaggacgagttcgtccgccagttttggccggaccgattggtcccggatctgagaggaatattcctctgtagggaccaacctatcccactacccctgaaccaaacacccctaaaaatgggttcatcccatcccatcccatcccatcccagcaaccaaacactacctaggagagcaaaccacacaccattgaaccaagtggacaagtgttactttctaaatcctgatttcttgccaaagaaaccttctcctcacaaagtcaattttctttctaatccctttgggtattctataaaaagattacatgtacaggggtactacttaggcatgagtttattaaggtttttacaaaaggccattatttgaccttgtcaatgcaaccatcatggttatgaatcctttttaacaaccatgtttaaagcaatcaaaccacattattgacaggaaatgaatcaaccttattgctacatttagaatgagaattgatgtattacactaaatggaccttgagatcaatgagaaatgacaactatttcactattcactatctacatttctaacacgtcattagcacgcagctctaaccagctgagcaagaaaggtgaagaactcacaggtaactctaaggataagatggctcgacgttttctcattcctcttgacgtcggatcttctcttccttgcaaccttcgtgctcgctatctacgtcgcctcatgcagcagctcgacaagcttctccgggctcctttgcgccgtcctcgaagttgcaggggctgtggtgctagctttgctggccatggcccacggtatccttcctctggctttgccagatgtggaggatgacgccgcaacggcggcgtcgctgcccgcacaaccaccagagctggtagcattgtctccagcaccctcacgacagtgatgctcgacacctgcaatgcactagaatgcattctggtggagtcgccgcgccacttcaagtcccatggatggacggcaagggtgcggttgtagcccgattggccgccgcaagaggtgccagatgtggtgacgttgtactgtccttagcacggatggacgagctacactcgttgcgccatatcaccatcaccttcgccggagcactcaccggcgacgccgctgtatggtccaccaccggctgaaccgccgcggagcgccgcccttctacatggcagcaggtggctctagcaaacgtgcagcccctccaccggcccctccgttccctggcctctcgaccgcaaccgcggcggcaaacgcgcgccccggcctctaccgcatcatcatgcccaggcatgtccctgccgagttgagcggcggcgacaaggccagctgtcccccgcccttgagtgagggggaggcctgagcatggggagggatgaggtccaggaggtcagggcagaccggcggcggcgtcggtggcaacccaacacggcggcggctgcgggcggtgacaatgaccagacgacagaccgtagtgtgctgccggcgataccatgctacaggctacaggctacggctgctcgctagggttggtctctatctccctctccctctccgagacaccgtgcctgccgccggcgacttgacgagtccgaccactggcgtcagttgcgccgcctgagcgggctgaggcccagctaggtagttaacagcccatccgcccttcgctgctcactaggaccgtgtaattaggctaaggccacatttagcataactttacatatccacgataaatttaaagtttatatggatttaaaattttaaatatttaaagtttatatggatttaaaattctaaatttaactaaaatggaaataaaataatttatattagtattgttaacgtaacagtaggtctatatccataaatttgtgggagctaggaatatccaacttcaaatatttatgtatctagagctttgtcgaagaggatttaaggtgtgtttgaatcactcgtttttgatccatacgttttctaagttagtaaatgtgcaatttttttttgaaaaatatagaaaaattatcttttaaaaaaataatattaacctattttttaaatttacaataattaatacttcaattaatcatactcaaggtacaaaagtgaactttttgcactgtgtaattaggctaactttataattggatccgttcattccaatctggcccggccttgaggcccatgaagcccacgaacgtattcattgtcatcgcctcattggcaagctatccatctcccaaagcgagatgcccatgccggagtaccaaaattccccagtagcagccgccgccgccgccgccgccgattcaccaacccttctcctccatcggcatgtcgcgggggggaggccggctgcccccgcgcttctctctacccagctgtacctgtacctgtacgccccccacaatcccagtcgcctcgcttccttcacattttctgggtgccaagctgctacgattagtttttgctgtgctctgtttttttttttctctctcaatgattcaatgtatgcgggaatacatcagtcatggttgaatttatggtgaaattaatggggttttgaactatttggttcgtctaatcgtccgtaggaccaagtaatttggtagaacaaatggaatctttttagagcatccccaagaacgcccgatcctgcacattactgtagagacgcgtctaattaagtggccaacttacttacggagtacatctcgatctcgatgaaagaggttgccaagttattctgtgaatattaattttgtgtattttctgttcttttcctttccaatagaaaaaaggaggtgtttttttatagatgtgaaatatgctggtaagaacatatgtacactctttcagtataagaacatataagaagtagccaaggattatttgattccaaatttccaattgcaggatcatgtggttgtagaggagataatattacttcatgatcaaacatatttaaagtcatctatttcagtaagaaaatgtttgactcaaacagattcagaggctcagagctcattgtatcataatctttcatacgtatgtaaacattatttgttgcaggcaggcatgagtgccctgaataacatgactcatatcatgctttaagcctttaacacgaagccctatatcgaagaagtatcagtctaaagaatgctattgcttcaaattacaatctgttgtttattaacaggaatgcttctatcatgcgagtgaactgatataggacgaagggtcaggaggcgttgggatttgtactgctccatcaagcatctgcatcaccttatgcattgttggccgcatcgatggctcctcctggaggcaccacagtgccacagcaacgaagcgctccaccttttttatgttgaagattgcctcgtcatcgctcgccaccagcaagtcaatcctcccacacctgtagcaatcatttgcccaataagttagtattgtctgctcctcatctgcaacttctaattccacattcttcctgcagcacacaagctcaagcaggatcactccaaagctataaacgtcgaccttagaagtaatccctatgttcttgaaccactcaggtgcaacatatcctcgagtaccccgaatgccggtgtttgtttgtgtctgattcaccggaagaagctttgctagaccaaaatctgaaatctttgctacaaaattatcatcgagaaggatattctgtggtttcatatcgcagtggatgatttgtttattacactcctcatgtaggtagaacagtcctcgtgaaaccccaagtgctacttgaacacggaggctccaatgcggatgactatcgttgaagaggaatgtattgagtgagccattgctcatgaactcatacactagcagcttttcagttccctcattgcaaaaaccaagcagtctaactaagttcctgtgaaacgtctgcccaatggtttggacttccaccaagaactccttttgtgcttcctgctgaagcttttcgattttcttgactgcgatgttagttccacactcatcttgcagctgtcctttgtagacaatacctgaggctcctgtaccaagtacctcatggaaaccaccggttgccttttccagctctctgtaagtgaaaatctttgaaggtaatccagaattactgggtagttgcgataactgggttttcttcctcgaggtgatactacaataagtaccaaaaagcagaacaaagattaggagaaagttcaccaatacagagcttccaaaaaacaatgagctcccaagaatccaatactttttgtccttcttccatttgctggagccgctgctgatcatggatggtgaattggtgctcctaggcaccttaagaagaactgtcgcctgtaaactggaatccatattcccatttgataaagggagcttctttttataacaagtgtttgagggtttattgaacacggcaacggagcagaagcaatcaatgacgcacagccttcggcattcggtctcatctatcgggctgtactgctcatagtcagatagaggccaattaatgcgatcaattggtgtcatctcatactgcaccattgctgctgtctcatctagatcacagctttgtggctcaaaatctggcctgcaacctttgtatgtcctctcattgtcgaagaacttgtacctctgtgggcatagacaatttgttgtgttcttggtgccatcaaaggtacagtaactgttgaagccgcatgcaccactgcctacctttgtttgaattgtctggcagatgttctccggaagtgcatccaccgctctccattgctcttgccataagctcctggcctgtttgctctttgggtaaatatattgccggaacacaccatctgtatcaagggttgcacggtggaagaaatcacccatagagtccactcctgcagaagtgatgtttatctgtgaaccattagtcagcgtgaagtatatccttccagtttcattgaacaccagctgtgagccattccccactgtgttactggcccagtatggatcatggtagtatgcagaaggtacagcaactagatacagcacaagattaccgtcatcttgaacatttagttgaaaccggccattggaatagtctgtggcgaggagacggctgtggagtgctgtccctagtgggagcacttgtgtgggtaggatggtatcagaagggtcaccaaaggactcccactttgttgcgccatcagtgcctaaaagcctgaaattaccggtgtcgagcattctagcatagcccacatcagtgactcgtggattccatacctcgttgccagatggatcgcgaagagagagtgctccatcagcgagcttgaggatagagccagcttggacttgtatcggtattgtatcatcttgcctattggagctagtcttggcataccagatgacggtcttgtcagcgatcttgttgaaccagacagcgagcaggtatgaggaggagtttccatctaccgccagaaaaccgaatgcaaaatcagcagtgggcgagatccatgagttgtttatcccctggggtgtcaaagaggagcctatgctgatgtttagctgagcttgggcagatttggtgcagtatagtagcaagagttgcaggatgggcaagaacaggagaggtgccattgctattgatcaaccttttgctcgtactagatgacaacaaaacttatagcccttggagagcggcatttgttagtcttgatcacttccatacttgactaaccaaaagtttctctgcgaggcaaccggttgaacctgtcaaatgcaattacaaagctgtcaatatgatagacataagagggagattggttcacatttccttatcaaaactatagaaaatgtcggctttgaatgcattgaccacctgtatggagagagaaagaaagacgtgttcagaagtctttagagaaagaaatacgtgttcagaagtctttctatgtgtttctttcctcctgaggttggtctttccaaccgcgtttcagaagaacagttttggccagcttgtatggttatggtcaagccaggtgtaatcttttcatggtaatataggagtacactgtaacattaattgatcaggttttttgacgcagtcagaacctgctttgctgatcgtaaggccattcctactgtgagattcattttgaggtttccaaaagtcacctaatctagataagctcggataggattaaacatatagacctccaaattacagtttcacatagatgattttgtttccttccttctattcataaattttttgacaatgtcccatgtggcatttaatttaatcagaataaaacctcttatgaaacctgcactaaaaatggcctaatatatgttttagccatttctaccacgcaaagtcagtgctccattcaaggggagctaggacacattgactaatgatgtctgtctgtatttaatttaatcagaatgaaactcttatgaaaccatggtagcaacatatattttgaacatttaactggtcaattggaatcagtacttcctgagtcctttccaagcttgcgttgcagaagtcttcaagtcccccaggtccacgttaggtcaagacggtttagtccctagccattctagtcttaaaacaatttagtccctcgtcagttcgaaaaaccctatttgccaccctgcgaaagaaatctaagtcaccacaccttgttctccatcctcgcagccacccaagcacactgtatgtttgtgacaggcttgaagaagacggcagcatggctatcttcttcgtttttctcctccaccccttccctctcaatgacttagggatccttggatccgaagtctctggcgccagccacagttccaatgcagtgtcgaggaggacggttgtgactttgacattggtgcggcaaggtatcatcaatcatggttttggcattactgacaactccgactttagccatggctctggcatctctggtgtgtttgtgacaaggccatgtcggtcatggctctagcatatccggcgacgataaggcattccggcatggcacggtagagatatcctctccctgtcatttgctgcattgtcatccgagcacgacagtagcaggttgcaaaggcattgcctagcttcttgtgcgatagacaaaggatatgggggcacccagatctcaccaagaacggtatgacttcgccgacaaaagttgcgctggtagctaatggcagtgcaacaagggcgtcatgccttgatctagccttgactgccatcaccttgtagctaatcctcatgacagcattttcatcaatagttaagggcttccacaccaacttgtagagcaatgtcattttagctataatttatggtattatctacaccctcatatcattcattcttcatggatcatacggattgcggaaatgtgtattggcttgactgcaacacaataattgtatggtagcatgtctagagaagattgcagactgtcacaccctgaagttttctctttttctagccttaattcaattaataaattgcctcaagaaataattcaatttaacctcgagctaaacccaaattaataaatgcaattaataattggaaatagcatggtgggatttttcttgagttccccatgtttaaatacattaagaggattattagtggaattttctgagcaaagaaaataattttaataattaaaatcaattattgaaattaaattaaaagttaacctccttttatctctcttttcggctgtgggccattttcagcccactcctccgcgcacacgctctctcctttgggtcggcccgtagccacagcccagctacagccgccgcgccccatctctccctaggtgtaaacatccctccttccaaaaccgcgtagctagcctatcccacttatacataccactccacttacacttttcattctcacatcgtgtaaaagggttatctcgagagtgatatggttgaagggacaagcccttataagttagttccactcttgctaaactagcaaggtggtactaaacatacgtatacaatgctcatgggccacacatgcctcatcctaattgggccaggatgttacatacacccccccaaggacctgatgccccgttgacacaacttacccagatagccacacatgcacattgggaaatgtccaggaacacactccccccttagcacacgtccagtgtccacatgctccatgcgccatatgcttgcacactgacccgtacatgcaacggcgagggtcagctctgataccatttagaacaaccctccctccaaaaccgtgtagcccagcccaactgacgggcaggcccacttacacatactatccaacttaaactttcatccccgtttcgtgtaaaagggttaacccaggagtgatatggttggaaggacaagcccttataagttggttccactcttgctaaactagcaaggtggtactaaacgagcgcacacaacactcataggtcacaaaggtctcatcctaattgggccaggatatcacactgggtcgccgtcaggtaggaccactgttgggcccatcttcaaccttcgcaggcaaagccagagggcgtaaccgccgccccgtgcgccccgtccacctcgcggcgcccactttgcacatgtcgccctcttccacgcccccgcaccccactctccccacgcttcgtgcttgtggagggcgtggtattcgattttcgaatcccggccacatctctctctctcctctcccacatccgctacaaaatccaccccctaccggccaagtctgagctcccaccgctatataaacgatcctcgtgatcccctcctccctttccctcttctgccgctcgttcccgtctttctcgaagtggttgtagaggttcaagtagcgcggagcaaggcaagccatgcatccctcattgaacatattatacctatattgcaaatgtctcgctttcttattttataatgtcagaattatccgttataacataagggtatatggttttattttaaattttaaattgaaaaggttaaaaaaaataataagaaactaaccactccagcttgtgtggcaacttgagagaagaggattgagattttagacatcaattctagaaattgatggtcagattaacatgggaatttgatttttagtcccaatcttttgtttgttagaggtggtaaaatttcattgagaatttagttagagactagataaatcttaaatgaaaatagatggttaagttttgtttaggtaaattaaaagaggaatttcctccgaattaccacccatgcccacgtatattttgaaacagtaaatttttaatggcatgattataattaaccctattaaaaatgtcactcaattccctatccccgtcttacgaaaaactctcgtctcccctaatcaaactgaacattttatagccacatcccacaactccccctaacctaaggaccgttcgtgcgcgttcggctattttctgcccttcctcgtatccatctgcgacattacccaccgcgcacggcggcgacacggcagtggccggccggggtactgggcttcagcggctacagcctatgggagtttctgggcgctggccgcggccgccggaccggtggtctcctgacgcgcttccacaaggtccgggtgccatatgattgttgcaattgatgttttcacccattttttttttctcaaaatattaattgcgcgtcaggtagggtagaattcgctatgtgggaatcgatttaatgccgaataaattactcttgtacaagtagaatcgcatttggttaatttggtgcgtcgtctcatctactgaggggatttagagggtcagcctaacgggattgtggaggatttgatttttctttttgttgttggcatacgatgaatcgaggtgctagttttatgttcgtggatttgtttgagtgtgtcctcttaagagagcctaacaatgcctattaactgaagatagacttttgcttttatgcagaatttatctagctaagtcaatattggtagtgaagtttattttcccttttttccctcctggaaaatgcaagtgtagttttgaagatgtggattgtggaatatgctggttgctagaacagttttttgccacattttggttgtcaataagagaagtttgtcccttgtgatgagaacaaacatatagcccttagagaatgaaatttgtagctctaaaaaaaaaagaacgaaatttgtcagtcttgatcaccttggaaatttccatactagactgaataaatccctactgttcttcgtgatactttgagtctacagatatatggcacagtgcagtttcctggtagatgtcacatgaagtaaaaacgttgaataccataagtccagaacttgtgaggctgaggctgtacttctcaaatgcaattactacctgtcacgccctaaaaatcgcctaaattaaaaatgcatattttaaattatttttagaaattattttaaaagcctacaagctaaaccctaattttctaggaaaattttcaacataaaaatgagctagataaaattttattaaatactatgcttgctcttctattttctagaattttctgggaattatttgagcaagggaagtatttttaataattgaaacaatatttcacaaattgtttttattgaaaaagttcaaaaaacccctccctaagccgttgggccaaattcggcccaacatctctcctctcccgcgcggccgagccggcccaatcggcccagccgacgccgcccgctcctctctcctgtggagaccgacaggtggaccccacctgtcgggagctccttcaacctccagccgccggccggcctagccgagctgcccgagccgcctcctttctcctctcaaatccgctccaatccggccccgattcctccgggtttttgaggggattttatcctctcgttctcctctatctttacccccaagaatcggagcaatccgttgagtattctctccgaatcgagttcgtttcgagtttatccctaaaaaccgagtttggatttttcccgagtcgattcctctcgtttggagttcgatctcttcaatccaagcttatataaagcatcccctcgtcgccctctttcgtttgccccctttcccgagctctctcgtgcctcgtagtgccgtcgccgcgttgtttttgttcgccgccgccgccggccgtcttcagtcgcgccgccgcgccgctcccgttgtcgccgccgcttgccgccgccgccgttaggtgcactgtggtgaggagaacctcggtcgcccgtccttcttcgccgccgaccaccggagtccgccgtcgtcgtcaagccgagccgccgccgccgtcctcttcgtcgccggccgtcatcgttcgtcggtagacgttgtggtgagtaccgttgggttcgcctcgtcgtcctctacgcgtaggtgtcctccgatcgctcggcccaggtccctagctccggcgagcttgcaaccctaatcggccggccgtgggtgacgtcatgctgacgtcatcatcttttctttttcccgattttctaatagattaaaacttcggaaaatcataactaaataaccgtagatccgttttaggtggttcaagttgctaaatttttttaaaatcaagatctacatgttaaaaatatccacatgtactgtttatgcttgtttttgtactgttttgttgattttgtttaattgctttagtttccgacgttccggaggagagcgtttcctttgaggaaggttccgaagcgtttgcggaagcccaaggcaagtcacacagatcccaaacaaccctttgagcatgttgaacccgtttaaagctattattttatttcaactatgcattgttttcgaatgtcatcgggtggtgaacctttcccggttatttattggccgaagatgactttattttcctatgggttataatttgattagcatgaaccttatatattggattggttcagctaaatgctatatgtaagtttgcttagccatgcctagaaacatagctaattaaagggattaattataaactatgttattattattaatgatggttattaaatggtagctcacgatggctgatcgtgtgatgttaattaattgataattaaaacctggttaaggtgggttgtgagcacatggttttgatggttgtgctcatgacaattaaggaccggttcgcgagctactgttgtgaaacatttatcgtgccaaccacaagccagcgtgggcaacggctttatcttttgtatagcgtgattcattatagtgcgtcatactgagaagtggcgagaagtccacgggggtcgctggggagtccatgccttgtttataagggggtgattatgatccaggaaaggtgcgctgtaatgggttatgttgtgcgaggggtattgtcacaactcctttccgaggtaccgtggtggtattgaggcacatggtgacatgatgtggggttgtgtcttgtgggtacagtggtacacctctgatcagagtttaaactattcgaatagccgtacccgcggttatgggtgagttgagcaatgtttttcgtgattagtctcacactactcaataatgttaataatgtgataattaattggactcctggtttggaatggataattcctggtttggaggtttaatttgttcaactggggttggttgttcaaatatggttgggcctatgcaacatgggtgtgttgtatagtgttatttaatattgattaattattcaactgtttttactattctcttaaatgtttattaaatgctgtttctgcaaatgagctatattatgccatcctttgttatcctgtgcacttgcatatttgctgtgtgacttgttgagtatgtcatatgctcattcttgcaatattcattcatcagaagaggagtatctcagtgaaggtgatgatctggaggattaggcttgttctcggttaagatgcctgtggagtggagtcgccatagctgttccgtagtttgttatcgttttttttcttttccgctgcgtagaatgttattctttgggaggaactatccacctctgtaataatttattttatttgcgaatattaaatagtcttttatttgaactctattattaatttgtcattgtgtgcctcggttgattcctggacgagggtttaacacacatgtaagcgtttggaattttggatagaaattccgggcgtgacactaccttttcaacaaaatcctgtcattcagactattcctcatcagtaattcatttcctcagtactactttagaaaagggcgagctctggatgcattgactaggaagatgaaagagagaagaaaatatatgtttcagaacactgtgtctcagaaaaattgtgtgtcttggaaaaattgttttggccagcttatgatcattttaaaaccagctagaatctgtttgccagaatccatttaatattaatcagatctggcacaatcaggtcctgcattgctgattgaaacattgtgtttcatgttccctgttttccagttagcaatgaacactgttctgcatacctcaaacataattccctctatcactaatgaccccataaaggtacagttaaaacaaatcctgttagtttgttcttctctcacaatttgtatatgcactatgctttttgtttgtttcccaccagaaatagattgtatcagtaacagacttttgttaagaactacacacttctattacataagtacatgcttgatccagtagtttagcttaactgataaagtaaatggccggtcctgcacattactgtagagatgcatctaactgaatggccaacttacttatatctccaaagaagtggtctcgttattttgtgaatattaatttagtacatttttctgttcctttccttttctttctttcgtttttcttttttgtaacggacatgttattttgaagatgtaaaatactatatatgctgataagaacatatatacaacatttcaagaaaccatatagcttttttttattccaattgcagaaaccatatagttgtagaagagatgaaataagttcatggtcaagaatatctaatatcatctctttctatataagaaaatgttttaatccgacaggttcatagtcagtgatacacatagtgacatgcatctatctgcatctttcatagatatgtaagctacttattgtaggtaagcatcagtgcccgaacacaatgccttattgaggaatcagtctaaagcatgctcttgcttcaaactacaatctatttattaacaggaagactgttttcatgcaagtgaactgatat

SEQ ID NO: 9969 - DNA, 6071 bp, Oryza sativa
cgccgtccccgtccgcccccccgtcgagctcgccgaccgccggagtgccgccgtccccgtccgcccgagccgcgccgccgccttcctttttcgtcgtcgccgtcgacctagggtgagccgtggaccgccgtctcgtttccccctttccctcccctctctcggccgccgctccaccgtgcctatggccgccgccggcgaccataggggcgcgggcgcgccgcctcccgcaggccgcgccgatgtggccgccttcgggcgcgccgagcggctgccgcgtggggcccggccgtcagccgcccgcgccctcgggtacggctgacgcgtggggcccacggcgccggccggtgtgagcccgggtgcacccggtccaccgtggaccgtgaggctgccgcgtgggccccactcccgtggacccggtcctcgcacctctccccctcggctgacgcaataaaccatttttaaattaaaatttaaatgaagaaattcgtaaatattcatttaaagagcatataaacttcaaatggccatactttggccatttgaactcggaattggaccgttcaagtctctaatttttccttaagaagtcaagaacccatttttgtgctttgttcctgtttgttatatgaagtttattagagtaaaagcctttttcttttccgttggtcgtgtagacgctgcagcttcggaagatccgctcttcgtggaggttgaagccgacgtttgggaaagcgagcaaggcaagtcatatcatctttgaacatattggatcccactttatgaaattattttgatttaaattaatgcattatcgctttatttaaattctcgcgttatcactgttttatttagccatgcctatttacctttgttatgaccttatttttgttattgttattattactttgttcaccctagaataaacaaaaccccaactagtgggcgctctactcatggttcccctagtatgaatttagatagatgcttcgctgattaataagacaacattaggtggtttttataactttagactttgggaatattcatatctcttggactttatggaatggttggactattgtggaattggatgcacacctctccctctattcaaaactctcaaaatggttataggctgggcttggggtgcatggttttgatagtagcacctcggccacataaggaccggtcttcgggcctctgttgcaaagcactaccgtacttccacatgtatagtgggtaaggcttagtttgtggctcagtctggttataaacaaaagtacacggatggagatggacgaagtcgggggtcgatggacatctctaggacaaatgaaggctacacgagctgcggcccggtagtcgagatgtcatggcacaaggctggtgtcctgctgctaggggctcagtcctacctacctgtcccggaggttccggctgtaggtggggttgggtcggtactcttgtctatggctaggatgggttggaaactatgtcatgtcttccgtccatatgccgtggtggtatgtggcacgtggttgcacatgaggaagacgtgtcttgtgggtaaagatgtacacctctgatcagagtaaaacctattcgaatagccgcgccctcggttatgggcaagcctagcaatgtacccaagttagtgtttttaattcttaaaacctgcttaataactaaaatgtggaatggttggcctgggttggcttgggacgagctgggacccagggtcgggttgccggttcggtctgaatcatcgtaggccttgggttaaggcaggttcgtgtgggttcacggccttgtttaataatattaaatagttctaggatcgtgttttaaatttggctttgagcaactaagagtcttttaaatgctgtttattgcaaaacctaacccctatactataactccattgtactcctttgcatttatgttgcacttgtgagtgtgtcttgttgagtacggtggttgtactcagtcttgctcaatttttcccaaacccagaagaggagctcctggatgatgaaggctttggtgtttagctcgtgcctgccgtcaagcgcctgtggtcgtcgccctagtcttccgctgtttttcgttgtcttcgtgtgtgctgggccctcgttgcccatgtaataattaactatttacgcttccgcttgattaaactctgaattgtatcaacttttggtgtaccttgcctcctaggacaaggaataatacacgcacatatggaacacccgttgggttatttccggtcgtgacatgtgtcatatctaccaaaaatctcttatattatgggtctgtccagattcattgtactagtatgtgtcacatttatattatgggccggagagagtagatatatatggacggttggtttaaagtttatataaatttaaaatttgaaatatttatgatcgtacggacagttgatttaaattttatatggatttaaaattttagatatttaaagtttattgagatatttaaattttgaaatcttttactaccttactatcatgtctatctatatatacgtgagattcttaactggacccaccattcccttccattcctcttcaccacatagctgaatcttttggcgcatcatagtgtccggctcgagtggaacaaaaaaaaacagtaactgagctgaagaatattaatccatgggaaactgaggtgatgttgcaacaaaattcattgaacaaaacaatgcttttggcttgtacatgtcaccttttttttctacaaaatttgatttatagtctaccagctcagttgcaaaattaagtccatattgatctagctacaaatgttcgggtggttgcatttcctgatttacatttcctgatttattttattttgcattgatgcaatgctttcctagctctgacactgcttctcctttccttgggcggttgaaaggcagaacaacaattagagcaccaatcaccaaatctttattcaacttttattctgaaagttttcagatgattttgcaaaacaaagctaagttcctcaaatgattcactcaatctctctaagtatatcaatataaattcctcaccattttttgccctttttattcctattctaaggtttgatatgtggagtttggtagagataaaacatggcttacttgcattcatatttattactaaatcaaaaacccagactaaagcagataactaaacatactcaagatcaagatcgtgcaaagtgtgtgtgatatatggtggacatgatatataaagaaaatgcttctcctttatgcttattttcttctcccaaaaatcgtttttttattgattaggagagagcatgcaagtacatattagtattatcactttttttccattgtgtgtgtgtttcgaacaatagttataatttcagttcatattaattgtggtcagttccagtacatattagtattaaattcgcatcccaatcaatttctattacaatttagttgtcatgctaatagtgcctattatctcagttatttatttagcactccagcagccacatggatattgtgagcaatatttatagcacattaactcttgcgttccgtaggagaagctgttgtgcctaatggaggaaagaaagaaaaatatagtgtcattacactttactctttgaacgtatctggttgagaacttctatttttaaatgactatagttaattatgttatttgctttattccgcacccatgccacttcgggttacactcagaagcccaaggctgtaaccaagaaagaaaagtaattcactgcatccctctgttggtatagtgggtgctttatatatagtttttttttaaaaaaacggtccatttttacagctatagtgctactgaatacttataacaatttatatatgtttgttttgcaggcagcatggtcactattctactgtaaatatgatccagcataagtgcagtttgtatgtacatactagctaccaaagaaaacccaggcttcctatttcagcttgtttagttcggttagcactggggtcaatgaacatggaaatgtcatgcaatgtctctgcgtatacgcagtccagacagcactgtgtgtgcttacctctgacgataattttcatgtatgcctgctttcttagattttgtttctaaatacttatttgacttttctaattttcacctgttcttttaacctaactgttcttctagtttgttcaaagcacgccttattccttgctttccaaatcgaccacgtcacagcaactacccccactaacaggacggagttgttttgtatctttgtcacagtgttgtccatataccaaaagtatgttgaatatttctcacaggtttcaaatcgaaagcacaagccaccacatttcaagtaaagtcatggggcagtaaaaaaacagatgttgtattgtctcttttttatcacagaactggaaagtttcagtcccttttttctatcctcttttcttaaaattatctttagttaacacgttgtttctcagtagtaaccacacaaagatcctaattttaagaggtactttgatattccgaattttttttatgcatccccccaccgtgccgggaaagggatcctctgacttaaccgccatgtagttaagtcactgacatgtgggccatagcaaagtaggacccacatgtcagtgactcaactgcatgtgcagttaagtcagaggatctgctccccccccctccccaaccattgaggctgtctcttgcattttcattgcagtgtagaaagttttgacactaaaaactcctttttttttgtcggaccccaaattagttcatccctatccttactcagttttagtttgtcacaatatattttgatgctattccattccaaaagcttgttatttgtcagatttcttctaaaaatcatgttcccctcatcccttttattttacctaggccagagtcatgaaccgtgtgtgtatttctgtataagtgagggaattgttgtgccagaggtccccccatccagttgtcttcccaaaacaggatgttggccccatttcctgctttttttttttccaagcaatggataaagaaagtgtctttgatctccatgagcccttgccagaaatgtgatgcccctgttttagttttctgggctgttaggatttttcttgataaatatttgtctctaagtaattgttgccacagaccctcggttttttcaagattccaaagccacttgcctaatggggctttattcatagcctccagatctatgatacccaacccaccttattccttaggcgtgtgtttggttctgggactaggtgggatgggatgaaaccatccctgatttgaggattgggatgattccattcggatgtttggtttgtagaataggacgatcccagttttttgtttggttcaaggaacgagggagggatgggatgagcgccatttgcaaccaccgacaacgccgtttgcaacaaccatggccgacgccgcctctgccctcacctccggacgtggtcgccgccgacctccttgatggcgtcgatgagcggctgcggggggctcggcgacggcggcggtagacggctcgggcgacagcggcggcggcgggctcgggcgacattgacggcggtgggctcggcgacgacgacggacgggatgacccaaccgagcgctgacggcgatggtgtcggccttcgcgcagagcagccgcggctcggcgatgacgacggcggcgaggtccgcgcgggagagggagagggagaggccggtggagaggagggcgagcacgaccaccatcgcggtcgggcgggcatagaagcgcgacgacgcacggtcggccttcgcgcagagcagccgcggcttagcgacgacgacgacggcggcgaggtccgcgcgggagagggagagggagaggccggtggagaggagggtgagcacggccaccatcgtggtcgggcgggcggagaagctcgacgacacacggtcggcccgccgccgagttccccgtctccggatccgtcgccacaaccttccccatcgccggatccgccgccgccgccctcc

SEQ ID NO: 9970 - DNA, 7386 bp, Oryza sativa
gctaccgatacttatgcacaagtgaatcaatgccgattcataccctccccgcctcgatcgcagccccgcgatgacgggcctcgtagtacgcctccaaggctgggtaagtcggcggttgtccctcctcggccatcctacatgaaaaagtaataaattcaccgttagttaccaatgtgacatatattaaaagaaaatgaatgcgagaacatgagtaggaaaacaaaatatttacctccctaacacttaaattttttttggacttcttcttttttggacgcttaggacacttagttttcttgtgaccctcctggtgacacaacgagcatctattttgcaccggcgcagcatcaagttgaacgcatgaaggtggtttccttccagaaccacccagacctgagtccatttcgttcttgaatcgtttcgatctcctcttccctcttgttttaatcttcaaatttgggtcagcaacaaattcttcaccatcgtacgatggccactgtgtggggtcgaggtatggctcaaagcgacttgcccatgtgttcacaacggctcttgaagagaactgatacggcattcggttgggagattccttatcaattgcatgaatcagataaacgtgtataagatgtgagcaaggcatatggtagagcaatggcctttggcaagaacatgagttcccctcaccttcaactttgaaggctcttgcgccgaatctaacaccaccacgcgttataccacccctctctgtgacctcgtatgtctttttctgcttatcgaaacaccttgcagtgtgtttgttcgccttactttcttgcaccttcatcttactgtcaaccttggtggaccaacgctgccctaactggactcgcttcaaagcttcatcatgtctgttcacaaagtagtcattacacttcatgaacgtaaatgatacgatggccgtcactggaagcttacgaacaccaactagcacgctattgaactgttcggccatgttggttgtcatgtaaccccaccggcggccatttctatcgtatgcacgagaccacttatctttatccaacaactcatcttcaagccatttacgaggaccttcgggaatacgctgccttagtgcctcaacatccctctcaaatatccacttctcgtcaatctgacatatccttaggagctcttttgtctgatgcttgtccgcaccggccttgtggaaattagcactgaagtgcctcatgcaccaccggtggtgaaccgatggcaatcctggaacaggagtcatcatggcattcattataccagcatgtcgatctgagataatacaaacctctctatgcggcccaaccacaacccgtcggacaagatcgataaaccagcaccagtctcgtgaattctctttctccaccaaggcaaaagctaaaggtacaagttggtcctccgcatcagctgataatgcagtcatcaaggcaccaccgtatttcccagttaggaaggttgcatctatagctagtactggcctacaatgcttaaaagcctcaatggaaggaccaaagcaccagaatgcacgcataaaaattttcttggtcactccatcaacgttgacaaccctatcaggatgagtatcgatgtggtagaccatactgggattcctctgcttaatggcttgcagcaaagtgggcaaacggacatacgcttcaccccattcaccgtaaatgagcttcatagcctcctctcgtgccctccaagccttgccatacttcaccctatactggaaaacctcaaatatatacaaagctaacgcagaagcagagagtgtaggttgcagttttatggcattgcataacctatttgctatgaactttgatgtcagttgccggtggctccctgaaccttcggcagtagcacaactatgttccttacctacccgtgatatcctccacgtgccactagacctcttagttgcatggaccttccatttgcaccgtgggttttcacatttaacagtgtacctcctatttgcggcagaattgacaacacggtatggacgatggtgcacgatggcgtactcctggagccatagcttcaatgcgaccatggatgggaactctaaaccctttctgagaccatccacctggaatggttctggcaactgatctaggttgatgccgccatctactagtgcaccatgggcatgtgttaggtccctaaactcaggaatgtccggcttcctcccaaacaccttctcaaacgcacgacattcctctaatgctaacttgtcattattagtaagtggagggaatggacggtcatcatcagagtcttcagcaaattcaacatcatattgctcaacacttgcctcctcgtcaacatcatctctattgacttctactgagacagaatcgtgaccaccactcaattcgacataaaagtaatcatctggattcacatattggcctgctacttctgtcgggtattcagggttgactccgtacgacgaccaatgaatactcgccgacaaatgttcacttagatcaagcccctcttgtactaactcccttttcatcaccctcgctgcatccacatcatcagtaccgcaatgtctctttgatggtcctgcctcccataaatcatttccaagcaaaggtctcttcttctctccttcaccctccaagtcttctcgtaccaactcactcttacttgcaccccctccacggcgagaataatatgtcacaaaattcttctcaacgtaatgataagaaggagatttgtttagatccaaattttctacggtacgaactaactttgatgcaaacacctctagagatctaaactgagactcttttaccaaatcaaagtaaacttcccattccaactgacctatcacatttaatatatacttatgcccttgaccaacatcgtatctcccataaaaacgaatctccacattatcctcggtccatccaagatgtttaggataagattcagtaaaacttttgaaattccaatattcaatttatattgcaataataagtttattaaatctagtaaatttatgatactgtgatagtatttttcgagacaaatttatgtatatcatttcttttatttctaaaataagcatttgaggaactgttgatggttaaaattttttaaaaaaacataactgaatttttcctaaacatcaaatatttttaccaagggattatgtgacatgagtatggatttagtgttttttctaaatcaatagaacaattttatttactaaacctaaataacttagaaaaacaaggataagccttatattcttcttaaaagatgagacattctttattattatagaacaatttggatatttttttccatatacaagactttccattctcaggaaacacctcattgcaaacatgaatatgaaagtgtttctattaaacagactttcagagtgtaagtacacttaaatcctaccatctgcttagtgtaatttcagactgtaattataccaaacaccatacaaaaattcattttccttacagaagaacacagtttcactgctgaattagtttctctaggttttgaatatattaatgtctagtacaagttgaatctcatatagtatttgcagcctcagttcatctgttacagttgaaattccaggtctgtgtgagaactgagaagatcaattactctgttaaaatttacagtatatgtcaatccagcaatatgattctctatttcaattctgtgatatacaggagtgaatgtcctgtgtggtgtgggggtcctatcaacgccttatgctgtcaagcaaggtggctggcttgggctgattatattggctctgttggctgtgttggcatggtacaccggcatcctgctgaaacgctgcctggacagcaaggaaggccttgagacctacccggacattggccacgcagctttcggcaccaccggtcgcatcgtcatctcggtaaactgtcagtttaaatttgttatgttttcattgtgttgttccatggatgatgattctgtggtaactctgattttctgatgtctttcaacctgcaggtaattctatacatggaactgtttgtaagtacttcttactgacaattcagtttagttgtgtatttgtattagattattagttgatgctataaaaacattactctctcccgaataaattagtaacgcaatttacagaaagagttaaattaatgtattactaaatggtttgtaatagaatattgagtttagtggagcaatttggtttcagaaaaagaaagtcaagcattaaccctactgaaaattgaaatttatgcaagaatagaagctggaaaggttatcataaatcaaatataccagaattgtatgttaagactggaacaactttattccgtaaagcattctacattgtagtgttaaaaagaacagatgaattgaactttgaaccattctgttttattttgtacagaatattggcaacatattcattggtcctaatgtttctctacaggcctgttgcattgagtatctgatattagagagtgataatttgtcaaagttgttccccaatgcacacctgaccattgggacatttacaataaatgcgcatatattattcgcaatcctgactactctgattgtcatgccaacaacttggcttcgcgatctcagctgtctaagcttcatttcaggtatcaacacttgtcaccggaatcctttgtttcaccaaatatatttgcaaaacttgaacttattgaatattacacacacacacaagtactctttcaaaaaaaaaaaaatagtgggccaaggatatgctgctggtatttgttactttgagtatatgtggacacacaccaaacggatgtgcaagtgtggtgtttgcgcatacatataatcgggaaaaaaaaggggtgcacaatgtgccttggatctcatcttgttcattctgttatagctggaggagtgattgcatctatagtcattgttgcttgcctgttctgggttggacttgttgatcacattgaggccaaggatgaagggacagcactgaatctcccaggaattcccattgccgttgggttgtatggctactgctactcaggtcatggagtgttccctaacatctactcttccatgaagaaacgcagccagttccctgctgttattttcacctggtaataaccctagaacaaatgtctgtgattcataagttctttaaaaaacagtgatgccaagctttgcttatgtttttttttcttgacagcattgcattatctactgttttgtttgctggtgctgcaattatgggatacataatgtttggtgaatcaacagaatctcagttcacattgaacttgccatctaatctggtagcttccaagattgccgtctggacaacggtattgttcttgtctaaattagaggaagctatgacatctagtacaatgttgacataaatgcatcacttgtatgattgagtaaaattaagttatgtatgactctttatttcagtcatctttagcattctctgtaacatctggtatagcttctaatacttaatgttgttattaggaatattgtactctactgatagtgtatactttgctttttcttgcaggtgacaaatccaataactaaatatccttactgtgttattttgtcttttttacacctattttcccacgctactttgtcattattgaacaacatgttggcagttcattacaaactaatagatagctagttcaattatacggaataagaagattttcaatttattaggttgtaaaaaagcatatttaattcaagtttctcataatgttgtttcatactttgttccatgttgtaagccgtttttgcttttgtcataagtcaaacttctcatctataataacaaaaaagtcactataaaagatatatttcacagtggattaaatgaaacaaattaatttgatgttgtagatgttgataattttttttgtaaactcagtcaaagttagagaaatttgacataggacaaaagctaaatatgaattggaggaagcagtttggatatccttaactaataaccacatatgcactgaccatgactcctcttgcccttagtatggaggagttgctacctcctaatcgacagacatactcaaacatagtcatgcttagatcagcacttgtgctatcttccctcattgtggctctctctgttccattcttcggtaagtccttctcatcacttatatcagtactttccaaaatgactatgttgcttattttctgttctaatcttcacatttaattgatgtttttgagccctttcaggacttgttatgtcactagttgggtccttcctcaccatgtttgtggtgagttatctttccttcagtttttttttttgggtcttagtcatgctgtttataccatttatatatacatatttttggttttaggcgtatattctaccatgtgcatgcttcttggcaatccttaggagaacagtgacttggtatcaggtacaaataagaattattttcatcgaattgctcaaatacttcaatttgatagttgttcaatatagaaattattactatgttagttttccaactgctgaaagtttacctcatcccatgtctgattgtctaccacccactatctaaattacacgccggtcaatatacagatacctatacattgtcataaaaccaatggggaatttcgcaaaagctcagtagcatgcaaccaattaattttactcaccttatgtggacgacatcaaaactccagcttgggcaacgtttgtttttttttttgcgaatttgtgttgaaaatgcttaattacttcccgactaattgaaaggaagtcttggggatcaattcagatgactatgcagacaaacacaagctgcaaagatcctgtactgtttccaagtaaattatgcagtagtcttcaagctttccttaattttcttacaacaggtcaacaaggcttgaagaagaaacaattcgatcatatttgcaagaaactaatttgatcatattcacaatatgcaacagatattagtatgctctgccaggaatagatgaatacatatatgtatatagtaatccaggtaatggaacaatctgaagattaaatggatcttataatttagactgatctgtctagttcaaagagttcaaggatattcattaattacgcgtcgctattcaccaattcaatctggatttttcagtgggaactaattagcattctttttgtatatgcaagaaccaaaatcccataatttcaatattcaagctcattttttttggaaatatgccatttaataaacatgaataccatctcttgcaggtactgctatgtgtattcatcattgttgttgggctctgctg

SEQ ID NO: 9971 - DNA, 22141 bp, Oryza sativa
ttttttttaaaaaaaaagaaacataaaattgtacgcatgaaacataggcaagctggcaaacggtgttctgtacacgtttaatgttgatactctaataatgaagtatttctgttcacccgtagtaaggttagaatgaagagtctcccttggaggaaatttttatataaaattacaggaatagagaaaacacacataactccgtcccaaaatataacaacttttagcctcagaatttatcccaaaatataataacttcttcaccacattatcttcccaaccaatcacaaccctccaccattcactttttctatatacctccactactcatccaatcacaaccctccaccattcacttctacctactttattaataaccgtatcaaactctaaaacttattatattatgggacggagggagtagaattttaaagtttgattttctaagaatgaagtagggagtttaattgtcctctcataatcatgaaaaaaaagaaatagacaaggaagtaacacagaaaaccccaaagggcctattcattttggaggaatttcaacgcataggaataggaaaaataaacgaataggattgcatacacgctttaatccataggaatttttccatgaggtttgtgtggatgaaaaattccctttgttttctgtataggaaaggaaaacttcctttggttttcctatatttacattcctatgaccccaatgacattcatatgaattagtatttaggaatctaaatgctttgaaattcctccaaaacgaataggcctaaaattaattatcaaaccaaatgcacccagaacataccgttcaagacgccctgagtgtaggtgcactgccggtagggcccaacctcgtggtgtccaaccaccagcggcttctgatcctcggggatcttctgcagagacgacggcctcctcggcggcaggaggtactgcgagctcttccggccatcttcgtgctgctgttgccggcggtcaccttcgtcgtcggccgccgccgtcgtcggcagcagtggcttgatgagcccggagatgatctccggcggctttccccggaacgaggcggtcaggaatgagtttgatagacggctcagcgtcggagtgcccaggaagctcaggttcggggattgcacgctactgtacatgtcaatcgactgcctgttgatgcatagaaagaaaaaaacatgatcaaattcttgtgattcaacgttgcttattaattctgagattgagctatgatggaaactgcatttgaacatttagtgaagaaattatgcgtgcttgttctggttcatataaacggaaccagagtttggaatttcggtttggaatttcggatctacttctgtttaattcttggtaggaatttactctggtctaaattttttgattttgtttcactgcaacgaaatttgcgcatacacagcaaaaactaatttcactgaaaattccattttgatatttctgaaaattttcggaaatttcagtcgccgtgtttcgttttcttaatttctttccaaaatgtaaaatactatatattcagaacagataaaaaattggcaaaggcgccgataatattgatctgaaattctgaatattcagattgcacaacgccccactgattctctctccttctctcagacaaaattattttggaagaacagatggggaccaactgaagctgccaagtcagcaccagggaccacaggaacagtgacacgtagcaccaattccagtactagccgtgacacgtcactatcgtgggcccacatgtcaatggcttctgcaatccacctataggttcaccaacacgtgtcctcacaccccgatgccatcccaaatggctactgcatatcctgaatattctggccatcataggcctatcaggatcagaaggcatctgaaatataatcaactaaaattttcgaagaatatgtcatgtggtatgtctatgccaaataaaaatgtataaatcattgttcttagtttcaaactgttcttgcagagactcttttagtgtgtttggataatgggataagaatagtgggattggaatagggaaatggataaagggctatgataaaacgagggagggataatggatggctaggattagaagaaactctttgtttccccaacccattagccaaacaggcctttgtgtgctagtaaaaagaagttagaatctaaatttgtattttgcttttctacctaccagatgttcattatccaagaaacgtaccaaatgagttgttgagaaacaacagaaaaactgccatactttctttttttttttgaaaaaagtgttgcattgcaaaattcacagttaaaaaaagtaagactagtggtgattaattagtacgggatggcaaactgaactctccagaaaagaatggaaaagactgaaattattcgactgtaaacagaaaagtttggacttttattgacgcgtggcactgcgaaagaaaagaaaaaaatataaagaagaaatgaacttgcgtcggcgaacctgtagctctgaggccactgctgcgtataggagctgggctggctgccgcggccgccaccgccaccgccggcggcggcgacccgcggggtaccgcacgaagacgacgagtccgacccgtcgtccgactcatcgccgccgtggccgcgacgcttcccatcctcgacggcggcggcggcgtcgtcctcctcgtcgctgtcgatgaggaagctccggtccgacaccgaattgtccatctctcgcagtagacctcgtgctgaatgcaaatgcaaatgcagcaacgatggatcggggggagagagagggagagagagacactctgtgtgtgtgtgtgtgtgtgatgaggacgggtttatattgcggcggtgtgggcgctagccgcttagcaagcggccgggatgcattcagtggcggcgacagcggtcgaacgtactagaggtgaaacgaaacaaacaataagatgagcatgtggtgtttattaaccgaggccattatccttagtagcaatgatgtcgaattaacctattactctccctctgtcccaaaataagtgcagctatgagtttccgtatctaactttaatcgttcgtcttatttaaatttttttaaaaaaactaaaaaaaatatgtcacgagtaaagtactattcatcttttatcatctcataacaataaaaatactactcataaaaaatttcaaataagacgaacgatgaaagttggacgcgaaaacttatggctgtacttattttgggacggagatagtaccaaatagaagacacgatactatggatttggatagtagacacgtctactccctccgtcccaaaaaaaaggcaaaccctgggtttgcgtgtccaactttgactgtccgttttatatgaaatttttttataattcgtatttttattgttgttagatgataaaacatgattaatactttgtgcgtgacttgtctttttaatttttttcataattttttcaaataagacgaacggtcaaacattgcgcacggaaaccagggtttgtctttttttgggacggagggagtagattgatatgtcctcaccacaataatttgtagttttcttgatgaccacatgatatcattggcagtcaaaaatagtcatcaagtttagtcattgtcttagcggttaaaagtttgttactctcttcgtcccattttaaatacattcatcagtttccgtgtctgattttgatcgtccgtcatttttttatgattagtatttttttctttttagatgataaaactttatgagtgatttatgtttttattttttttttcaaataagacgaatgattaaggttggatatggaaactcatgactacacttaaaatgtgacggagggaatatattttaagatggatgtactatttatcatcgctgatctgcacttggataactaacaatctagaattattagattaattatgatgaatgaaagcctactacttgtgttaatatttagtatgtaatacgctttaataatatgacatgtatttcaatattttgtaaaattttgaagagaaatataaatggttaaagtacaaatataaatagcgctagttgaagaagcatccacgtgagtagtgtcctaatgatattccgttggagtagcatggaagggtgagggtgagtagcatggaagggtgagggttgcttataatttgagtctcatgatgcccatcctttatactcaagtttcatgaatttttaagataaaaaaagtttcatgaattactttgatttttctctatttcccactaaaaatcatgaattctgctactcgatcccttcattttaaattacatgtcggcctaattctagagttcattttttttctaactaaaatacttttcattttcatattccaattaaacactttaaatgtgaatttccttttatatcctttattaatgcagtcacacgtcaatgtagtcacagctctaatggacttatttcaactaataaaagttaacgactactgcagaaaattcaattgcgtaatctacttaaggaatgggtaacaatgtaatttgtcatattttttttgtggaatttgctagaacaataagtaattttaaatcaaaggggtaaataaaataaaatcccttgccaatgtgtagttttactggtgtacatggtctcctcacaaagtccttgcccctatttcacgcgagccaacattattctgtcgatttagatttcgctggtgctatatatatattttgtagaattagtcaattcgaagtaatttataatgtattttttttctctctctctctcatgtggagcaaaccaagggcatgtgactttgtaacatgtgtggtctgccaccggccggttgcaatgggtgttgtttggttgcaaacttgcaagtgcaatacgcccgagattgcaatagctacttgttcttggcctcatttgggtggcttacgttgcgttcatttttcgaatgagatgattgcaatatgcatggattctccagctcttgtgcattggctttaacttgccctttgcagttgattagggccgcaaaatacaggagtgtgcgcccctgtgaatgtgaggttttgaggtgttgggctgtcccggttgcaataggtatttacgtttctttttctcatcgagagtaatcagaaacaccacggtcatactcacactgcacaacaccacacatctacatatgtggacgccctcggcatttagtgcaattgcaaaatattaaggaataattgctcttttgccactgctgggcgtcctatttggcaatatgccactgaaaaagagctaattgctccaatgccactagaacgagaaaaaaatcatttgagatgccactgccgttttgttccgtcgatggccgttaactgctcggtaaaaaaatagggccaactgttccaaaaaaaatattaagcatttactatatggggttaaaagttctattgaccattcaaatacttcatccgtcccattttaagtgtaaccataagttttcgcgcccaattttgatcgtccgtcttatttgaaaattttttataattagtatttttgttgttatgtgatgataaaacatgaatagtgctttactcgtgacttatgtttttaatttttttttcaaataagatgttggtcaaagttaggcgcagaaaaccattgctgcacttaaaatgggacggagggagtagttaaatttcctctcatttctacttcatccgtcctaaaatgtaagaaagtaggtgagactgattggaggaagtttccttcgtcccaaaatataagaaattaggtgagaatgataggaggaaatgtgtgattggttgaaaagaaaaagtaggtggaggagaatggttgtgattggtcgagatgaggaggtaggtggataaatagtttcattttgggacaaggtattgtgctagaaatagctacattttgagacagagtaatatgaaccctagatcgatccattcatgggcgtcgacggcggtttctgatgagtagggagttgtagctgcgtcctagagaacaagggcagaatggtaattaccccagtcaaacgtgttgactaacagaattatttgatcctaacgacagagtgccattttggcgtgcccaactgtgaaaccagtggcattctaccaattgaccaaaaaccagtggcagaatgacaaatacggtaaaccctagtggcatttgtgtaattggccctattattaaaggtatagaaaacttggaaagtcgactcatgatacccacaccaagggtcggttcactacaaccgctctttgatagtttcctgtctatttatatatattttaaaaaaaaacacagtacaaacgtgatgttgtttatatgccagaggaaacccaccgtctcttgtccgagtgcgtcaaatttgtacaatttctttcaagcaacatgtttaaaagatatggatccatattatttacttttgtgcatgtctgagttggttagctctgcggctgtactactcatctactcgtatctcctgcggtaatccaagatacagtgcatcttatttttctttttgctgatagatatttaatttcttttttcattgtaacaatggggtctcgcaaaaaaaatgtcgaaatacctaattggtgctgcctcgcaaaaaaaaaagtcaaagttaattacataaaaccactcaggatcgaacaaatgcatatcccgctgaattttaattttttaaaatgatttttcttctgatattattttccataattttggggattttatttttttcaacccccatttctcttctttcttcttgtttatccccaattcgaaaatcctacgcgcgcgggtcttttggacgagcaggccttcggaactacatcctctagagtatctgcacggggtagggaagcgtgtttctttgcacgactactctttgtttcgacaaatttgactacttcatctactttgtgttcatgttcgagatgtcgacgaaatagaatggcaacacagacactggcaatgctaatgccaacaccaaccactagtgcacctggatcaaatgtttctggtttattctctgggtatcactactacagaaacacaaaaaggatacggcactataggtgctagaatagctaaaccagcacctatagtgctttttacctctaacgcacgcccacagagcgccatcggctagaaccgacatctttgtgaagaaataggtgtcgtttctagagaaaaaccaaaacaaatactacatgtgctgatttatcaagaaaaaccaacacctataatttattaatctacatgtgctgagttaaataggtgctatttaattaaaaaacagacacccgtaataaccaagctgagccgagccggctaatcgcgagcggatatggagagggaagggcagagtgggtgtccttatccactctagtcacctccgccatctctctctctccactcatcacctggccacgagggcaccgcgaccagcgtcgatctgcccagaggcggtacgagccactgaggccaccgcgcacgaggtgctactatgggtggcgcccacagaggaggcggagcggcgccgacaatttggatctggcgtagatcacggatgggcgttagcggcttcccacggccgatccgacagcgaccacgtcggcggcggctttcccacggccgcggtggtggatgttcttgatgtgttcaatattgtattgttcttcaatgttgttgacgtgttcatgtgtttttggatgttgttgatgttcttggatgccaattattaatattgatggaatctgatcgagctgaagggatctgctcgtcaagccgctttttttattattatttttttgcatttctagaaactaaaggtgtcagtttaggaaccaacacctttgagtcctcctcaaaggtgccgcctactaggtgccggttagaaaattcggcacctatggacggttcccaaccggcacctattccattttctgtagtagtgctcactctagtgttgaacatgttacttgatgctataatctctgctggtaaggttgtgattaacaatagcttactcttttccatagttttcatatttattctcacgttattctcgattaaattatgccgaaatatagatcttcaatatactcgagtacggtcagtgtctcactatatctatcatatgcgaagtgagcatagctcaactggttaggttccttgtggtggaactagccaacccgggttcaaatcctagatttgccacggtactcgcatttacggctaattattcttttagtggtaggtgatgtaaccgttaacagcatggcacccatggtggcttcgtcattctcaagatatgccagcaagtcttccggaagtgctcaaaggggtagggtgtgcgtatgtgcgtccataggagttagtgtgcgtgcgttgtgagtgcttgcgtttgtactatgtttctaaaaaatatatatatatactttatagaatttgagaaacttcatccttttctttaccacttactagaacacaaaataaatagcaacctgtcggcgggcgtaaatggcaccttctgtcaacaagatttaatgcatcatgtgctgactcagatgattaatcatcctttaattagatagtactaatgtactgagattcctccgtttagcatgcatcttgttgaaatatagataccacccacgatgatgaatgtattcttttaattttatacaagaagtcatatggccatatttaaaacactgccagttatcaatgtgattataataaaaagctacaaagttaatacatgcatagatctacaaagctacaaagttaatactccctacgttctatattataacacgttttggcttgtttatctcttataatataatttccaatatacatatgaatttggacacatatatataaagcaaatacatgaattcgatcaaaacacataacgtctatagtgtgtaatgtgaaacgcagggtacaccgaaaggatcttgaatttgcctagaggggagggtaaataggcgttcctaaaaaattatcacaacttcatagcgtactagagagatgagaactttcggttcaaatcggaacttctggtatgggattggaagttctggtcttaacataaaagttcggcggataatggaataaaatactagctatgaacttgtagctcgaataaacaaaatgtatatgaatcaaaaggtggcaaataaggtatctaagcaagatataaggtcaccaactatattaattaagcatgcaagtagatcgggtaaaaacaagctcaagcacaatatgagagatggcaagaacgagcaaaccaagagaggagacacgttgatttgtttcccgaagttcggatccacggatcctacgtctccgtgataggttaaagcttgtcatatttcactcaaatgataggttaaagctttggtttgtctcaaggtagcactacgataggtcacttttagcaccgagacatacacaaacacatcaacgttgcatccctcttaatagtacggcattcctaaactcaaatgtaaatacgaagagaattataccaataggaatgctttctttccatctttctttccttatcttaagggatgccaatgccgaaaccgtttcaccatatattcttcaaattattgatgcggttacttctagtttcaaatggccttgcacggtccatcatgacaaagccgtcgctcgcccttcaccgctggatttggttcttcggcgccaagctccctgcttgcccttcaccgccacatggtccatcactaccgagcatctcttgcccttcaccatcttgccatagtagccactttgtatcccacatcttcaatatccccacttggtattttaggtgtaatcatatcacttgagtgtcaacaccttttcaatccttggaacctatttttctcattcaactcaatgaaatcattagtctcaaatatccggttgtcaacctctacatgttgaccaaccgatcacatgtataaaaggatataaataaatgaggagtattaaattaacaccacaagtgtcatatactcaaatatatgctcaaatgtaaagatcccaattaaatgaaagtgaatagcatggatcgattacatgcataactaaagtatagatttgctccccctaaatgtatgcatacaaaatgtttgtgtgaagcaagagtatgcataaaaagaatgaaacactaggagcctatcctatacaagaatataagtcatttatcaaatataggcattaaaataaatgtataccttaatcatcttcatgttctcaatgtaaagagactaaacaagagaaaaaggctcaaacaaaacattagtctcacatatatatcattattcacatggaaatattatatatgaacatatcaatatgtacatggagagaaagattgatacatgtagcttgatctccatgcttttcatccttgtgatttaggtccaccatcaatgaacatttctatctcaactcatagaagtccgggaatcacctttcacacactccactttcatatccacatgagactaggcgaagaaatgcttataaaaaaattagtctcacataattggatttatcattaatcaccaaaaccaaattaatggcacatgaactttcgtacacaaatacattggtagttgtcctttgcataatatctctattcagagaaaataacgacatgctgtcagtagttaaaccggacaatatatactctactggagaagtgatctttgctaggtcatgcaaaaattacattagacccggttcgaatagaaaccgggactaaagaataggtttagtcccggttcaaaagcccagcggcactttttgatctttagtcccagttggcaagtcccggttcaatagccacaggtcatgtcaagccctcgaacaaacattagtcccggttggtaataccaaccggggctaaatatcactcttccaagcatctcacgcgctctctctcttccttgtctccttggcatccgcacaagcttttcactccttgtcttcctatcttatcccctctcctcctccactccttctcctcctcctccactcctccgatccactcctcctcttcccctctcccggcaacaggccactcctcttcccctctcccggcaacaggcggtggccttggagggccatagcaggcggcggccgggcggagggcagctaggcggtggcaacggcccggaggggtcatcggtggcgcttatgagcgggctgacgcggcgccggagacgacgatgcgaggacttgtgttgtttttctgatgccattgtatatgtgtggtgctattgtggatgattaattttgttgagtatgtgaatttgtgatgctaatgatttgtgaatttgtgttgtcattttgatctgtgatgtttatttgatttgtgaatttgtgatgtttgtgagtttggcatgaaatcaatatgcaaacagcaaaaaaaaaagagacctttagtccaccaaccgggactaaagatgagcatctttagtcctggattgggcatcccggttgcatacccgggattaaaggggttgcaaataggaagtattgtgggtttctccagtagttatataattgaacaagtgaactgtgatagcgcataagtaatttaggagttggtgtgaaatgattatcaacatggaagtgataaaaaaaatttaaacatggaaaatatatgctatgtcatcgagttggcatgtatgcctctaagattttaccatggattttgtatctttttcttcaatgcatatgattttgcagattttacttcgaaatataaggcactattaatcattggttctaaggccgagggctacactagcatgagataggtcatctcaatcgggcggaaaccatcatctgcgtcgggaagggctcccgtcacaaaccaaaagtcacagatgtgagaagtcatctgtatcgggcatttagtcgtcacagatgacagttatctcaaacgggccaaaaatggtgcccgtcacggataggtttgacccagcagatgagtcaaaccaggaccaaactagggcccatcactgatgagatcatctatgacgggctcatacttcaatcacgggattggtatgattcccatcacagatgactcactcaatcgggcttgtttttaaccccgtcacggatgactcatctatattgggttttaatttaggctcgtcacggatgatatcatctctatcggtcttttatttaagtccatcacggatgagtattttacaaaaaaaaattattttttggctagcctcaggcctttgctagccatgcccgctgaaaatgacagaagaagctatatatattccttttcccaacaaccccgttcgcacatccattcacaaatcaaacattcagtgatcacatcgacattcacacacccattcacatatatatgtctgagacatatattcaatgatcacacatccacattcacatatccattcacatatgtcattcacatccattcagcgacatgcatattcaagagtcaagcatcaaaaacctgcaaaaccgagttataaattggaacaaatttataagtgattagcattgcaagtatatatagaaacgtcagaccgcattgtattacataatatatatatatatatatatatatataaatgtttaaccattgtaaaatcacatgtatttgatcgagagcgttcaacccgtcttttgtctttccaggaatatttagcagtaaccattataaaatgaatggccaaggattgatgctgaatgtagcaccctcccgtagctctagaggatcccgctactcctgaatccccttggtgtgccttaactgacaagtggccctatgagtcgataagaaataaggaagttactggagtatttgccatcttttaaaataaaatgtgtatacgcttctagttttgaacatttttactgctcaagaaaagaatcaattatgtttgagccactcatttgtactagctcggccagtgacaaaacaaaattcaaatggcaaaacgaaatatatatcaaaatcgagagtagaaaaaaaaacccatctctgttttcgtgtgctcagtggatgttcatgttgttgtatggttaacaccatgtgccaatatgcacacgctgatcggcaactatttcttgtatgaaaatgacacagcaagagcgtctctctcgttttatggcaatgttggcttcatgtttcaataattgaggtgattgcgatagatgcaagctagattcttctattcttgtgtgcctcatctgctattcccggtggatagggccgcctgctatgcacactctgatgaatgcggggttgaggaattgatgatgacagctcaagggactgtggaggattccagttgcaataggtgtaaagttagatggcttttgagtaatagtgaagaaattgggccaaatgatttggttcgagaatttatctgggcatgtattgcgttcagcattatattgagctaggatgacttcatattcaactgcagcttgatttggaaaaaagatcctacccaaatacctataaatctcacaacaatttaactaaatgaggatatcgtaatcacaaatggatggcatcacttttttctaaaagcaaacattttgaaatgtgattttaagattaattttagtcaagttatttagtcgtcatctttgcaaccatgaaaaataaaagtggcaaataaccccccccccttccaaaaaaaaaataattctaaaaccaaattctataattcaaaatgagatgtggctttttaggggaaaacaatgccaagtgggattgtttaattagtgttattaatcaggagaaaaacatgtgtagtttatcttaagaactagaagcacaccgtgatttagaactatctagagttaaaaattctcttgaaatacttgttcttcaacctacaccatgatttgctcttataaaataaatttcataaactcctagatattgggtcgtccgtaacataaaaccccaattgttgtgttttattttaagtaacctcatattttggggaaaattgtttcaagaaacatatttgtgtaaactactcatattttaatataatttattattagttttaaaaaattcacatttgttgactcaaagtacatatacctctactttatatttttttctcaattttgcactgcacaattttagtgcagtgcacatcttaagtttttgtgcagtgcaaaattcttttggcaaagtttcgtttggcatgtgtaccagcagccttgggagagtcaggttctcaggttgcagagaatggaagtaaagcatagtgttagttatctgtggaaaataccctggcttcttctggacagttgtttaagaacttgattacatctgttagtgaacttggcttacgtccggttggatgtagaggtcggatttatccccttttgttaaaaaaaaaatatgtcggtgaacttacgatcagacgcacattcctgaggtccattggaatcctgatctcaaattacatggtggactcgccacctggcacagtgtaacatgtgcctggaagggttccaaaatgccgaagataactactatctccatctcataatataagggattttggaggaatatgacacatcataatagtacgaatctagacttgtcacattcctttaatatcccttatattatgggacagagtgagtatttggttattgtggttattggccttgttgagtcgtatccacatttattttttttgaaagtaaagagagatttcattaatgagaaaacagagggttacattcctggttcaagagatcaagaatttctgcaggggaacacaatctccagaccgtattagttcctgatcccattaccagttgggctaaagcataagctatcttattagaatctctctttatcctgtgcacttgcacctgagctaaacataacattgccgctttaacatctgaaattatgccactccaatctgctcttgagacattggtcgcgtttaactcagcgacaacacttgtattatctgattctaagataagtggcatattcacccattcagtagcaagccggataccttccagacacaccaaggcttcagcttgcattgctgagctgcaccgtggtagtttcttacaggaagccagtagcacgaggcctcgacaatccctgattattatcccagcgcctgcttcacctgtgtcctatttgaaacctgcatcaacattcaacttggctacacctttggtggagtttgccacttgcttttcgttcagctgttgttgtatgtatgtctcaacaaacattggtccttttcctttcacatcatcaggttgttgccgagtcattagagtgcaatcttcgtagttcttcaaaaagtcgtatccacatttagaagcgcttgaacaaacaagtcaagttgaaaaaagagtaaaaaaaagtttagaaaaattttgttcaactggtttccgatggcaaccgctcggttcaaactgaacttatcatatttactttgcaatctatcaaaacattgttaggatatgttttgccatcgatccagaacaaccctcatacactataactactgtctcagtaacacgtttattacattccaaacacacaaaaaagaagtctcctactacgtttgtcatcttctattttctcttctcatttccaaaatatggattaaaagatattcattgtattattcgatgaattattttagaagctataattctactaggaaatattagttgaatgtatagctataattcctttttttattacataacagatatagataaatatctagctcaaagagatggaccagttgtgtatcccactcaattatagctacacatgggagatctaaaagttgctacagtacaatgccaaattaataactatttgccttctgaatatagctaaagctattcaccaaatgcttattgttttgacgcatatgaaaacttatttgaccatgcaagagatactatggaagtgagctgatgaaggaacagggatcaggaggactggggattgcaactgcaccatcaagcatttgtgtcacctttagcatgttaggtcgcatgcttgggtcctcctgaaggcaccacaatgccactgtcacaaatctttccaccttcttaatattgtagatcgcctcatcatcgccctctaccagcaaatcaatcctcccagaccggtagcagtcattggcccagtaagtcactatcgtctgttcctcatcgacaacctctagctcgacattcctcctacagcaaacaagctctagtagtatcactccgaagctataaacatcaaccttggtagagatcccaatgttcttgaaccactcaggtgcaacataacctcgagtaccccgaataccggtgtttgtccttgtttggtttgtcaaaagaagctttgctaggccaaagtctgaaatcttggccacaaggttgtcatcaagaaggatattctgcggctttatgtcacaatggatgatttgcttgctacattcgtcatgtaagtagagcaaacctcttgccaccccaagcgcgatatgaactcgggtgttccaatgtgggcgactattgtcgaacaaaagacggttgagagggccattggtcatgaactcataaactagcagtctttcggctccttcattacagaaaccaagcaatctaaccaaattcttgtggaatgtctgcccaatggtctcgacttctaccatgaactccttctcggtttctggttggagcttgtcaatctttttcactgcaatgttggtcttgagttcatcctccaactggcccttgtacacaacaccagaggcaccggcacctagaatctcatggaagccagccgttgccttctccagctctttgtaagtgaaggtcttcaagggtagttgggatttacttgatgcttgtgacaatgggatattcttttttgtggctattctacagtaagtaccaaaaaggaaaatggagatgagtgcaaagttcaccaatatggaggttccaagaatcaaagaactccctaggacccagtgcttcctgttcctcttccatttgttggagcttgtactgatcatggattgcgaactattgctacttggcaccttgagaagaacggtcctctggacatagtcagccatattcccatttgacaaagggagcttcttcttccagcaagtgctggtgctctgattgtacaccgccatggcgcagaagcagtcgatcacacacagccttccacaatcatcttgtcctatgggctcatatttctcatagtcagacagtggccaatccacaccataaattggtctcagctcaaactgagcaagtgccgttgcctcatccaagtcgcagctatgcggttgaaagtcttgcttacaccctttgtacttcttctgctcatcgaagaacttgtaccatggtgggcattggcagcttgcaatctgattcctggtgccatcaaaggtgcagtaactgttgaacccacagacgccactgccaacatctgaaactatggcatggcagatattctggggctgcatgctcactgctgtccatgtctcaccacctaggatgcctgcattcgctttcttcgggtacacatattgccggaaaacaccgtcagggtccagtgtggcgcgatggaagtagtctgccattgatccaattcctgcacctgatgagatgttgatctgtgtaccatctgtcagtgcaaagtataccttcccagtctcactgaataccaactctgagccatttccagtcgtgtcagtggaccaatattgctggtatttggatccagagggaacagcaacaagatacagggcaaggtttccatcagtttgcacatcaaggagaaaccgaccactggagtagtcattgatgtcgagtcgggcacggagtgacttgttgcgagtcttgttgcaaggtatcacctgagtaggcaagatggtgtctgacggcatgtcaaaggtctgccactttgtcgtgccgtctgcaccaaggagcacaaaattgccggtgtcgcgcatgctagcatatgccacactggtaacctggggattccagccctcctgaccagaccggtctttcagtgagagtgcaccatcattagtgagttggagaaaagaatcagatggcacttctactatcgatggatcttggtcagtatttttggcataccagacaactgtcttatcgctaatcttgttgaaccagacggcgatgaggtagaaggaggtgttgccctctacaggtcggaagccaaatgcgaagtcgccagagggtgatagccatgaagaggcaggactctggggtgccaaagtggagcccaatgtgatgttcttctgagtttgtgcacaagttggggacagtagctgcaacagcatgggaaagagtagcagagcaaccattgttctttgcttcaggctcttgcttcctacccctgataacagctggtgagctgccaaacttgtgtagttatagagctatcctaacacttgtcatggaaaggtcttcgtcaccatggaattctacatatacttgactaatcaagcacttactggaatttgccacgcagaaagcagcaatagggaattcgtgtcacgatagcagtaaatccgtagaaattcttgtccagacaaaaacaacaggtaacagctagtgagaccaaatagaccaaggcatcaagctagtcaattctggccattagtagcaccacggggaggatttgctgtcgtcgacattcttgctgaagtagacaggcttgacaggtgttaactagctatagattgccgagaaaatgtttttctaccctacacttcagggcagaagaaatgtttgcatacattgaactcctctaaaaaaaaatgaagcagaaaaaatgtgtgacatgtgtctctgaatcttttgccaattgcataatgactatcagtatcaggtctgagtaacaaatgtttgtactaaaacagcttagtatgcgataaatttcaggcatgcttttgcatagattatgtcaaatacagtgtaaagagtaatattttggtccgattttataagttcggaagttccctaggtcacttcaattctacatgatgaacaataagtagctgtatttggactcactagtcctgggatatttctatcatataacgaacttgaactgaatcacagtttactgaactgaactgaaaacagtaacgaatcgaagtgtcaaactattgggctctacaagcaattcatcaaacaaatcgtatgcattctcgacctaacgactccactgttggcatccaattcactgagtaaattaacaggagggaatcaggaatcaccactgaaccagtactctttgcagaccagttggcagttgccggcttgctgccgctgcgagttgaagcccctcgcccgtggcctccctccccttgccgtcgccgcggccggcggctccgttccggcggatcggcgcgcgccgccggcgatgccatgcatgctacaggctacggccgctcggctagggttggtctctcgctctcgctctccctctccctctccgagacgccgtgcctgccgcctgccgccgacttgacgagtctgaccatcggcgttgggctgcctgagcgagtgagcgggttgaggattagctaggcagttaacagctcattcgcccttcgctctctagctcactaattaccagtttaccacatctttagttagatattctctccgacccataatataagatattttaggtgtatttaatgggaataccctggatcggtccctcggaggagggagaaatatcgggcgctccctccccaccccctcccccgacgcgcgctgcctgcccctgggcccaccacatctctgccctcacctgccacttatctccatcatatactccattgcaacaaattacccacatattttggaaatattctattaaggaaatttagtttatttttgttccaccgataatgtttcatccagtgcactcacaatgtttcactatgtatatatctaatgttgcagtgaactgaaatactctattgcaacaaatcacccacatattttggaaaccctctattaagggaattcgttttattttttgttcgactaaaaatgtttcacctagtgtactcacaatgtttcactatgtatagatctaatgttgtagtaaactaaaacattctttcgctatttgttgaaacattgtttttatataaggtgaaacaacacccgatttaaacgggtgaaacattttcgatctacgtagtgaaacaatttcgatatacctggtggaacatcgtgtaacatttaaaaataattcaataataagctaatttttttatcgaaatatatccatgtgtggtcttgtttttaagatttaattgcaacaaatttaatggtgtaatcggatcatgatttggataagtagtttaagagaaaaatcaatttaaagttgttttgcacgtatacgtggcgttgacggcgctgacgtcgtgctgacgtcagtgcccgattttaaccccccatcgggcgcccgtgccgaagtcattcccgtatgtaacacatactagtataataaatctggatagacatatatgacacatacaaactagaacaataaatcttgacatatgtgtcacatcttcccaaaatcccttatattatgggtctgtctagattcattgtattaatatgtgtcatatctaccaaaaatctcttatattatgggtctgtccagattcagattcattgtactaatatgtgtctgtcgcgtcctaaaacgaccctaaaatacatcctctaaatgatgcctagaataattaaaatacttgtgaaagccttcaaaaattaaaatgtgcaaagttaaaagtcaattaaggcttggaggatttttgtatatttcctaaaagcctaaaatgtgtaaataaattttagtggaattttcagagcataaataataattattaagaaataaacaaagttaaaaaggttttataaaaagaaaaccctaaaaatcccccttccctctcttgggccgaatccggcccatctcccccccctctctcctctcccccgcggcccatccggcctctccccgcgcgcgcgccgctgacgagcgggcccgcccgccaccctcgctgacgggtggggcccacccatcatccccttcctcccgctgctcccgccgcctcgcccgcgcctagcgccgccgccgccgcgaattccgccgcctcccgtcgtccccgcgtgaaatcaataggagggaattactccccgtgatcccctctccctttccccccattttcccctctctctccctcattcaaacgggcggatttgcccccgcaaatttcgccggcgccattgatggcggccggacctcccggccggtttccttccatccccggccgccctctctcccttccaaccccatttaaaccctccctgcacctccttcgcccgtttccaccctttgccgtgccctctcctcgccggaatcgagctcgcgccgtcgccctctctctcctctgtcgccgacgaccttcggccggctctctccgctcgccgggaccgtctcccgccccagtgtcgccttctccggcttcgccgcaccgccgccgtccccgtccgcccccccgtcgagctcgccgaccgccggagtgccgccgtccccgtccgcccgagccgcgccgccgccttcctttttcgtcgtcgccgtcgacctagggtgagccgtggaccgccgtctcgtttccccctttccctcccctctctcggccgccgctccaccgtgcctatggccgccgccggcgaccataggggcgcgggcgcgccgcctcccgcaggccgcgccgatgtggccgccttcgggcgcgccgagcggctgccgcgtggggcccggccgtcagccgcccgcgccctcgggtacggctgacgcgtggggcccacggcgccggccggtgtgagcccgggtgcacccggtccaccgtggaccgtgaggctgccgcgtgggccccactcccgtggacccggt

SEQ ID NO: 9972 - DNA, 6614 bp, Oryza sativa
cagctgccgctcaagactacttttgctagaagctgaacagaacattgttcatgccgatcaagaagctcagcatcaggaagaggaagagcttcacatggtggatgatgcaacaatgaccctcgagcctatggatgaggaggataatggtttcaacaatgtcatctgcccatgtccttcactggagttggaggaacacagtcactcagctacaccagccatcgatgagtgtgatacagccactcctgctccaggctctgcaatcccacagcaaagcactagtgttgatcaagatggacatctggaaaatcctaacgaaatgggccagattgaactaatggtggaacctatgtatgtggatcacaatgattccaacaatgtgctctcatccagcacgtcagctcaggcgctgttggagaattgtgaagtagcagaggcagtcaatgaaaatgtcgatccagccacccaagttactggctcatctaccccagaacagggcacggatgtcatagtagatgctgaacaagaaaacccagccacaacagagggcaactaacttcaatgccgtcccctcgtctgcaaaggtgacaggcgattctgatttctccccttatggaccaattcgtgccacctatgtatagtgcttagatgccgttgtccgaaggttcagcatattgctgacatattgccctggttgtttgaccatgatgggctccactggaaattttagccgtaattactgatgtagcttacatatctcttgctttccaaagtcattacacttatcattatcaacatttttggtttttttttgtttttgaacatgcattcgattttcaattggaacttaacgctgccaatgcatatactatgttcttatacaaagaacaagaaaaagaaaaggttggaggtaggtaatggcgtaactagttgggccacgcacggcgaaactagtatatgatgccaatgccatgatggtcaatattgctttcatattaaagttttttttacattttgagttgattttttaaaagtcaagatgaaaggggagaccacagttgaaagtttcatatgatttgagttggaagttttatgatttaagttgaaattttcatattaaataagtgctatgaaagggaaaagaagtgtggctgtgtgctaggcgaggcgctagcaatctcgtgggggaagcgaagagaggcccaaaccgctggttgcctgcttggcccatgggtttgagaagaccatgggctcgagcggcccaagaccatggacttgaggaaggagtcgtagtcgtcgtatcttgatgacacgtgcgaccggcccgcgcgctcgtcgttattccgcggcgccatcttcctctctcctccgccctacgcgtcgccccgcctcgcctggccttccccgcgcatcctgcacggagccctaggaggctaggagaggaagaagaacacgcgcgcggggggatagtggatagccgaagcaactcgatcgatctgtggccgcgatcgtagctctcttcttggtccgatctcgtctctcccggcatggatttcaggaaggtgctcgaccagaccgtccgggagatgtaagaatcagaatttttatttctccttctccgccccttttctcctcctggtgtactcctatcttgtaaagatatttttcttcttgtactttcagaaggagggaggtaaatcttaaggtgctcaaggtgccggaaatcgagcagaaggtcaaaatttctttcgattttgccgtcaagagtcaaaatttggaattttgggtggtcagatggtttgctatttacctggattttgtgattggcgattgaagttttttccccgatctcgtatgcaggttcttgatgccaccagcgacgagccgtgggggccgcatggttccgatttggcagatatcgccagggccaccaagagctagtgagtagctcaaagctaaaaaaaaaaatcagaacttatttcccatttgtttatgagaatctagcgtgtttcagtttacgacttgggggcgttgcacattttgattgttcgcataatcccattgctttcttgtttcttttccagcggtgatagcgaaattataatgaatgtgttatggcaacgcctggggaacacacttgcgaattggcgtcacgtgtataaggtaataagataggattgattgtgcagtgatgtgctgtttggattgattccttaataacaggatgtttcaatcattacaggcgttggctgtgatcgagtaccttctagctaatggcaccgaacgtgcagctgatggcattgttgacaatagctcacgaattgcagtatgggtccttcgctagtttttctagacattgatatttcattgtttatagtacttgtcgtctgatgctgatttcttttgggaagaaactcacaagatttgagtatttggagcctaatggaaaagatgttgggctcaatgtgcgtaagaaggctgaagctgttctagcaattttggatgacagggagaagcttcaagaggtcagagagaaggctgccgttactagagacaagtaagacattctgtagcccattagcgacattattgcatttcttgtacatttgatgcttacttcttttcatgaaccattggtctaggtattttggcttatcatcaactggaataacgcacaaatcgagcgcagcatcatttggcagtggcagctactcatctggtagccactatgggagcacaggaggttcaagggaggtgggatcattcaaggatatacacacaggcacagaatggaaaaagaacaagaaggaaacagtgtcaaactacagcagcaatagagaagggtctaaagaaattactaacagtgcaaccagttataagtcaaaaaagagtgaaaggcatggtagaaggtacctcccagttctactccgtctttttcaggttttaccatcaacaatagatagtagtggtgccttgaaattatcaagttattgagcaatgactttggaatccaatcttaagttactaaatctgatacttttactgtgtgcatgaaagaaatcaaaattccttaacattacactcgaagttatctgcaaatattagcaccacatctgaagccccaagctcaaagaaaggggaaaatgaggatgatgatgatttcaacccacgaggattttctacatctagtaagtatttatctgcagtatcttaaatattcatttgcatttatgattacaatggtttacctttttgttgcacacgtaaagttctaaggatttattcttgtttgaccatagtcatcatgttgccatctggaaattcacttggctgtatgtttggaactcagctggaacaggtaccacaagatctaatcacctggatctctttggtccaagcttgatggatgatcttgttgattctactacatccacttcaacagcaacgccaaatgttagcacacctgctgtgccagaggttgatttatttgcagatgcagctttccaatcagccaatgctccattggaggcagcaacggtttctcacactcaggtttatactttactaatagccttttttttaccatgattcatttttcatatccctaaatgtctgtgagaactacttactcaaatatgttaccaagaaagtggaaaaataccccccttaagattcataatttgcatgaactatattgttgaaacttgaaacttcattcattatatgtttccgtccatgtattttcaaataaaatacttggggaattcgaaatacatgagttcattattctacaactcattatttattttcaaatttcaatgtaggacaaaattgatttgtttgctggcagactgtcttctgctgattcatttacttcagacacagagttctcagtacgcggtagtcctaacaagtcatcggagaaaaaaatgtcttccgttgtgcatccttctacttctgcttttgatcccttcaaacaatcttttgccacctcatttccttcagattcagagttctcagttcatgatccgacaagcaaatcttctcaaggaaaaactcccacaccagaacattcaagtacagcagcttttgatccttttgctgcaattccactgaagagttttgatggatccgaatcttttggaacattttcttcgaacacagcctcaaacattactgaactgccacgggattcttctgggggtcccaaaagttctgaccatggtcctttggaggatgccaattttgatgccttcacttcacacttgggatcttccacaacaagtgcaactgagtccatgaataagcccatcaaaaagcttgggcaggactcgatgtcagcatcaaaatcagttgcaaagaaagaaacttttcaggtcaaatctggcatatgggctgactctttgagccgaggattgattgatttgaatataacttcgtgtaagtatttttgcactttttcctgtcatgcatgtagttcaagttcggtagatgcaaagtagcaaacataaattgtaatatgtatgtccgaatttgcaaggttcaattcattttagataatggatagaaattcggcctctataaaagtaaaagattcctagtgaactgtatattagattattagtatccttacaataaaacacaagcataagaataggaagggtcatcaagcacaactcaaaaggctaattatcctaggtgctaaaaaggaagacgcatcatagctcatactgtattgttgtaatatgcagcacaaaagaaggtcgatctctccgatgttgggattgtcggaccgctgagcggcggatctgaggataaaggcccgggggcgacgatgggcacagcaccaggccttgtcagttctagttttccatctaaaacagaaacatccagtggaagcggtcattttcagcaccaacagtttggaagctttaagtgatttttatccaggatatgtcttttgttctatggttcttgcagagtacttcttggagcattcgtacagctccatgcctataagagtaaacgtgtatatagctaccaaactctgtgcgatgatcaggagacgtgttgccaactaaccagcatcttctctgcccttgaggcattaatatttttttacttatggcgaaatggatatgttttgtgtacatgagtaaagaaccaatgccatggtagcaattgtaaaaagggttcatcaattatgtgtgatacacgctcatatgaattttgaaaaatgaataacgcaaagcattctggatgctggcagtggcaaatgttttttttagcgaaacagtacttggtgtgcccttttcattgatacagcgggaaaaaaaaactgtaccaaagccaaaactttacagaaagaaaaatactagggatgatctgtgtttggctactgccaagacccaagatttgcccgccttcctaattttcgccgctagggaccgtgctaagagttctttatgttgaaacactctgtgaaagagcatgtagcctagtggttgcagtgacttaagtagcatccgaaggttctgagttcaaatcgttcttaacttaaaaaaaaaaaaaaggcaccccaaggtcctgagttcaaatctccgtaactaagttcctatttttttaaaaaaaaactgaatatatctggttggatatagaagtcgggtaaaaaaacttttaaaaaaaatgttgaaacactctgattcctttctttccatatctcctaagcaacacggacggtggagactcttttcttagtcatctctaaggtactggccaacgttgtcatatctttctttccatatctcctaagcaacacggtggagactcttttcctagtcatctttgaggtactagccaacattgtccaccaagtatggatcaaatatttccatatctcctaagcaacacggaggagactcttttcctaggcatctctgaggtactagctaacgttgtccaccaagtatggatcaaagtaacggagttccaacttattggcttgataagtgttggtttctcgcccttcatggcgtggccctggctctctctctctctctctttcttttttttttgggggaaggggggatagcattggcccccccccttttttggggttttggaaaaaaaggggttttaatatgttttagctgtttaatgtaagatatatttgaacaatatgccactgtaattgatcagacaatacttggtcgattggtcctaacacaaattttatttcgattagtgtcaaatgaattgtcaaatcaatccaaccatccttaacataataggattgcatcaaatcatagaaaatcaattgtgctcaatgcatgtctcaacctagtcaaagtttgattccccaatcccaaccatcttaacatcaaagaattgcatcgtattagagtaaatcaaatcaaatcaatcatgccctattctcataacatagtgggggtcgaagtttcccccaacacccaaccatccttaacatgtactcgtagtaaatcaatcttgtggggtcggagttcaattccctgaacccccaacccatcgtcaaataccataggcaattgcaaatttactacaaatagttattacaaaactgccactagaaaattata

SEQ ID NO: 9973 - DNA, 7057 bp, Oryza sativa
acaatgtggtagcatgttatacaactattagcattaagtgttctcagaatatcatatagctgccaaaaaaaaaacctagaaaacaaagtgcatcaactctaacaggtacctccatacctgagaatgtattttgtgcgggtgctggcgcaggagtaggagaggaaggagatatcacgggatatggttgtccaggaactgcacatgacatagttttacaggaatgaagccaaaaaaaaaaaaaaggtaaaagcaagaactatgcccaaaagaaaccttacaagctagaagagaggtatccaaaataacaaaataaaacatcataaaagaacaaagtggaataatatcattgtatttgtaccaaaaagggagtgctatacagatatgaatgataacattgaacaaggttaacccgcaaaaatgcaaaataagaaaataagatgaagcacctagctaaccaaaaaggccaatattgccaaatattaaacgtattgtggtccttgcctgtaacttagggtctcattctattaaatacatcaaacagatagtaccttatgtttggtgacaacacaatttggttaaattcttagtaaaacttagaagcatggcatgtgtttcgagtacaatcattcgatatcacaatgtgcctccttgtttgtgccaaatttgtctgtagcagcacatcatcagatgccaccaaccagtctaggaatgaagggattattttactccattcagtatagtctctacaggcaatcatatggacctcacaactccatggtggtaacaattttcagagatttgtttaggctgaactaaatggtaatgagcactttacgtgtttcagattgttattttactccattcagtatagtctctacaggcaatcatatggacctcacaactccatggtggtaacaattttcagagatttgtttaggctgaactaaatggtaatgagcactttacgtgtttcagattgtgttcatgctattaagttgcatgcaccagccagttgcacctaaaagcctaagctgatagggaaaggcgggcaattcactttatacactccaacacatgctccttcctatctgaggtgatctcaagcaagaaatgaactgttaaatccagttcaatatagctgattactatgtaatgggcaagcatctctgttcctccctcattaaataacgctgcatctataaattattagaccaattaatttcaccatgttcatgaaataaatggtaaattctcggttcagccaaaaagaaaaatgcagtataccgtgtgtaaatagggaagtttgattgatcaaattgccggagtgaatgatcgctaaacatttgttcacctgagttgagtgggatgtagtacacctttcccgtggttataggatcagggccggccatgccattggcggcctcgatggcgtccatgctggccccgaaccgacttgatagcgattgcaccgtgtctccgtcgacgccgacgtagctgaggagatagttccaggggccggatgagcagccacagagcaggtggagagccaccacggcgccggggcgcggcggccgcagagccggtccgcccggcggcggcacggctagccccgcgtacgccgcggcagccacgtcggccgccgtggcgttcgccgtcgccccggcggcggcggaggggacagtgtaggtcgtattggcgaggtatgtgcgggaggcgaggcaggagcagttcttgcggacgaacgcgtacccggggctggcggccgcgtcggccgtgatgtcccccggcgcggcgtcgaacatggactccagcacggaggcgttcgcggcctcgccggccgccgggaacgcgacgaacgccgtgcagacgcgcgagagctcggagcaggggagcggcgccgaggcggtgacattgccgggggcggcgtcatcaccggcgacttcgccgggggaggcgagcgccaggaagatgaggaggatgagaagcccgggcgcgggcgggcggcggcggggaggcggcattgaggggggctagggttctgggctcgaggtggcgaggtggtggtggtggggcatggaggtggcagtggcgagcagcgagctggatgcttcgcgtggtcgggtcactggagcacactctgggggacggcgcttttagtaagacgacggggttaattagcaagcaaagcccgcaccgcacgcacggccatgggtactggactactagtagatcactgtctccttcattccttgtgtgttatgcccatattgcccttgcacgcatcaataatccgcccgtttttgcttccgtcggtctgggaggtggtaacggataatggtttacgacgcctcaacttgttgagtgctatctctgtttcaaaataaatttactttcaagtaaaatacatcagcggtccttaaaattatcgtgaggtttcacttaggtccacaaacttgtaaaacgcacattgagatctctaaacttggtttattgtatcatttcggtccaaagtctcgtttgaccgtagtcttgcctacgtgacacgccacgtggacgatgacgttgaattttttattttttttctcccttcttttcttttttttctcccttcttcattttttttctccggcggccgctgcaccgcgagctccacagcagcgcctccatctccttctccatcagcctccgctccgctcgccgcagctttgccacccgcttcctgtgacctcgtgtggcctcctctctagctccatgccagacaccccgctgtcgtcttcctcgtcacggcgacgatgcctaaccctccttccagctcgatgaactcaccgtcgtccgaccactcctcttcctgcagcggcttctcgacctcgatgatgacaacgacaacgacgacgtggtgcgaagctcgcgacgttcattgtgccggcggagatctacccagcgaggctgcgtgcgacgagccacgggatatcggcggcgtcggggaaggtgggcgcgatcatcgggtcgttcgggttcctgtacctggcgcagagccctgacccggccaaggcggcggcgcacggctacctgccaggcatcggcgtccgcaactcgctgttcacgctcgccggctgcagcttgctcggcttcctcctcaccttcctggtgcccgagcccaagggcaagtcgctcgaggagatgtcacgcgagaacgaggtcggccagccatgatccacccgttaattccaccagcatctgtatgcaagatccatgcatatgcacggttagtccactatgagatttttgttctcttttttctagaatccattggaagcatatgttttcttctctttttttttctttttggggtttagagcggtgacaattagaggcagtatgatgaaataatggccgccaattaattgttgacgacaatgtagtttagcatcaggtgggtcatataatggacgatcattagggttcatgctgattctgtttcggcacgagggatcctcgggttcgctccttttttctgttgatgatctcctccaaaaaaacaaaacagaacgcatctctctctataatcaaaaggattccagctcgatgaactcaccgtcatctgatcactcgtcttcctgcagcggcttctcgacatcgcctttgtctggcgaggaagccgcacggccgacgccatcggtgtccgcgaaataacccgaagcaagacgagtcgagatcgacaatgacaacgatgacgacgacctggcagccacctccatcatcgccgtcgccgccgctgcaatggtcggcgtcgcgtcaatagatggcaaaactccgagaacacaaccacgagacgacgtcgacgttattgcgtgcacaccacttgcgagacagagagcgcgcacgtgcggtggagaggtggaagaaggccctgacaggtgggcgccggccctcagcggcagatgggagaggagggaggcaaagtggaaaaaaatagagaagggagaaaaataaataaaaattacatgtcatcgttcacagggcgtgccacgtaggcaacatcacggtcaaacgaggctttggaccgggatgatacaataaaccaagtttagagatctcgatgtgtgttttacaagttcgtggacctaagtgaaacctcatgacaagtttaaagaccgctggtgtattttactctttactttttatattttacacgtatgaatacaaaactaaaagtactttatcaaatctcaatagaactatttctcatcttatcttcttctaatacaactgtttcctattttcacaaagcatgatacaatgattactttaaaaatttattttttaaaaaatggaagtaactataaataaatttaatatcagaccgaagaagtaaaaagcttaacataatgatgatcattgatcagggggagcgaaatgaatgagcttccaatgtaaattttctttccgcaaaattttattttgtaatggttcgttgtcgtcttattaaccttacgatatgcaccacaatgtgtttttaacagtgaaaagaaatatgtattcccttcgtttcaggttaattataagatattttaagtttggtcaaagtcaaactgctttaagtttgaccaaatttatagaaaaaagtaatattttcgacccatgataaatttttattataaaaatatatttaattattaatttaataaaactaatttaataatataaatattattatatttgtatataaatttagacaaacttaaagcagccttataatctaaaacggagggagtagttgtgatacagcaacattggcgtgtgttggtgttcaaaatcaaaaactaaggcttagggtagcatctctggataaattactactggaagtgtggttatattacaaaaactggatcattggatgatggatccaactatcacaacatcgaaaatccccccggttacatctatcaacaaatgttggtttctgacagttcccttcatatcgatcaatcgtccgattgcaccaaattaacaacagtgataaaatttggtaagaactaaagataggctagtaagctacgataatataataaacttaaaacttactaacaaattatggcatgtataatatcgtctttcatgataatcttctaatgcgaattaaacaggtatttgattaattagttaatcaatatatatcataacaaatataaaaaagtaaactcgggcactgtaaatatatccattcctaagatcaaagaaacttcggggagcgacgtgggaattgtaaatctaccctgcgcgtggatcaatccacgtacaaaacaatgggagcagggccaaacccaggaccgcacaattaacgagcctccgtttgtctttgatacactattttcactctttgaaaaaggttagcaatccaaaagctcccgatgatcaaagattccattagccggctagttagtgttccaaattaaagaagagggggtaacagggtagcaactgtaatgctgcctcttcctcattcggacacttttgcggtgagtattctatcccccacggcccacgtattatatgctgcatactgttcagtgatgttcaccgagagagagagagagagagagctactgctccatccactgtttggtttctcttgccatctctctgcgtactgctacgattacaggaggatgtactgcaacttatggtaccctgagcaatgaatccaccatgtacagaatgaaatcgtttcgcagttacaccggcactattgcactaaccattaattagcagcatagacgggctgagtaaagcagggtagtagtactactgcccgcaataaggcctggtttagttttcaaaaaaaaaaatttcaaaaagatcacatcgaatttttaacacatatatgaagcattaaatatagataaaaacaaaaactaattacacagtttatatggaaatcacgaaacgaatcttttgagtttaattagttcataattagtcataagtgttacagtaacctacgtgtgctaataacggtttacttatgcttaaaagattcgtctcgcggtttgtaagcaagttataaaattagttttttcgttcgtgttaaaaactctttctaacattatcaaacatcccatgtaataccaaaaattttcttttcaaataagacctcggtggtagctgggcgtcgttatggcctgggccgagcggcaacgaaggccgatgtagccaaaaggccccgcacgtgggggtggccgacagctggttgcccggtactactaccatggaactatggcagctaacgccacgcgaggagggagccccgagtgggcgaggaggtgggtgccgtggtggcgcaccgccacgccacgcgacgccactgccagcgtcggtacagacaggcgagaaaagaacgatttcctcgctgagttgtctgagcgttttcgtacgagcacatccactcagatctcccgggggtttattttaagcgcctcgcccgcagctcacaaagcctgccgccgtgcgtgcatgcgggctgcgcaccagcaccagctttgcgagaaatataagatggttttcttgattatacggcggggtttgcgtgtgctacgtgctgtccgaatatttccgtggatacggtggatgtatagtggttacagtattatcccgtactactactactgtgtcctactgtccttgtttagtactccgtaggaatttagggcaaagctcaacacagaaacagaaaagtaggtgaccgaattgacgcacgcggtgctgttgctgttgctgaacgttagtaaggccgagtttagttcaaaactttttttaaaaaacttttaacttttttatcacatcaaaacttttctacataaacttttaattttttcttcacatcgtttcaatttaaaccaaacttttaattttgacgtgaactaaacacaccctaataagcagtcccggattgaagtggaactaaattggcagtgacacctaggggggacaagaaaaatctcgcctcccatgtcgtgacagctgtgccaatgcttaattcatgcgtcggtaatgcaaa

SEQ ID NO: 9974 - DNA, 3452 bp, Oryza sativa
ctcttgcgattgctttgaacaaaagatgcaaatatggggcttacacaagctgcactaataaattttcctatagtcgagatgtatttgcctgagcgagtgatgcggcaatttgggcttcgccaatccattccaccaccttttcgacctaccctacaggcgctgcatcgtattagtcgacgtggcagagaacgtgagaactgggaagagacacatcatgagtacattcaggaatgggaagcccgccggcagcgcatatttccagagtcagagcagtatgacccatcgtcttatgaggagtacctgcattggtactcaggagttacacggcggtatcttgtaccatcaatcagtgatgatgtggaagcaggaccttcattacagcctgatgattccattgatctgcagtatcaagccaaggctcctatgatccgcaaagcagtaagcctatattatctattcagttcctatgcagtttctgtagttgattggacctaaatttgtgtcagatataagttgtctttgcgagacttcaaatagtttttacaatcactccatgcataatttaactaatatatttaactcgaagggtctgctgattgttgtaggttgataaactgcacggtatggtaaagaaggccaagatggccatgacatccacagctgatacaaccaaacaagccttggtctttgagtttctgcatggctttcaggatgttctccatgaccttggcgagatcaaggaaaatggtggttccgctactagtccacatgttgaatcagctgccgctcaagactacttttgctagaagctgaacagaacattgttcatgccgatcaagaagctcagcatcaggaagaggaagagcttcacatggtggatgatgcaacaatgaccctcgagcctatggatgaggaggataatgggttcaacaatgtcatctgcccatgtccttcactggagttggaggaacacagtcactcagctacaccagccatcgatgagtgtgatacagccactcctgctccaggctctgcaatcccacagcaaagcactagtgttgatcaagatggacatctggaaaatcctaacgaaatgggccagattgaactaatggtggaacctatgtatgtggatcacaatgattccaacaatgtgctctcatccagcacgtcagttcaggcgctgttggagaattgtgaagtagcagagcagtcaatgaaaatgtcgatccagccacccaagttactggctcatctaccccagaacagggcccggatgtcatagtagatgctgaacaagaaaacccagccacaacagagggcaactaacttcaatgccgtcccctcgtctgcaaaggtgacaggcgattctgatttctccccttatggaccaattcgtgccacctatgtatagtgcttagatgccgttgtccgaaggttcagcatattgctgacatattgccctggttgtttgaccatgatgggctccactggaaattttagccgtaattactgatgtagcttacatatctcttgctttccaaagtcattacacttatcattatcaacatttttggtttttttttgtttttgaacatgcattcgattttcaattggaacttaacgctgccaatgcatatactatgttcttatacaaagaccaagaaaaagaaaaggttggaggtaggtaatggcgtaactagttgggccacgcacggcgaaactagtatatgatgccaatgccatgatggtcaatattgctttcatattaaagttttttttacattttgagttgattttttaaaagtcaagatgaaaggggagaccacagttgaaagtttcatatgatttgagttggaagttttatgatttaagttgaaattttcatattaaataagtgctatgaaagggaaaagaagtgtggctgtgtgctaggcgaggcgctagcaatctcgtgggggaagcgaagagaggcccaaaccgctggttgcctgcttggcccatgggtttgagaagaccatgggctcgagcggcccaagaccatggacttgaggaaggagtcgtagtcgtcgtatcttgatgacacgtgcgaccggcccgcgcgctcgtcgttattccgcggcgccatcttcctctctcctccgccctacgcgtcgccccgcctcgcctggccttccccgcgcatcctgcacggagccctaggaggctaggagaggaagaagaacacgcgcgcggggggatagtggatagccgaagcaactcgatcgatctgtggccgcgatcgtagctctcttcttggtccgatctcgtctctcccggcatggatttcaggaaggtgctcgaccagaccgtccgggagatgtaagaatcagaatttttatttctccttctccgccccttttctcctcctggtgtactcctatcttgtaaagatatttttcttcttgtactttcagaaggagggaggtaaatcttaaggtgctcaaggtgccggaaatcgagcagaaggtcaaaatttctttcgattttgccgtcaagagtcaaaatttggaattttgggtggtcagatggtttgctatttacctggattttgtgattggcgattgaagttttttccccgatctcgtatgcaggttcttgatgccaccagcgacgagccgtgggggccgcatggttccgatttggcagatatcgccagggccaccaagagctagtgagtagctcaaagctaaaaaaaaaaatcagaacttatttcccatttgtttatgagaatctagcgtgtttcagtttacgacttgggggcgttgcacattttgattgttcgcataatcccattgctttcttgtttcttttccagcggtgatagcgaaattataatgaatgtgttatggcaacgcctggggaacacacttgcgaattggcgtcacgtgtataaggtaataagataggattgattgtgcagtgatgtgctgtttggattgattccttaataacaggatgtttcaatcattacaggcgttggctgtgatcgagtaccttctagctaatggcaccgaacgtgcagctgatggcattgttgacaatagctcacgaattgcagtatgggtccttcgctagtttttctagacattgatatttcattgtttatagtacttgtcgtctgatgctgatttcttttgggaagaaactcacaagatttgagtatttggagcctaatggaaaagatgttgggctcaatgtgcgtaagaaggctgaagctgttctagcaattttggatgacagggagaagcttcaagaggtcagagagaaggctgccgttactagagacaagtaagacattctgtagcccattagcgacattattgcatttcttgtacatttgatgcttacttcttttcatgaaccattggtctaggtattttggcttatcatcaactggaataacgcacaaa

SEQ ID NO: 9975 - DNA, 3956 bp, Oryza sativa
  unsure (1)..(3956): unsure at all n locations
aaaaaataaatattccatactacagagtcatacaggcattaaaaaaatcgaagtgtaaaagtgacacacttaggaccatgttcaacaaagggcatgaagccattaacattggccacctttaggactatatgttgatatgttccacaaagggcatgaacttacggtggataaaatctatggcttgacaaatatcctggagggctggtgcaaacaggtagtctcttgtgggaataataaggtggtcaatcccatgggcctgcaaaagtaggacttgttactcgtcaggaggatcttgcattgttgattgcaaacacaaaataaagtgattgaaaatcccctgaatgaatcaaatgaataaaattatgctttaaactcaacgagaagatgtctgacaacaaaagactacatcatacactctcacaacgagtaaataatgaagaccaagtctttccttctgattgagtagcgaatcaaggttcacaacacaaatgaaatcatgtactaagctaggaaatcaagtgataagagattttacctggtataaagatgttgggaccagggtctcataagcctcattcaatgttacaactccctgaactccaagttgcttcaaacgtggaacatcacttgggaaaggaacagcacctagcaaaatatactgcgggtggagattggacaaattagtcggtgagatctttatagcacagactcaattaagagtactaaattatgtaaaacaacagtgtaacaaagaacggcaactaaagccatgtccacaaatccctccacatgccaaactaaacatcatatgagacttactgcagtctacactagtaatttaccaaagaacaggccgaaataacgtacgcacttgaagataattactcaaatttcttagacaaaatggagccttaatggaacaaccacaggaacacaatcactgctcacggggaagcgaagggtattacttcagggggaaaaaaaggcaatgaaactctccccgtaatatccaagcataacaaaaccaacccccaagtgaacaaatcccacagagataagtcaacagccaccctaacagtcacgagtaaaccaaaagcgaagcctataatcgcgcgaggcttgtagagagtttaatcacgcgagtcgaattcagacgcaaggaaagagggggcaaacccacctggtcgactcggtcccaccaccggaactccgcctcgaaccggttgcgcagcacgttgtagagcagcgtcgggtagaacagcaccctggcgccggcgccgacgagcgcacgcttcgcgctcagccgcgctaccaccacgccgccgcggacgctggccttctccaccaccacctgctgctcctcctccccttccgaccgcaccccgtcacactctcccagctcgctaatcctcatgcccctcctcctccttcccccaccagcttcaaccctagcgccgccgagacgactccagcgccctctcgcccttccagagccggcagatccgcagggggcgcgggagagaaagcgcgcggatcgggaggtggtgatggcgagttgcggctgcctcgcgggacgcgagaaatgggaagagcgcctgcgccgcggtgtctaaaacctcggtagaggcggatgcggaaacaggtggcaattttgctgaatcggagagagggccaggggagacggtctggtctcgctggttcgtggttttttgttggtgagagaatgagagatggaatttattggtggaggaaacgtggtgtgtgtgctctttcgcgtcaggcccttcaacagctgcataattgtgctctttgatggttggatggtttggtaggtgcaacaacaattcctcaacgcgcagcgttttgttcatgctattgaattaagaggttcattttctagagtacatgtaaaagattttcgtgtcccgcttgcgttaggagaagaaaagggagcacaacagaacccaaacataatggtacggagggaatgaagagttttttagaggtccatgctcagtatacttgaaatgtttaactgatgcgtctaatgttctccttctccatactccaagaggtactccctccgttctataatataagggattttgagtttttacttgcactgtttgatcactcgtcttattcaaaaaattttagaattattatttattttttctgtgacttactttattatctaaagtactttaagcacaacttttcgttttttatatttgcacaaattttttaaataagacgagtggtcaaataatacaaataaaaactcaaaatcctttatattatgggacggagggagtagttgtttagtggggattgagatccgatgcagacacaactgcaccataggactgcatgtattgtaaccgttcattttaatgatcaaaagctcatatttaccgctccactactcaaacagtagtacataaaacaatattttatactataacagtttttgctacattgccaagctaatatgtagtaccgtttaatttcaatccaatacagcagctgcaaattatttaagttacagtcaatactatgactgcagctgattcagatccgtttagtgggatacacagtcaatactcaatgacatgttttaattgtaacggaataacatcgagtcacaaaaaatacttattaatttgttaaaaataaaagaatatacaaaggtgccgaacatggtagtagacagctcttccaggggttgttaaggatatcttattaagttgagtcaatccgttctatgccattaacaattgtgtgggttctacaatatgccactaacaaatttagttctacaatatactaccgaacaatccattttctccttatatgccatcgttgttagtcagccattagttttattaaaaactttgtgcaaatacataagatataaattatgctttaagcacttttagtgataaaacaatcacagtaaaaataaatgataatcataaaaaaattaagtaagtcaaatgatcaaatatgtgtcaaaagttaaagacgactttcattaaaaaccagatgtaatatttaggctttgtttggctaatgagttagggaaataatttcctacccacaaaagacatctttaaattccaaccattcattatcccttttctatttaatcctaaccactggtggagaaagcctttttactcccagttggtaacccccatatagtcccggtttttcaaccgggagtatgaatccaggactaaagatcactatctttagtcccggttcaaatacccgggactaaagatcgatctttagtcccggttggtgttaccaaccgggaaaaaagagaggaatctttaatcccggttgataacaccaatcgggactaaagagagagtagcgctttttttttcttttgccagatttaatctctatattttctcccaaatctagtgccatgtatatccctaaatcaatccccaaatccccaattcaaagtaacatcccaaatcttaagttacttataaacataaatcaaatacatcacaaatcctaaaaaaatatactcaaatcaaatacatcacaaatcctaaaaaatacacacaaatcaaatacatcatagattatacatctcatatccatgcaacgaatcacaaaattacacatcccaatcaatcacaaattgtaaaaaaaaagaaaaaaaaagaaaagagaccggccggcagttgagagggcaaggccgccgccgggcgcacccccgccggccgccgctgcgcgcggcactgccaccgcccgccgcggccccgccggccaccgggtcggatgggaagtgaggaggggaggaggaaggggagaagggggaggaggagttagatctgtgaagaggaaggggaacagatctgtgaagtgtaggagaggataagggatagagatgggtnccgagcaagaaggcggccatggcatcgatccgcgcg

SEQ ID NO: 9976 - DNA, 6277 bp, Oryza sativa
tccatctgataaaagattttgttgttctggttctgctgttcctgggtgaatagacatttggtgtcgatccatattcttggcgccaaaaagcaggagctttccctctgctctgcttttgttcccgcgcgctttgccgctgagattctatttgctgattttttgggaagagaaataagtgattctgttgattagtaatccctaattaatcacaaatggtgggatcactatatgcagctgttgacagaaggatgtgtggcagggatgaaggcaacggcaatgtttgccgtcagccaaaacggcagacgatgtgaacccatccaaagtatgtctggtacgctatggaatttgccacagggagcatgggctctaggccgaataccaacaacttcaggtcttggaaatttcatttgagatacccggcagcatcgaaagcctattgtagggctagatgatccaccataatcccatccggcaaggatcttgccaaaagcaggcgtaaaacctgcagactccataagcacatcggagaaagtctccatcaaactccatcgccaaggagggaggaaggaagctgtcacccagtcgcctgggcatcgccccaaccctaacccaaaccctaacatgattacatgaaattagttagtattagattagaagggtgcgatctgtatacaagtacgaaagaactcagtttaaaggtcagctccgagtaaacttttgaaagttatgtgtgccaaaggttccatttggttagcttgctttaggattcattaacattttataattttcagggttatggataccacatacctaacagtagttaactaaatctcggtagtacccaccacataccatatcttatacggaaacaactttcggatataggaagagttccgcataaggaatgataaatagagttctacatggaaacgacaaggactactattcatattggtttccctagttctacttggacaaggggacacctatgggtataaatacaaggccccctaggaggagaggagacacaatcaacatacacagaacaacaaaagccacaacatacaagccaacatacaccaagacacgccgccggatatcgacatcagagatatgcctggactgaccctatccggtacctacagaggccagctgtagggatctagcgctgtctttaatctcgtcgggcacggattcgaggaggaagactaccctgttgtcgactaagtgacgatatttcaaaccactatgtcgacaacagatagataggctaccccaaatattgtactggtgtgattatggtgaataagagcaacgaccggcttcggtcaacaggatgtagggttattacctgacaattcaggggcccgaacatgtataaaaattatcgtctctgtctcttttacctaagtctcgtatatatcctggtaccaacgatccccatactatacaaataccagaatcgtgacatcaaacatcgacaataatagagattgctaaaggacgctccatcttgtttacaaacaaggtcaaaatgatttgaaatcaccacattaacacaaaacagatatctcccaaaaaaaacagagagagaagaaacctacatcagtaaccatgaaggatctacattattataacggtgtagaatgcagattgactgcatatatattatatttattgtagctgtcacagttgtgtgtgtatgtgcgtgtgtgtatatatatatatacacacacacacaagcaaaatgcccgtgcatcgctacgggtaaaagacatataaaatattttattaggctacatattgataagaaatttcaatgacaattcggatggataaaaaccactattgcatactgaaatacttgctctttttcaactcccgcgtggtaaagtgcgcgatctcctttttctaaaattatacctgggctcgcgtacaaagtgattgtgtcacgcgtagatgacatataggcagtcgagggagaagacgtaggcgctggtaccaacccatcactgattgagagaagggagaaccagagaagggacaagggaagagcaggtgcgttaagtgaatggcaaggcggataattcccttctaactgtcagggtccttaccgaagcgagttaaaccgttagatgattcaatcggacgattcaacatggtccgtgtaggcgacgaatgaaaaggagtgtgatgatcggaaaaatccgtttttttaagtaggaagggataaaagttcgtgtattggtactcgggcagaacatccttgaatgaaagaagcatcggcatgcatcaacaaaagctgcccgtcctccctgctcgcatctccttagcctagcccatctctcatccaagctaagtttgacatgcccgaggagatacacatgcatatgtttggttgcttacacgagagatacggtttggaagagattttgtttggatgattttatggatgatcacttctctttatttagttaggtgaggttatctataaaatatcatattaacatctgattcaattaattaggtgtactcttcaacatgcaaaatatgatttttttactaatgtgtaaatcattgttcccaaaagatgtgaaaaaaaaaccacatatacagtatgtgtgtgtcaaacctagctaatgcatcacagctagtatatgtgtgtgtcaagcagtagcagtaatctacagttaggctaatctgatcttaatgatcaagacacgcatgagtgagtaacaaaaaatgcattgtcttagaaaagtgggaactgggaagcttgcgtgtgagcgcctgagcggtaggagaagaaaaaaagaaaaaaaaaacagaaaaggagcgttgtttcctcgccgcccccgataattatccgcatgtgcagttagtgaaaaaaaaaaacaaaaaaggagcatcgttccttcatcctctttcctcgtcctcatcgccactcgtcattcctctcagctcgccgccccgattcatttgcttgccgccggatctgacgcctttggactcgtggccaacgaatcccgcggcgggaggaaggagagtgtgctgaatcccgttggattcggccgcctagaggccggcggacactggatccaaccgccttgaagccaaaggccgcccgatccacagcgcagcagtggcggcggcgacggcctcagcctagagctagcagtggtggtggtgacggcctcatcctccgacgagcagcggcggcctcccccttctccttgatggccgcatggtaggtgtggatcgaaggtgaccacggctgagagggagattgatgatggtgttggcggtgagtcagtttggttctcctgttattttgttgaatgtctaatatggcagaagaattttgatccgtgatttggttctgctgttgttgatgacgttgacggataattgaatcaatgtaaatttcctcttcttgatttctaaggtgcttctcatctttgacctgtggatgtggaattttttttcctaacttataaatgtggatgggggatttgggcaactgtggatgtgtgattcttcgtaatctgtaatcgtggatggggatcgaggggggggggatgtttacaagattgggttatcttgagggaattttggttgtaatttgtgtgtttatgttttcgattcggttagcttctcatacgggcattgagacagggaagcggggaaattcacatcgatgtgacggacaaaaacggattggctcggataatgtgacgattggaaaaaatatgaatcttttaattagttaagatatagatatagatatatatatatattttttcaatctttaacaataagcaaaggaattgcaaacatagtacacgttgagccgccgcagccgcacaattgtgccggaaaattcagttagttatatagtttgtctgccacttctaaccaaattctctacctaccaacatgctccattatccatagaaacctaactaaagatcacacaaccagcaaagcagcgcagtatccagcatccagccacaagaaaacatgacgagaacaatgctgacaagagcggtacctaccggagagcagtcgtcctcggaagcacaggcgcaagactttgacaagtgccaagactgtgatgtgccaaatagcagggaacattgcccccctagaaaaaaaaggtactacggagtagcagcagacaaatagtgacatggaacatggacatctttttattccgatcggagaaacaaccattaagtgaaatctcacgttttcagggttaaaaaacaaggacaatccgcacatccacatctctacactctccaaactcactatgcacacattttcttcccggtggcattgccgcgataagagaaagtagaaacatcactgtttctaccatgtctaacaggctaactgcctattattatctactactatgtacccttgattcacagcattgaaaactgcataaaagcctgctggtttacctagcaggcccgaacctcagcaaaccggcttggggttggctcacaattgttggtaagtttcagagatccaaagagacatgatagtcttctcatgatgggcttccggctgactatcacttccaacgacacaacgtccttcctggtatcggcataagtatcatatccctcgaggtccgcttctgttatgagtactgcgtcagtacacactgtagggctcgttggcctgggtaacattacttgacaaaggggtaaaccactatcttcgtaatcaagctccatggagtagtaatcatcaatttctgagttggtgatgcagtcatccccggcttctagaaaatggcccaggtttttactctgtattggaagacgcccggtggtgagggtactaaaaacgttgacagcctgcacaatcatgtcgttgcatgaagcagcttagcatttgtaggactgtagagtaatagctctcacttggacaaaatgcaataacaaaagacgtccccacacctgccactgcgatggtgccaaaagtactctaggcctaatggatcggacatgatctaatgctgcttctggactcatgctccgatatttaatctgcaagacaagtaatctgtcatcagcaaaatggagcgaaagatatacaatattgagttgctttaattattgtttatcctaccagataacacaaaacaatagtcgtgctacgccctcttccagctttacagtgaacataagtaatgccaccttctgatgcattccctgaaaaaaagagccaaagttaatatccagttgaggtcagcaaaaattgtctgcataaatggctacaatgcagaaagtgtgtaaaagcaggtttcctttcctgccagcagatatattaataatttcacttaataatcatggtgtatggtagtattatattgcactgacagctaacagatccttctcatcccatggttggaacttggagatgggatgtgaattagaacatgtcgctgcaacttaaatttgaacacctactacaccaacaactaattggccatgatcgcaaaccaaattccatatccattagttgaacgcagctatcacctgctccacaaaatcagagttgactgcaactagcttgacttcccttaatctgactaccggtagtagttttgttacctaaacctatgtcattgtttacatgcggaagaacaatatttcatactagtgttcgagaaaaaataaatattccatactacagagtcatacaggcattaaaaaaatcgaagtgtaaaagtgacacacttaggaccatgttcaacaaagggcatgaagccattaacattggccacctttaggactatatgttgatatgttccacaaagggcatgaacttacggtggataaaatctatggcttgacaaatatcctggagggctggtgcaaacaggtagtctcttgtgggaataataaggtggtcaatcccatgggcctgcaaaagtaggacttgttactcgtcaggaggatcttgcattgttgattgcaaacacaaaataaagtgattgaaaatcccctgaatgaatcaaatgaataaaattatgctttaaactcaacgagaagatgtctgacaacaaaagactacatcatacactctcacaacgagtaaataatgaagaccaagtctttccttctgattgagtagcgaatcaaggttcacaacacaaatgaaatcatgtactaagctaggaaatcaagtgataagagattttacctggtataaagatgttgggaccagggtctcataagcctcattcaatgttacaact

SEQ ID NO: 9977 - DNA, 28631 bp, Oryza sativa
aaacgacatatcaagacaaagtctagtatgtatgtgtgtacagctggactactatactattttaaagaaatactccctccgtcctctagtataagggattttgacattttgcttacactgtttgaccattcatcttattcaaaaaattatggaattattttttttacttactttattatccaaagtattttaagcacaacttttcgttttttatatttgcacaaatttttttaataagacgagttgtcaaacagtgcaagcaaaatatcgaaatctatattatagtacgaagggggtttaggttttagagtttagggtatagtactcacggtaagtttaaatcttccgtcgttttgtccaaccaatttattgacacgtttttcaataaccataccactatgatatcattgtacataaatcattgacatggcaactgctagtactaaccaaaagttgtcaggatagctacacctgagagaatgttagacgaaataagggagggaaaaagggtggcaagtccattttgagagtgcaattagaaagctgagtacattgcaaatcgacagcaaaggaccatcattatggacaagttctaggttgtgaacgtaaaaaggcctaatcaccaactccgcccatcaatgctttccaggggtgtaaatgatatactaaaccgcataaaaccacaaatcttttggattttttttctcatttcctcgaggccttattcgattaatttttatgagggagggattagagagaatttattccacacctattgtggtgtggaattattcctcccgtctttaatcctatctaaaccgaacaaggccctattgtggtgtggaattattcttccacagtcccctccaatatttttcaatccccttcaaaccgaacaagctctcacggctgccactcagccactcacatcttctaagggtgcgtttggtttacggtcaaggttagataggatatggcggtccataatttgctggatttgacgatccagttttttgtttggtggagtgagtatattgatccagttttttatttggttctagggatgaaggtggatttggtgatccaattttttgtttggttagagggagtaggatggatgaatggctgcaatcaccccttcattagagagggtgagtataccccttcaaaatcaccaaacccacaaaattatcaatctatatattaaaaaaatatagagaaataaaaaaatcataaacaaataaaagggggaaaataaaaaaaatagtcctcttctcgttggtcgtcggcttgctcttctcgccagctgccgccccgtcttctcgctcgccagccgctgtctcgtctcttcgctcctctcgccggccgccaccccgtcccctcattaggcggtgacaacgacgacgatgccggccgtctcaccggatccgccgcctccagatcccggcgaggaggagcctgggaaactacaatggttgccgctttcagatccggtcatcgtcatctacttccataccaccgcctcttcccactcgccaccgccccatcttcttgctgtcgtcgccttcggcctccagtctcgcggcaccctcttcccgccgccaccgcgcttgtgtcccgtgccagccgttgcgctcccgtcccgcaccggcctccgagctcgcctctcttgctggctgcgtgcttgctgcctcgctcgcaggggcgtgcctaggttatactacccggtgtcacaggacaccgggtagattattcaaatcctatataaattacactatattaattaatatattagtcaataattagataattagtatgtattggacccccggtaacttttattctaggttcgccactgctcgctcaagtcattgcggtcacgtggtgacggatgacacgagtcgagcgaccagcttgctcgctcgtccgccctcgcccgggcgctcgggcggctacttctaaggggaatattctcctccgggccgccctattctattttcgcccaccaaccaaacacaaaaaaaaaagggggccgccatatcctatccacccaaaacccaccatccaaacacaccctaagaaaatccactcgctctaatcccggccgtatattcccaatccaggcgaatcggccactgtaaccggaaaaaaacagttctatccgtcagatgccgatcggaaggccagcatcagcgctatacggtataggctcccgataaagaagacggccgcggctacgaggccgcatgattggatcggaccgcggcgagctggcgtcgccagtggcgtcaggcgcacgacctgccacctcgcacgcgccccgtgggacccccgcggtctcggcgtcgtctcggcgtcagggctcgcgctggccgacaagcgggctggtgttcacgtgggcccggctgaaaggggggctcctgcagctgggggcccacctgggcggtgtccgttggaagcatcccgttggtggatgccccgtgggcccgcggcggctgaggtcctcgggaagggtgacggtatccgtgggcgccaggcgctgggagcctgggattgggcggggtgtggggccacggcacttgcacggggtttgactgacggtgtggccgcgtgggaggcgatggatggattgttccgccaccacgcgagccgccgtgacgcggctgcagtgctctgctctcgcgtggttggcactcaccacctcacctcatattttgctgcttgcatgattggtttggaacagcgacactggcacactgctcccctgaatccctgaaccctgataggttttgctgagaaaaatatcactgatgctgaattgaggcttccatccgatggtccaataaaccgaagaataaaccaaattttaaattttcaaacttaattttaagtttgattttgagatattttcaacgtatatttttttcagcattggcttttaaattaaaaaaaaacacatatataaaagttttacctataaatttatttttattttctaataagccgttttggtttattagaaaaaaaagccaatcgattggggcctgacatgggcaaggcagtggtggtggtgctccggtgccaacccaaacgggaaagatccggatcaattttttttgctcgcgggagagttgcggtaatatgctctcggtaatgacagcgatcgcaatcgatccatccatactcgacgagttcacatactccatggctccatacttcagggttcacaccgagtgacatcacgcccgctcgtgcttcatgaccttcttagcattatcgtcttgcgcttgacgattcacgaccttgccttgcacgcaggcttgtcacttgtggcttgtgcgtagtggctctccttttcgtatagacttccaggcttccagcttcatgagacgaatgcagaagactatacgattgttttcttgtaaagtcgtgtttcagagaaataacactcagcacatgttggagcatgtagaggacagatactaaccatttgtaaattaaagtttcgtttggaaggctgtgtttagttcaccctaaaattgtaagtttggttgaaattagatgatgtgacggaaaagttggaagtttgtgtgtaggaatgttttgatgtgatggaaaagttagaagtttgaagaataactttgaaactaaacacggcggaagtgtgtttcgactgaaaatttcggtgacacattaaaagaaacaagcattttgtgtatgattaattaaatattaattattataaattttaaaaatacatttaattaatttagaaagaaacttctatatttatgatttttgccgcaccatttaacggattgtaaagcggtatagaatgtagcccaagttgaaataccaaaattttcccacccaagcatgtaacttgtatttcgttgggtgtttgtatgaatgttaatagccgccaaatcaatagtccattaatgttatattctattatctaaaaacattgtccattgatagcgcgagaacttacccaagacctaagttcccaatatgttagtagggtggagaaacaaaatagccataaatttgtttcttttgcccttttatataaagacacgtactatttaggttgtgtttagttccacgctaaaattagaagtttgaagaaattagaacgacgtgatgaaaaatttgaagtttgtgtgtgtagaaaagttcgatgtgacgaaaaagttgaaagtttgaagaaaaaagttggaacctaaacagggccttaatgtattcttttcaaatagtacacgtttgtatcctcatcagtttgtcaagagctgattatatatcaaaacgacttattagctataaaaaataatttatgaataaatattgacaaaaaaaactacattgaaaatactctaaaattaacttaaaattatgttttaaatttgaattttgacatcagctgattcattgtaggataaatcatgaggctcttgctaggggataaattaagcacatattctacacatgtcatattcagattgcggattccacttcaacatcttacgtgtactccaccttgataaaaagaacgtgcttcacgagcctacaactcacaaaaaggataaaaagaggcaaatactttattttacaggagtgtgacaagactaaaattacctaaaacgaagctgccataaactcagtgcgtgtccattccacgtacttttgaagaaaaagatacatctcttttttttaaccgggaaaaacacattcgctgcgaagtgtgtgtagtttaacttcttggaattaacacgggagttcggatttacgactatttatttagtggtagcatggtaggtggaatacccatacacaatgaaacactcacgatgacttcatcaattataaaactagaggatgccccgtgcgttgctgtgggacttggttaacatcaatttgttagataggaggtacaatctcaagaagaaacagaagaaacaaatagctttcttggagaaattctttttaacagctctatccaaaatttgtagataatttaggtagcacatgtcaactgaaggggcgttcagccataaagctcttttatacggattgacgggctggatacatgtagatgtgtgtggagatggaccaatttgttcatgtgggctacatttggcgctgaggaggtgaagagactcactcggtgactaatgggttgggctctatgctgcattccatccaacgtctgagaagcgatctaatgcattcatccaacggttcacaatttgataataatgtggaagcatgaggtttgagcttttggccttaactttataaaaagaagggatatgtcagtctagtcatccgaaggtattaataggatgtgatgtgcatatgtgcattgatagggtgagcgcgcgcatagtgaacgtctagatttccgtgtgtttctcaaggaaaaaaaaggggaaaaagcattagtttcacataacaccatagcatcatgtaacagaggaatgggctgaagtggatgtgcagttttgtactagtcaacaaaagccggaataagttcactttaggtcactcaatttattgcctagtttgaaattcattcctgatccacaatacaaaatatgacgcacctctcaactctcaaaaccagttcaagtaagatcccaatatgttttgaacaacagtttcaactaatgtggcatctacgtggtgttgacaaagtcaaataaaaccatgggacccacacgttagtgagtattcggttaaaaataaataaattgaagtgagacccatgtacagggtggagtgagatctgcaaggtgtctggagggaggtggtggagtgcaacgtcgtgtcttgttgcttctcatttgccgtggtggggcttatcgttgtccgcggcgttgccgacgccaatgctacaacaccgggaggaaggagatggacgagctccacgcccagggtacgggcctgcgggccctcgcccagtacacgtgcacacatcgggtcggtgaaggtgcgctggtctgtgagtgatggctgaggtgtctttgcggtgaagaacattgaggcggggcaacaaaaatagcacatcctctacagtccacaacagttgactcaaatctcttagcaccaattttctctccttcctcccttggctaacatgcacaagttcattgggaagagaaaagacaaaacaaagagagtagataccagcacggggctacccacatacgacaagaaggaagcaaccgtagggcggcgacatgttggcggcgttggggaccccgacaccggcggttgcaggcattgaaggaagcaggagcaggacccgaccgacggtaacggccatagcagaggctgaaggaggaccccaacgggtagagtcggcgattgcgccacgggaggcacgaggaggggcctactcccttggtcggcgacaaggcaggcggagcactgatgtagattgagagactcgcatcgaccacagcgataaccaatgcaactagttggagtcagcgttgacgagctgggcgacgactagtactcgagggtgacgacccaaatctagatcccgtcgagggagaagcgactaagagcaagtataatagtaggctacaagccggctaaatgctgaggtggaggagagaagagaggagagagaggagaagcggactgtaaacttacagccgacttggacacaagaaccaagaaactctatgagagaaataagtgggccctatattaattgtaaagagctaactattatatgggtaagctaagagaagactacacagaaccttctagctaacaggtcggctgtattactagccttgctctaagggaatgcactcaaggcatgtcggtcacggtaagtagggggactcagggtgcgtgtggagggcgacgaatgtgctatttttgctgactcaaatctctcagttcacatgtggccgctaacatgtgggggccacgtgggtcccactcgccacgtaagccaaaaccgatcactatactgctaagagaccaaagttgacattgcattatgagttgggggatgagttatatctgatatttcagttcaggcatgaattttagacttggtgacaaattaaaagacctaaaggaacttatccaacaaagccatcccttaactcttaaaggcctggtacgagtctatccagtgggcccatttcccaacctttcggcctaggaataagttcatccaacttccctctatttacaccgaatccgatttttgtcgttgaaccccaaaaccagatacaaccaatttatgaactgtcaaaacctgtgcaaacgaggtccctcggcggttttaaaagcggttttggctgacgtgacgtctacgtggcgatgacgtggcaattatatatcagaaaaataataaaaaacataggcccacatgtcagccacacaaaaaaaatcttaaaaaaggtggggcccacatgccagctaaaaataaataaatatggtgggccccacatgtcatctccctctccccactcggctctctctcttcttcctcgtcacgccgcagcatgccgccgccgccgacggcagccgaagcatgccgacggagcggcagctgcagcaggccgcgggcgaaggggcccacgaggagcggaggggcgagcggagtggcgacagcggcagggcgtgggcggagcgcctcctgcctcctcccgttcctccaggggctccccaacctcccgccgctccgcgtctccagcagcgcgcccgtcacgccgccgctctcgtcgccgacggcgtcgcaggcacccaagatcaggaagccggactagaacgtcgaccccttccggcaccccttcttcgcggtctccgcgccggcgagcccgacccgcggccgccgccttgagcacccgaacacgataccggagtgcgacaagtccgacgtctcgacggtggactccggccggtggttcagcttccagatggccaccacaacgctgacgtcccgcacctacaacctcgtcaacccggcctggtggattgggaaatttcagggtgaagtcttcgattcgagtccttcctgtgcatgcaagaaagggcgctgtgccgtgaggagatcctcagctttgagcatccatggggttcctcaaccttgtgggcaactcctttgggtgctcggcttccggcgagcggctcgtctcggcggccagggacggcgacctgcaggaggcgcgcgcgctgctcgagtacaacccgcggctcgcctggtactccactttcggcggccgcaactcgccgctgcactacaccgccgcgcagggtcaccatgaggtgatgccatttgtttgccaaactagctgaagtatcagtgtttctgtatagatgggtaaaagaactgcaatactgcattcacattttctgttgcttgcatgttcaaattgtttctctgttgctcgaatccgacgtcaagatcaacctcaggaattacaggggccaggtaaaccaagatttctggtacatttaattgtttaagtttcgacaaggggtgggtgatgccatgggagggcgagaggaggcggcgtggactggggcgaaggacggcggccgcacaggaggacatgtggggagagggagatgacttgtggggccggatgtaggtggcgacatcggtgtcggagtggccatcaaaaacggcgaagaggccgacctcgttgtcatcctaatctaggtggcgaaactcgggggcgacctcctcctcctctgggcaccgccgccgccgccgcccgcgccctgccgccgccgccgccgccgccactccgcccgcccctccgctcctcgtgggctccttcgcccgcggcctgccgcagccgccgctccgtcggtatgcttcggccgctgtcgtcgtcgtcggcatgctgcggcgtgatgagcaagaagagggagagccgagtggggagagggagatgacatgtggggcccacgggcctcaccatattatttttgtagctaacatatgggccccatcatttttagattttttttgtgtggttgatatgtgggcccatgatttttattatttttctgagatataattgccacggtcatcgccacatcaatgtcacgtgggacggagacctagtcaaatggcgccatatcagctaaaaccgccttcaaaaccgccaagggcaccggttttgacagattggggaccggttgtatctggttttggggtttaaggacgaaaatcggatttgttgtaaaattaagggacctcggatgaacttattccttcggcctatgattctatggaagcccgtcatgaccaagcccacaaaaccagagccttcccattcccacaaaacctacgcacagttcggatccgaccactccacgtctccacccggccgagctcaacctccgcgccgcaccggacggtcgcacccgcgtctcccacctccccggcggcggctcccctcatctccgccggtcgcctcctccaagcctccgcgacgcgcacggcagagatgtaccgcatcgccgggagccacttgcgctctctcaaggtaccgcaccctcccatcccgatccttcccgctgcaaaaccccccatccgattcgcccgacgcggggggcgttccgtgtaggaattgatggtgattgtggctaatccttgtttacttagtcagatgttgaaacgggagatagattgtttgttgtcccacgatgagaagaagaaacctgcatcccgatacatttagcggtcactgattctctctagcacttaccgttttcctgttaaatttattcagataacgcagctgaagtcctgtaaatcctttaaccaacatttttcgtgacggtgcgggatgctatgttgaatgcacggacgccacattttcttttgcctattgcattatattattttgactttttaagctgttttctttgcttgtctgatctgtctagaagtgttgggttgatgagttatcgctaactcaatacacatagtgcttatatcatcttttcagattgataatgttaatacgatattttgagtttttttgggtaaggttcacctgaatgtttaaaacaactattttaatgtaactattatactgcaatttgattccaaagggaaagggtgatgtatgacagtataagttaagctgcaaagtttacttctcggagatttcttttcgcaatatgatcttgctagtttggtttttcagtgaccactgcctccagtattttctgtaatttgtatagaatttttttcatgtgcaagtttttcagtttgagtaccttcttacttctaagtaatttcacctcatgttgtttctgccacattatttgttttcctttatttccataaaaccatatcatgtatcataaagacgcatctcttttgcttatgtggttgcagagatacagttatagtaggtttgctagtacaagtgttgtgaagcagtcttcaggtggtttgtttagctggcttcttggggagaagtcaagccaattgcctcctcttgatgtccctctcccgggtattacccttcctccaccactgccagactttgttgaaccgtctaagacaaaagtcaccactctcccgaatggcatcaagattgcttcagaaacgtcagtggtatgatggtatcactatatgccttcaggtgttttaatagattctcttttttctgcatcagcatgaaaagtaaattttttaggacttatctgcagagtccagcagcatctgtgggactgtatattgactgtggttcaatatatgaaacacctgcttcatctggagcatcacatctgttggagagaatggcgttcaagagcactacaaacaggagtcatttgcggctagtacgtgaagtagaagccattggagggaatgtctctgcatcagcctctcgtgaacaaatgtgctatacctatgatgcattcaaggcctatgtacctgagatggttgaagtgcttattgatagtgtgaggaacccagccttttttaactgggagattaaagagcaggtattctgtcattccgaaattagcatttttgatattctgtatatgttggcattataataatgatgtcttgttccccctacagctggagaagatcaaggctgaaatagctgaagtttctgataatcctcaaggtttacttctagaggcactccattctgctggctattctggggcactggcgaagcccctaatggcacctcagtccgctattcataggttggacagtagtatccttgaggaattcattgctgtaagattcatcaacttgccatttatattgtttttttgttagaaagtgcgtgctttgacatatgcttgcattgatgaattcaggaaaattacacagcacctaggatggtccttgcggcatctggagttgaacatgatgaactagtttcaattgctgagccacttctgtcggatcttcccagtgtgaagcgtccagaagagccaaaatcagtttatgtgggaggagactatcgttgtcaagcggactctgacgtgagcttttgctgctttacgctgtttgttgatgaggatgtgtatatgtacttataatcctggcttccttttcatgaacagaagacacatattgctcttgcttttgaagtaccaggtggatggtttgaagagaaaactgccatcattgttactgttcttcaggtattgttggcaaacatcaaatttaaccattattcagagacaaaactcaactatggtataccttttatgtagtttactgtctagtagactgccttatatgttcaccatttctttatacgcaatatggatggtcttgttattttgcagatgctcatgggaggaggtggttctttctctgctggtggtcctgggaagggcatgcattctcgattgtgtatgttgaattccacattcttgtcaatgtttcaaaaaattaagttgacttcttgtgccaatttcttaacattagcgtgatgctttatttacagatctccggatattaaacaactaccatcagatcgagtcattctctgcattcaacagtatctacaaccattctggtctttttggaattcatgcaacaactgtgagccccttatcagacatggatgatcctgcttttttttttgccaaattcaagaagtaaatgtagtttagtgtctgtctttttataccaaatggaatagcctactctagtagttattataatgtccattatgtgtatatctggtcagtggtgaacccagaacaaaaattgccgggggtccaatacattattacttaattattgactgatttaatagtttaggacataatttggttaggattgaataatctatctggggtcctgtgaccctgggaagctcaacataggcactccattgtatttggtagttgatttgtgtgcacaaccaacctggtctcttttatcctttctgcttctgggatttacacaccatcttacgcatggaataacttgattgcatgaggcctgtgatgaaaccgggcaaagcagccagtgacctttgtaaccaaaatagagaggtcaaaagttccttaagtaggtgaagagggagaattttagtgcctttattacggatataatagaagctagaagcaaccaatacttttgtgggatgtgtggaaagcatccatctggaactgtgagaagtattgtttgcatacttctctgtttagcagggtatatggcaaatgggcacatcgcctgctctactcatttgttttgagatgtttgttatgcattctaccttcactccatatctcctatcactatattgtacaacaatttgtaccatttttttcctctttctagttttccttggaaatgaaactgtgcaaagggagtgagaagattgactaaagccttgtagagacatcaatttgcatccatttctttcttttcattttgttgtgttcattgtgctattaaatgatagaatcacttgtcagtaacactttttgctactcctttcatgatatataattgacacagctttatgtcttgcaatcagagcccaaattttgcttccaaggctgtggatttggcagcaggagagcttcttgaggttgcaactcctggaaaaggtttgcttcttatttgacatattggatatttataaggaccatgcccatatatattttcctcatggctgtattttttgtgtagttacacaagaacagcttgatcgagctaaacaggcaaccaagtctgcagttttgatgaacttggaatccagagtatgcatttctaaccactacttgaatcctttgtgcttatcttttgtttcctgttgtatccttgacactttgttttcttcactgcaggtcgtagcatctgaagacatagggaggcagattttgacgtatggggaaaggtatggttgcaccagcattggtaacatagcaacaaaagtcacctcacatggttcttaaacctttatgtgcactagccatgcattcactatcatttatgagctatgattgtgcaatcatgctgtgtcctgacaattttaagaacgggaactttagcatgtcattaaaatcatagtgaaacctacaaatatatgttgtctattgagatgtcaccttcagtatttacacaagcatagagctttgatccttcaactgtgaatgaactacaacagtttgctttttgtgtagtgttcgttttttgttgtgaacatacatgctaagttcattctagttttaacatgcattactattgacatttctctatatactactatgaagagggagtatgtccgtttacttggaactcggaaaatccagtttgaataaactaatctgtatagccgcctgtgcaccgccttgctgatgtaatgacatcctgccaatgtatagcactccgagcaattgaacaagatgattcctctccttagcccctctcaatgtcgatcttctataattactacaatagtaatgtatgttttatatcccattgaatggcatggggctgggcaatacaaatagaccgccggatgtctatataaccgtagttgcatcaactattgcggaatgaggattgccaacaattttctgttagctagtcagtggtcatcactattatggcaatagaccgtcgttcagctttttacccttagttgtgaatctctaactattcagctttgttgggatcgcaggaaacccattgagcatttcttgaaagatcttgaagcaatcaccttgaatgacatttcttctactgccaagaagatcatttcatcaccccttacactggcatcatggggtgacggtatgttctaacttaatcttcatcaaagtatttccttgtgaggattatgtaatactccctccagttttttttatatgacgttggctagttcaaatttgaactagtcagcgttatacatataaagatggaggcagtactaccttttataaactaataattttggacttgtgattcactagaatgctttcttgcagttattcatgtcccgagctatgaatctgttagccagaagtttttctcaaagtaagcaagcctatcgcatggcttgcccccgacttctaaagttgcagacgtgtaactctactggtccttggccctaaccgctggaattcacaataataaattgtctagacttatttttcttagatattttaattttaagcaaataatagttactcaaacggcgatgatgctgactgtcctttttattcttttcctttattatattgatccataattttgcgtcaggctggaactatttttagttccgcggtggtgttgttgttttttgttttgttttttttttgtcgtgctgagcttagcacagctgagctgttgcgtatgtgtcgtgacttcaagtctatgcatgctgaaatcgtcttgatgatttttccattcatggtgagccgttcttcaatattttaactgagttccccaatgccattacgtattattgtcgcattttctccaaggctgaagcctgaaatacagttcttttcctttttacttgaaatctcttccctcgtttcgcatctgaccttctagtcttctagagcatacatgagccattcttccgtatcctcgtgtaattttctctgtgatctagagtagtttgtattaagatgtgactttatactttggtgtgtttgctggtatatgttggctgcgcgggtttcaatagctgacagtgtgtacgcttctacggttccattcgatggctgcattggtacggggtactctatctgtctcataaaaaaataaatttaatatagaatgtaacatatttagtactacgaatatatgtatagaggctgtattatgaatttaaacatattcttgtttagatttataataggaaaaaatacgaattaccctaaactatgacggtcgactgaattacccccctcaacaacaaaaccagacatttaacatctttaattttctaaaccggataaataaccccccttggtgctgtacaaggtggttttagtcctatatgatatccacgtggcaatgtattaatccagtcagcaacatctcaataaaatgaatattctaaaattaggtggtcccacacgtcatgctcttcccgtcttccactttcccctctcttcgtctcgtgcagcgcagacagaaagcgacggcggcagtggcgctctccagggcgggcgggggaagcggcggcgtccagggcggcgaccgcgccctccagggcggatgggggaagcgacagcttccagggcgggcgggggaagcggtggcggtgacggcgccctccaagtcggacgggggcagcggcggtggcggcggcggcgccctgcatggcgggcgggggaagcggcagcggcgacggagccctctaggacaggtgggcaaagcggcaggggcaacggcggcggtcgctgacgccgtcgcggtcttcttccccctcgtcggaaagctcacgtacgtcccctctaccggcgacgtcgtcgttgactgctcgccatctgccgttggggacggggcgacagcgacgcgcgggcgctgtcagccgccgagaggcacgatgtcccggcgttcttgcggctcgtgcccagcctggaggcccccgagctccccgcgccattgctcgccgtgcaggtgacgcggttcgtcggcggcggggacgggggcggcgttgccgtgcaacacgccgtgccggacggccagagcttctggcggttcatggacgcgtggtctgcgccggccctcggccggccatctgccccggcgccggtgtttgaccggtcggcgatcgtgcaccccatggccgctgccatggctcagcgcatcctccggaaagtgacaccagagctaccactggtaatctcatttttgtatgtgcgcatgtgcattttttatgaaaattcattaagtcatctgatttttagcgtgttctacagattttcatcgaaatttgtagctcctcactgcgaatttgttgaggcgaacatggcaacaccacgacacgactacgctagagctcgagcgccaccgcatcgccgacatcaagaacctcatcgtggagctcgacgaggccaccacatcccccgggcgggtgcggggagcagcggcggcggccgcagcgacagatcggcggcgtccccccgattccccctcccatccgcgcccaccgtcggccagagccaccaagccgtgcccgcagctgctcgcccattgacgcctaacaccaacgtcagagaagtgacagagaacaaggggttaatatgacatgtgggccctatattattttattttattttattttgctgattggatttccacgtcgacgccacgtgtatgccacgtagaaccaaaaccgttccggattgagtcagggtaattcgtccggtttcaatagtttgaggtttaatatgtctggttttgtggttcgggggggtggaggggggggcaattcatactgtcgtaaaagttcaggggtgtaattcgtatttttttctttataatactaagatgtgttatataacataatagatttgttttttatggaatgagagagtatgcgttatgccgcacaaattgtatatttccgctgcagtgattcccttcttttcttagcagtattgaatttgtcaatatgtccattcgttgaatcagaagtagtacttaatcaatgaatcaccgaaatgagcctttattctggttcccccaagtttttttgaaacgtccaatatatggtcctctccttgccttgagtttgcgacgtgacgacggcgcattgggcagaaagccgtcggctgcttaggacaagtactatgggtattcaagcacaagcctcaatatgccatataggactaaatagtaaggtggaggagagaagaaggatgagagagaaatagtcacctctcatgcaaggggcagcccctatacaaactttaataaacatgtgagagtgttagaaatattggggattgtgtggtagaggcaacctaggccctgtttggttccatgggctaaacattagccctcaccttttagccctgaattagccctcaaggatataaacaggtgggctattttttggctaaagtgaattagccccgctcaaaacattagcccctccaaggggtgctaatagggtaattttatgtggggaccataaaaagcagctctctctctccttctctctcctctctttcttctctctctcaactttttagtcttgaattagcccatggatccaaacatgccaccctaggctaatgcttagcctagcaattcatgactaaacattagctctcaaaattagacatgggctaatcttccaaacaggcccctattatacatatcacctcttaaattaattatatatgtcatgcatgaaattagatacggtagttacctctactataaaaattgcccttacgggagcagacccttttagcctttcttgttatctgtgggcgacgctacctggatttgaataagacggacggactgttagtataatactctgttaggatctaggatctattatattcgctctctttaccgatgtctagaaggatatgcttccgcgttctattcttgcgactcatcttctactacacctgaagtcttgattccagatggtggggttggcaccctattcctctgcttctcgacggtcctttgcttttcctgaacggagcgcgtgaaatggacttggctggtctgaactctgaactctacacgagcctgtgttgccccgtttaccccatccatgatgcgccaaaccgtcgaggcccaaggatgcacctcaaaacctactgcgattcataggtccaaacgtgtgaaatcacacatactatgggctaatagtaaaacacaagttttgagcttttctgaaagacagtgaggtgctgcggtaaccagccagtcggtgggcgctcatgtggcgagatgcgctgaggcgagagggacgcagccaccaatgaccaatccacgcgccccgctcgtgagctccactccagcgccgccaagtgctcgcgatgggcgcggcatctcacacctgtcgacaccaggttgggagttcgagttgggaaaacgcccggtggcccgaggagcagcgattccgcgaggacgcgcacacgctttgcatccgagagcagtgttgccatgacacgcgcgcgcgaatcaccaatgcgaatgaagaaccgtggcgtgggcgaccgtcacgttgttccctttggacagatgagcgctgatttgctgaccgtctcatctcattgccttctatgtagacaaatatatttggatgagctgatccaccatgacccttttaaccacacgacaatgcatacgcgattgtttgctttcgaacagcgtagacaatttttttttactggaggaacaacaatgtgtacaaatttgggctccttttattttaagtgttgaatctagagaacgtgatagagatcaaatgactcattttggtcatattatatggtcaaaactcaaaatcccacaattaaccatgacgaacacctgtcaatttcgatgtgagaatatcctcctgagctcaaattagccacccactattcacaggttgctactctgtgtcctaaacctgacacgaataagcgcctcataagagcatctccagcagagaccctaaatacaattcttaaacagtttttaggtgctaaggacaaaaaataaactccagcaaagcccttactatatgccctaaaataggaaggacctcaaatacccctccgcagcccttaggcctgggggctgtagaccgaggccctatcgccgtttttctacgcgggaggaaatttcctggcgtgtggtgtctgtcatccctcccgcggaatcgctgccacggcgccgatcttcgccagctcgctggttccgccgctcgtggccgacggtgcgaccatccagtacctccaccggccactgcttgtcgtccgcgtgcccgcttgcttgttttttcatggtccttgatcagttcgcacactgatgcactatatggtaaacaagaatgttctgaaattcatgaccatcagaaacatgttctaaacaatcctgctctcgattggtttatggctaactgtggttctaaatgatcatggcataaaaaatattgttctgttcctttaaagtttgtggtgcttggtaggttgagacaattaggctgcttgcaattatgcagtagttccttcaaagattattctgcagtgttgttcttttgtgtcagttgtgagttgaagtttaacttcaaggttttttttttctaggaggatttaagctctttctgaagtttctcagatagattagattggaaaaggtatagagttaattttatctattgattatacttcttatttaattgaactacgtagtgtcttgaatacttgccggtaggatttcactcccatgtttgagaattttgaatttgaattatgatatttaaaattatggatttgaatacaattgaattctatgcattagaaatatttgtatttgaattattactatgttaaactaggtgtaagcatagagtataatcagaaatacaagagaaaaagaaatgggggctaagaaatagggtctgctagtagagttggagataatttttgaattcttagtaaatggggacagccctcatttaacctttgatgactctaaaatagtgactactgatggagatgctctaagtcataacccagccatctcatcgttaatctctcggcggccggctggcagcagaaaccaccataccagaaaccgctcttctttccccttctccacgcttcgcttcgcttctctcctctcttcgccgagaaatatttaaaccgctccccaccggccacctcgtcggtttcgtccggtaagagaaaaccgtttcttttttttggcgaatcgcattcgcgcactaccaaacaccaacgcgagctcggaaagctactgatggcgtctcacatcattctgccgaaggaggaggaggcggcgctgggcgtggcggtggaggaggaccacgactcgccggcggcgccagggtaccagcatcagcaggggccgccggtggcgaaggcgctgccattctcggccacgtgcgtgcggatctcccgcgactcgtacccaaacctccgcgccctccggaacgcctccgccatgagcctccccgacgacgacgccgcctacgccaagctcgaggagggcgactacggctacctcctcgatgacgtcccgcacttcacggactacctctccgatctccccgtgagcgccgacacccctcctcttcccactcatccttgtctcgcgctggttgttccgctgccagattcgacgcctgcggtgaaaaaaattgcagtatgcagtgctgcttgagattttgatggttcttttggagacgcggatctcgtgaaagctttagatttagttctgccatttgtgtgaggtggagctttatttggatggttcctttatttttggtgtttttggcgtgtcatgccggggatgggttctggaatgagatccatttcggttgttctcagttcattagctggatatttatcaaacagaaaaagtcgcattagtgtaggacaagtacagctttggcgattcgtacctgcaattgaggttgtggcgtggatctcttaattacttgtgcttgtaggtatctggatggaggtttgatctggtagaaatagaatagaacatagcttcactttggaagtaacttctgttaattggctggctggctgccttccctggctcctataaatcagctacatgtgcatcctttgaacgtggaatacgcaacaactcatttgtttgccttcaattatattctgaaatgttgttttcaaggtgatgtcatgggggttaagctaataattttctcgtttactgtccctggcagacttttcctaatccactgcaagatcatccagcctattcgaccgtcaagtaaggcttctctttcggtttgactttgctatcccctttggtcaacctcgtcatatttattgtgaaatgttttaagctaaatgttctctttgtacatttaccaggcagtattttgtcaatgcagatgatactgtacctgaaaaggtgaaaaaaaaaagtctccactgatgttttgatgtgtagacgtaattctgaatgatactcaccctgatgttttgccatcacaggtggttgttcagaaggacagtcccagaggagttcacttccgtcgtgctgggcctcgtcagagggtaggatgccttggatatatgcctattatcatttaggggcatgcattacccacatttaggctgacacaaattctcaaatcttatcaggtgtacttcgagtcagaagatgtcaaagcatgcattgtaacctgcggaggcctttgccctgggctaaatacggtcattagagagttggtgtgcggcttgtcccacatgtacaatgtcaatgatatcttcggcatacaggtttgaaatatttccagctgacctaaataccaaaatgtattatgtggaatatcacttagtaggaattttgaatggcgtgttctgctgacctataatgaggaaatgatttcaattgtattatactcaaatagttgcaagtgcgatctgtgaattgtattatatttttgtgcaaacgactaatgtgaaatttgtgccagctagtagttttgccatgagagtaaaagactgtagcatgcacattggtgatgccaattttttaactgcacctttcctcttatttctaacatgctataagtaattctgtagaatggatacaagggattctattcgagtaattatcttcctatgacacctaaaagtgtcaatgatatccacaaaagaggtggcacagttctgggaacatcacggggtggtcatgacaccaaaaaaattgttgacaacattcaagatcgtggtattaatcaggtaggtgttgtaactatttttcttagtataataatccttattttgaattttgggtaaaatatgcctgtgtactttgtctaggtatacatcattggaggggatggaactcagaagggagcatatgaaatatataaggtaatcactatcatgagtaacttccatatcttgtagagacctccagacattgtcaaacttcttcatctgttcatgtgcactctggcagcaggaatttgttgagtggtgtgcatttggcttaaaaattgttgtatgtgcagtgtgcatatcattagaaactgagggaaaatattgttggagttttgtttttcagaactgatttttaatttgatttttccctttttcaattggcaggaaattcgtagacgtggtctaaaagttgctgttgctggtgttcccaagacaattgataatgatatagcggtaatttatgattacaagcgtttatttttgcctgcaaagaagcattacaactcttttgatactgcacaatttttctattaaagaagtactgattttttctgtacattaaaactcaggttatagacaagtcctttggttttgatagtgctgtagaagaggcccagcgtgccattgatgcagctcatgttgaggcttcaagtgctgagaatggaataggcttagttaaactgatgggtcgctatagtggttagttttctatatcagccccatatacgtctttgctgcagctgcattcttacatttctctgctcccttgtttctttaatgctttaattggataaatatgcacgtaaaactaagagaactatattttgcttatatactctaattcaagagaactgttcatgaaatgtttattttctgcctacagaatggaattcacatattcctcatgtgaatccatgatgaatttctaacttttttgttttagttatttcattatactgtccttattccttttctatggtaccttgcagggtttattgcaatgtatgctactcttgcaagcagagacgtggtaagttaatgctttatatctatgtcgttctttagtttcttcgagtcaaatattctgtgtattcatgttctgggtgcagtaatgcattggaccacctagcattcttcttctccacgaatggtacctcctattcattgggtttctctgtcttctataggactgctgcttaattcctgagtcaccattttatttggaaggggagggtggactgtttgagtacatagagaagaggttgaaagagaacaaccacatggttattgttgtagctgagggagcaggacaggatcttattgccaaaagtatagctgcagcagatcaaatagatgcatctggaaataagctacttcttgatgttggtctttggctgactcacaagattaaggtatgcactgtctatttacttgagtttgcatgggactgatccagttcgattttgcattttgttgatagtgttgcttcacatgcgctttatgcattcatcttttaaatttccactaaaactgcaagaatgcttgctgaacaccaatgcatgtggtatttgcttttgggtttggaaatataccataggaaaggtagaaattcatacctaagagcagcattacattaaacaattttaactataaaagccatactttttatatgttcgcctgttaaaagcgatgctttttatatgctcacctgttaatcaatagaagtaagtgtaggttgaggtttacgttttgtcagttcgatgttcaatcacagttaacatatttagccagctgtatctttatgtgagtgtggtcctgttcacggattgcattcatctcttgtatgtatgttctgtaattcataatagattaggtgcatgcgtatgtaaagcttacatggctctgtgctcagtgggtcagctgcctcggtgttgagccatacattgattttgtacagtgttagtatctcagtgacccattatgtttgtagttgctatttttagtatcttatggatttccaggatatcataaccaattaattaattacaagtttccttgaagatttctctgagattttttttttgcatgaattccttccaggattactgcaagaacaaaaagatggagatgactattaagtatataggtaaagatcttgtttttatgttcaattctcgatgcacatgcggagtgctagtttgaagtactactttttatatgtatctgagtatctccctatggaatgttgcaataacagcctgttatttctaatggcagatccaacctacatgatccgtgcaattccaagcaatgcatcagacaatgtctactgcacactgctggcgcacagtgccattcatggggcaatggctggatatagcttcacagttggaatggtcaatggcaggcatgcatacattccatttcacgtgagtacaaatttttgtattaccttaattttctccggttcccagattcaaacatattaccctcaacaattatcatgaattaaatattaccctttaacagttcgcatgacatcaatttttgtgttctgacaaacagagggtaacatcaacaagaaacaaggttaagataaccgacaggatgtgggcaaggctgttgtcctcgaccaaccagcccagcttcctgagccagaaggacatcgatgccgcaagagaggctgataagctagccagcaaatcgcctgtgccagttaacaccaaggagcacggagagaatgtaaagaagccggcaaatggtgagaaatagcatgcctttgatgattctttacctgtacagtagctacgctattcggctgaggccatgaaccgatcctactcaatttttgttttcgcggttcatctccgatgcgttgcaatggatacacgcgaaaaggatcttgatcgtctacgtaataaaaaacaccacctcatatttttgtatcagagaacatgtgtgtagcactacgcactttgcaagagttctgcctattatttcggtaagagaacttcttgatttttgtgttctgcaaccattactttttctctgaagctaagtttgttttccttaaaaaaggaaagtaaacaaagataagaatagaagagaagcttgccatgtttttttcaaatggccgtttaattgaagatggtcgtgggctcgtggccaactcggcaactacttcccagctgttgcatttgttcatcggaaaattgttgatgatccaaccatgagcctggcacgtcaaactttggccgttgacggaaatctgctcccgcctcccatagaaaccacggatgcctcctcgcgcgcggcgcgaaatcacgagttcacgactacacgagggccttgtggtcaccgtcgccggccaccgcgcgcgcgatctctcttttttccagccgccgtccatgcttctcctcgcgccgttgcttcttcagccgaagaagcgtcacgattcttacttctgcgcagttgatatgcagtagtttggccctcacatgctctatctttctcatttcctcgatcgctcacgctgttactcttttccatgcatgcgtgcgaccaggagaaggctccagcgacgccgtcgtccaagagccgttcgccaccacgcctacttcgccggctgccctcgccgccggcgccgtgtcgaatccggcgctaacaccagcagcagtgtccatgtccttctacgacgtgaacgctggcgagcagccgagccgagaggacgaagccccggaggaggtggtagaggccgctgtggcgaacggagcaccgacggccgtggagaagcataataagctgtactctcccgcagaaacgccggcggggagtgggacgcggccgcacccaaccgcggacgccgtcgccgagacggcgggggcggcgcccgatgacgtcgacgggtgcacgacgccgccgccgcggccggtgcacgactcggaggggtccgacacgcagagcgcggacgatcacggcagcccacagagggagaagccaaggacgacatcgacggccgggggcgtgaagcgggacgtggctccctcctggtcgtcgaggctgctcgcgttccggtcgttctcgcgggacaagaaggcgaaggcaaccgtggacgcgcggccgccggcgcacggcaaggcgcgggatgagggcgatgagcacaaggagaagggcaaggagaggcggaaacggttttggaagtgaaggtggcattgatgcatgcacagttgattttctttgattgatttgtttgcactccatgaaataagtgagggctgtgatagtgtaattgtgatattacagagtactaatatataatcattctttgatgcaatccgtgttttgtaatcctaagcctttttccactggtttggttgcagctatgttactctttgaacacatgtctggcggaataccagaacgaatcatgaacacggcattctagacgaatatatcgcagtgaaactcggagaattgctcttgccttctcgctagaggtgagtaccgagtagaacggtcgattcgtggaagcgctatcccgcgtaacagcgccaatgaccagcgtgtgtcgtccttcgctttcacttttcctttcccctccccagcatacatgtgtagtgctcgatcaggtcgccagcgaccagcctgatcaaggctgcaggatatgaaggtcactcgtcgctggacaagatgacagtatagaatttctacttttcatgatggtgcagggggtagtagaattaatctccgaacctcgccagccaagagcgcggctaactgaaagtctgaaaatcaatcaagcctcagagtcacactggcaccccaccccacgccgtgatgactaccttcccgtccccaccacctcctcctactccggcgaagcggctgcgcgacagcgcgaggagaacccgtccgccggcacggcacgcgcgctcgctcaccgggagcgtggcggatcgaagcggaagcgtgctgccatgatgtggtgggtgtcagcggcacaaaaacggtatgggcatttgcaaatttgccacctgttttttcaatattgcaaggataccactcgaatgataattctagtggtatttttataattttctagtggcagttttgtaataacgatttgtagtaaatttgcaattgcctatggtatttgacgatgggttgggggttcagggaattgaactccgaccccacaagattgatttactacgagtacatgttaaggatggttgggtgttgggggaaacttcgacccccactatgttatgagaatagggcatgattgatttgatttgatttactctaatttgatgcaattctttcatgttaagatggttgggattggggaatcaaacttcgactaggttgtgacatgcattgtgcacaattgattttctctgctttgatgcaatcctattatgttaaggatggttggtttgatttgacaattcatttgagactaatcgcaataaaatttgtgttaggaccaatcgaccaagtatagcctgatcaattacagtggcatattgttcaaatatatcttacattaaacagctaaaacatataaaacccttctccagcaggcgaaggctagcccccctcccccccaaaaaaaaaaagaagagagagagagagagagccagggccacgccatgaagggcgagaaaccaacacttatcaagccaataagttggaactccgttactttgatccatacttggtggacaacgttagctagtacctcagagatgcctaggaaaagagtctcctccgtgttgcttaggagatatggaaatatttgatccatacttggtggacaatgttggctagtacctcaaagatgactaggaaaagagtctccaccgtgttgcttaggagatatggaaagaaagatatgacaacgttggccagtaccttagagatgactaagaaaagagtctccaccgtccgtgttgcttaggagatatggaaagaaaggaatcagagtgtttcaacattttttttaaaagtttttttacccgacttctatatccaaccagatatattcagtttttttttaaaaaaataggaacttagttacggagatttgaactcaggaccttggggtgccttttttttttttttaagttaagaacgatttgaactcagaaccttcggatgctacttaagtcactgcaaccactaggctacatgctctttcacagagtgtttcacaa

SEQ ID NO: 9978 - DNA, 139468 bp, Oryza sativa
caccaaatgtctattcacccaggaacagcagaaccagaacaacaaaatcttttatcagatggatgtgagttgtattatgaaggatttcagcagtagcttcatttcgctgctagtttttggatgaaaaatactctatctgggacatagtagtagtgcagcaatgctatttttgtcaaataaatacttaaatattttataagacatatactattgttcaggtatttgaatagcttcttagtataacagaagcttgctttgctgtagtattttgctctgctctgctctgcttctgtcagttgatccatttcttggcgccaaaaagcatgagctttccctctgctctatttttgttctcgcgcgctttgcccctgagattctatttgctgattttctttgaaagagaaataagtgattctgctgattagtagtccctaattaatcacaaatggtgggaccactgcatgcatccgttgataaaaagatgtgtggcagggatgaatgtaacggcaatgtttgccgtcagccaaaacggcagacgatgtgaacccacttcggatcggttagcgtctggttttctggagatctgatctacagaagtttccttggaatgtttacgggggagaaaaggactcggttgaaaaaaatcctttataaggatcgatttgctaaggttttgatagcgttgcagaagatccaatccaaggagagggagatgcccgagttagcctacattgtcagagaggttgcagacttgctttctggaaaaagggagattttgctttggaaaattcattgtagccaaaatcttgttagtcatacgctagccattaagggccgctgtgagtccctttctagattttgtttagaaaatgattattcttttatttctcatcttgtaagcgaggactattatcctgagtaatatattccttttcctcgcaaaaaagaaaaactaatttccaggtttagatactattcaaagaaatgttcttctccgaatcataaatatttgatttttagtactatatctgaacaaacttttgaaactttaacaatcagtaattttttaaatatatagtttaaaacaaaaaagctatatgagtaaatcgcattggcggtacacgaacttatcaggtatgtgtaatctagtgcactaacttataaaacaattatttgagtaaagtgcattagcggtccttagacttgtagggttgtgtcatataggtccctaaactctcaaaatacatatcaggtcctaaaacttgtcaaagtgtatcatttaggtcccaaatcgatacatcccctctagaatcctacgtggtgctgatgtggcataccacatggacgtgacgtgtcctttttattttttttcttcttttatttttctttttcgttttcttctcattcttctttttttttcctttcttttgctcgggtcacagagaaaggagacgaaagggaaaaagaaaaagaaaaaaaatttaaatgggtcctatttgtcagtcaaaatgatgccacggcatgtccatgtggtatgccacatcaacgccacatagaatgctgaaggggttgtggcgatttgggacctatatgacacactatgacaagttctaggacttggatatgcattttgagagtttagggacctagatgacacacccctacaagtttaaggaccgcccgtatactttactccgattattttgttgtacgatcttacctagggtgcacgaaccaagattagaaggacattattacatggctaatcttatagattttataggtgttgattaggatactatgcaaatatatactcactctgtctcataataaaaaggattttggtggatgtgacatatcttagtacaataaaactggacagatagtctgttcagatttattatatcacatctatccaaaatcccttatattatgggacaaagggagtatctaaaaagtttgccttttaggtcctgttcgtttcttctaccatcataggattaaattttggatacttgtggcgcgcttttcaaactgctaaatggtacatttcgtgcgaaaattttctatatgaaagttgctctaaaatatcagattaatccattttccaagtttgtaataattaaaactcaattaatcacacgttattaccacctcgttatatgtgaaacacttaatctttatctttatcttcatcttcatcttctggagatttaaacaccaccttagacatgcatatattcagtaaaaagacaaaatgaggcgtagtgattatatagaactagacaaagatatgaaaaaccgagctatgatacatgggttagaaacatatgaaattcatagtttcaacgatgaaggaaagtagagatgtttataattatagcttgtcttatgcatactcactgtatgtgtgtacgtcacatcctaattaacatcaacttgataaaattaacattaccaagccattttggtccttgttcacacgaattagacaatttcgtgtatcaaagcgagcgttctataagttaggttaatgtactaaattacattcacataacaaggttatgtatcaccactacaatttactcaaactatatcataataccatcaactcatttttataaacctgtcttactataaaatcagtgcccaaagtatcaaaatttgaccataatttatcctaaatgtaaaaaatatctacgatcgattggagaatacatataccatggcaaaaggttcgagattcagatagacaaagaggcaattgcaaatttaccactattttgaatcgttattgcaaaactgtcattagaaaattacaaaaataccactagaactattattcgagtggcatccttacaatattgaaaaaaccagtagcaaatttgcaaatgcccccttagacaaaagatactcaacatattccagggaatatacgctgaagctcgaaatcccgttaaggttttgaaccaaacactccatcctacagaaacgaaatttgcatgctcatgcggagcaaacaaataatgcatgattttttgcgtaagcctccaaaactcgtactgcagttctccaaataaatgggcaactcactgatcactactgacgatataaaagagcccgaaaatctgcgaatcggagaagagatcccgcacggacacggtgggccggagcaaaacacagaccgttggatacgaaatggacggcccgaacgagacccaggatataatacgcagcgcagaagaaaatcaaacggaccaacacgaaaaccctcctcctccgcccaaccccattccttctcacccactctcttctcccgccgccgccgccggaggaggcggctcctcgtcgtcggcctcgacgaccatggcacggatcgtgtcgcgcgccctcccgttcgcctcgcgctcgccgcagctcggcgcggcgctgatacgctcggcgccgatgcgctgcccgcccctccccgccgcggcgcccaccgcctcgctgctctcctggcgcgggttcacgccctcctcagagccctcgcgctcggcgccgccgccaccgccgctgccgatgccgcccttcgcggggttcctcgccggcatccgaagcttccgcaggggtaggcgcggccagtcggcggcgaggcgtgcgcagccccaggaccccatcccttcaccccctcccgcgccgaaggagagcgagatcgagctctacgcgcgaatcggcatcgacgatgacacgcccgaagaccccgaagtgctggtacgtacgctactcgtggaacttctgtgccaataatatgtggctgttttagatgaagtcaccggaatcacagattgaaatgttcacaagctatagcgcggcattctctggtttactggatgatttatgctcaatcgttgttgtactatttctaatcaatgtagaaagtcctgacttttactcttgtgatttctgctccagtccttgtatgctaatttatggttagcatatcgtaactgttgtcccgaattggttgtgtttgccattcgctaaaacgaattgcacccttcaggcagctgagcatacactttctttgatctagaggtaaacaagtgggcaatgtagtcagaaatcttcgtttcaaaggaagaaaggtagtcagaacctaagttagcaggtattttattatgacgtgatgcagttttgaaattggtttaggcttaggcatttgggtatcggattatgtcgttttgttgtttgattttattcatcaagttatagtggaattccttggttgattttggtttagtagtttatatccctccgagcaatctgttgcatattttgccaataaaatggtgtgctagaaatgttgcattttcaatttgtgacgttttttgtttacttatgcttctggtaatgtgaatgcagaacattgtagaaattctaaaattaaatgttccgatggcgatgaaaattgcactagatgggcttctggattccaactacaaaacacgagacacttcaataagtgatgtcgggaggtatgataaggttgaagtttctgtgttgctatgcaatgacaacttcatccagaaccttaacaaagaatggagaggtgaagacagctgtattgaaatgctctcaatgtcacaatacattcctgatcttgatgttcctattgtaaggaaaaaaaatcctttatttgaatgctgttcttttagacatgccatcttgttgtattttctgaatttattttctcgcagctaatgttaggtgatattgtaatctcagttgagacagctgcaaggcaggctgaggagcgaggtcatacacttcttgatgaagtgcggatactagcggtatgctcacttgcttattgactgtcattagccccctaccgtttagaggtttgaatacacatgttatctttttcttggtgaatatccaacttccttttaccaaatcacttaatcctatgttattctacacatactaaaacacagataatatggtacaaaattgactgtttacttactctgtattaggttcgtggaattctacgtcttctgggttttgatcaccaaacaagtcatgagtctgcagttgaaatggagaaggaggagcagctcattttgaagagtctaaggtggaaagggaaaaatcttgctaagagtgttcttgattcgggcaagcgtcatacagaaacatcggatggtgtgcttttttgagatttctgtagttataatcctttccattattttgatcttgaaaaggtgctttcacacacatgatgataatgtagctattgctgcctaagaatgtttacagggcaagtgacaagtggtctaaaaagagctggaagcctaagattttatagaccaaaattcaaatatatcttctgtgatatggatggtatatcatttgctctttgcatatatcactactctagacatgtgtttatatttaccagtgatattttttaatttaaaaaggtacactgctcaacagtaaaagtcaagttacagcaaggaatgcagaagctctgagggaagcaaggtcaaggggagtaaacatagttattgccacagggaaggtactacaagttcttcatttctgtaataacttaactgtcccttgccagcccaggccagatcttctggatcaccctgtttccaccattgctgcatccttttccaagccaagccagattcaagtctcaattataaaacttgcattacgctaatcttggtagaatatgttaataaaaatcctctatgaggacacttgatgtttattgttttcattttatgagctgaaaggaaaaaattactacaagtagacaatcaagaataccctctgttctgccagcctatttacgtttggccctgtcatatttcagtaactcaaaatgctgataattgtttctcatacatgttcattttggaaataggcacggccggctgtcattgatgctctcaatatggttgacttgtctggaagaactggaattgtctcagaatcatctcctggcatatttcttcaggttggtggaaagtattcatggacaacacaatatttcaagaaataactttaggatacagtggtgaaaatgcggcatctttacacttcctggtagcatataatctaataggttgcaaatatgctaatggagatccttgtatcatatttttgactgaagagtgcatgccacttgcattgtgacctttatggcaccgtacttaaatctgtgtaaaatgaacaaaattattgaatgttttttcttttactcttaatttacgcccttttttcttgaattgagttaaagcgtgaaatttggttaagtgacagggcaatcattcttacccccctgcattttaatatctgttgaatgcatgttgcttgcaatacatccttttggtgccctaaataaacttttgatgaaatgaaatatagttgaaggtttatttccttttgcattttaattctttgcctttttcttgtatttgttgagtgaagtgcaaatgttagtcatgagataagtcaattattcttacctccctggtttcaaaagctggctatactgtgttcatagaacagaaaggccgctgctgatgttgcctgtgcagccttgctaattcgaagcttacattctacattttatggaaaagaacaaaaaaaagcatgacagcatcctttgatcaggccctagtggtctgtgcttctgctcagtcctataatgtgctaccctaagtcaatgttaccttgtattcagtatattaatatgcgctatgcctttattttccgagctcagtcaatattaccttgtaacatcctttgatcaggccctggtggtctgtgcttctgctcagtcctataatgtgctaccctaagtcaatgttaccttgtattctgtaatattaatatgtgctatgcctttattttccgagctcactgtttcaagactaccgcgttgttcctatccagtagataagtgaaacagtttattgttcatgtgtgcatgattcccattctcatcagattgatgctttcatctgtagggcctcttggtttatggtttgcaaggaagagaaatttataaaaggaatttagatcaagaagtatgcagagaggtaagctacatttttcttccttataggcattgagaccataaatgtgcatacaagaataatttagatccaaaaggctacactttcagggtttgcctacttaatgatatatcacctgggatgtatctctccagctaatggactaatttagatgccctcttatgtccatttaatatatagatgttagctggacaatgtagagtctatctttctactccatccgttccaacatataagaatttctgcgtgttttccaaaatgaatctggtgggagggatgcccggatacattttgaaaaactcgcagaaatgcttatattttggaatggaggtagtaatagataattttattatcttagtatccatcattaccaatttaagttagcgcttgcactgtgtagtgacactattggcttattgcaggcattgttatattctttggagcagaaggtaccattagtagcatttagccaggaccgatgcttctctatgtatgatgatcctttggttgattctctccattatgtgtatcatgaacctaaggtgtttgctggtccttggtcaagtaaattttagctgtcatattcctattaatttgactgtagttgtgactcttgttgcaggctgaaatagtctcgtctattgatcagcttttaggaacagctgagatacaggttctgtgctctcttaacaatttttagaacactttcatgattagttcagcatgaatcattttaatgttcctttgcttaaatactaagagcatccgtctagatgacattctggttggtgattcattttctcaaaatttgttccaagtggttggttcataaaataagaaactactggtttagttactataaaaatacgggctttcttttggacagggtgggggagggggtgtcctagtcctaccatgtattttacttaaccataaaataaattaggttaatatatcttatacaattggaaccctttaaatgcagttattactcttctcataaaaccacatcgtctcgattgtttctagcctttggatgattgatctaaggtgcagactacacagagcaataaagcgagtcttctagctacaaactataaatccaccttgcatctcatgtctatcgtttcgtcatgcacgtttctggcagcaatgttgtatattacaatctcaaccatttggataatcaaagattaatgttcattgaagcaacttgaaggcaaaaagatctgcttcgcttaattactcaatagatgtgcaaggcttatagaaatgcgcaaacagccactatatgaaccacttccaattgaataacaaattgtgatttgtgctgctgtcaacggcttccgtgatcgaatgccactagtcaatttctcaatatgaaattcgtaatagaaaccaatttatgcaacaaacaagttgctcattttgactgtggctgacattttcatatatggggattactctattagcaatttgacgatgctaagatgtgtagctgtctagctgactgcattataattttcatgttcagaaagtgctcttccttgaaactcctgagggaatttcttctgcattgaggccattctgggaaaaggcaatagaaggaagggcccgtgtggttcaagcacagcctgatatgcttgaacttgtacctcctgcaacttcaaaaggcaatggggtgaagattcttttggaccacctttgcattagtccggatgaggtattagtactttagttctctattacatcttattgcatgacggaatacaattgatgtcatcacctatctagttctttcaattatgaaaaaccgtcatttaaatcttggtcatacatatgccacaaaataaaatatttgaagtctgcactgagttttccaaaccaattgcccagtgatctagcggtataagtagatttaaaatggatattagacctctgatcttccatcaaaccattgaaagcccacctgcaatccttctaacttcaactttatttttttcttttgcaaggtaatggctatcggggatggagaaaatgacatagaaatgctacagctagcatcattgggtgttgcgcttgcaaatgggtctgagaaaaccaaagcagtggcaaatataattggtgccactaatgatgaagatggagtcgcacaggctatttacgactatgctttctaacagctgctaactctaaggcgtattgggataggattatctactctttggttctccccagtgccctggattcaccatataacaagacttgatcaccatctatccacaagataatactgggatgtgatctgaagccctgttggagtcaaaacattttgaactattaggcttcggttcattttttggtttggcaaacattcatgaccagccatgctacaatttgtgtgtctggaatatttatagaattgaattccttttgttttcatctttgatgaccaaaggactcccttaacgttaagctgttcttcttcttcttttaaccaaggcaattggatgtactgcagacatatgctttaaatttcgacagaaggctgttcatcatccccaggcagtccaatgaaaaatttcattgtagtatttacaaacagaatcgatgtctccttgaacaagacgactctctgtatatggcagagaacgaaatcctcttacatccgtgacaggctaatatgcttgtcaacaaaatcctcaacgaaaaaagaacagagatgaaaccctgaccccccaaaaaaaaaacatttcgatactgttcctactgatgatatccgcttttgtttacaggaattgggggaggcctatagagcatgcttttggtgttattcctggccatcagatttgcgcaagaacttccagacttcttggctattgatgtgctgtttgcgccaggtatatgacaagcttcctggttcccatccagtgctacatagctcttggatgatttgatcttcttgtatggattctccttcttgcgtagatcctctaggcatctcacctcagacatacatgcaaaagattgagactttccgtcgtagtatttggataatcctttcctgcaaagaacaacaaagcacttgccctgtgagaaaattttccttttgctagtacatctattgatactaatatgcaactcttcttccccaggaacttacttgacagggagttgtgccttcatagatgacagatcgtagaggctatctgaattcatccttctcgctggctgctgcgcaaactggtcttcttgagcttcagcttcctcgctgtctgaaaattgagcctcatcatcggagtcgcctgagatggacgatgatgtctcgaacaagtcttcatcttcttcttcacggtatactggaaggaccgcagctccaccgaatttgcccatgctcgcagtttttctggcttctggaacaaagacaccgaaagaacaggtacgctttgtgtatagaactatggatatattcttcttcctctcttgcttcctctctttcacaatctttacaacgtccggtggggagggtgggtgtatatatagctccagctgaaatgggataacgctaagctgccttctttcaaacactgcacagtgccctttgactaatataatcttacgcaatttgcatccatgacatcacctatttgttgtgtttacatggactagttaggtcttttccagaacactgacatggacccatgagcatggctgcttgtgtgcctttgtcccagtttttgccgaaataaaagaaagtaatgaaaaaagagcgtgaaagttggttggccacttccacatgctttcccggattctgctgctggtacccctgatctgatcttatcttcttagtttgttgaatgggacccagatttgttcttatatccctttggcaagttggttttctgagactgacttgtaggccatggcatgttatggtgaggatgatgcctcatcatgttaattcttttttgtggggagctgagcgaggacacgaggcgcgctactgttggcttatgattctcgttgcaggctgagtcggtggccgaggtagaacgcaactagatctttcaggataaaccttttcattacttaacccggagtattttggggaaatcacgctaatagtagaactttggtgccttcaattttttactataacaacctgttgtttttctactttctgaacagttcgaaatggtgagatttctaagtagtattaattccgttacgtcgacgagggaattacggctcttttagtccttgataactgccagaaaatactcttgtgcctcctaattcgggacaaatttcagcatacgaacagtgtgagtggagcactagctgcacaaggggtcctgtaagttaactgttaatttacgtaatctcgaacagtcttagctttcaaaacagagacctttttcctcatttccttcaggatcactgctcactggttccccacatactcatgtttctcgtttcagcaatgggtaaattgagattccatggacccccaatcagagttcggtgagtaacacgtgtatggttttccgcatgacaactgtgattgcacttcgctgtgttacttagcctccattacacgcaattttgcgagagaaaacgagaggcaactaacatacgtccagcgctcgaaataaagttgtattgcatcgcatcattggtaacagtgctaatgcctgtccattagaactcactagatgctgctcaacttgagctgtgtttagttcagtgtaaagtttagattttggttgaaattggagatgatgtgactgaaaaattatgtgtatataacaggttgatgtgatggaaaatgactgaaatttagatctaaactttggatccaaactttagatctaaacacagccttagagaagccgatacacgttcctgcggtaggatactgtcgatcttagccacattgtcatgtatctggggtttctttaagacttgagaacttaatcaagtattttgatgtagatagtataatctacaaacgcatatataattcgacacgactaggacctaacccaacgcgacgtggtgagctgttcaaaaccggacacctgtcgcgcgatccgtgtacgcgccaaggtgcatgttcggtgggcgaaaccaacaacagcacctcgcacgtctgccattaacacgaactcctgataataatctaaaaaatgcttttataaaccgacgagacagaatgccctgggtacacatggcacggacagcatttccggggacatggccacaggtttgattagtggaccaacaaaaccggcgacatgctaatctcttactcgtcatctcgtgtccgcgtgttgctctgcacgaaggctgtctgtccacgttctagagatgcaaattgtgttgcagatcaaagcccagaaatgcgctcctgctgtctttgcacttttgatcgcttttttcattttgttctcgagccaattgcatgtcctaatccgtgccattaacctcagatttgtagtcaagggatggctgcttagaatctgtactatggatattgatgcccccttatccttaatcctccttatccaggcgtggactgcttcaagcttcgcgtggtgggcaagatgaaaatatcatcccaagtagtgttccatgacgtctcactcccgtagcgaatttttgacttgtttacatagggtgagtttgaggaggaggagattgagaagattaggaagatatgcaaaatgagatgaaccattagcgcatgattaattgagtattaactattttaaattttaaaaaataaattaatatgattttttaaagtaactttcctatagaaaatttttataaaaaatataccgtttagtagtttgggaagcgtgcgcgtgaaaatcgaaacaaactcactcactttcttccgctgccgaacgcagccatattgtgctcgtggttggggaacggagcttctcttccggaaacattcaaacacgagcttgctacaagtattattgagctcgacgtacacgtacgagccttcctcccggctgcatctatctcctgtcaggtctgaatttttcctcatctagctaacctttttgttgcgacttaagactattcccaggtagaaataggatttttcctctagaaccttttcgtgcgttcaaaacgcgtcgaccctggatagagcgcaagccaaccaaccgcgctctgaccggcttggctcgcgcgcgcggaagattatcattggatttggaacaacacatgtttattccgctcactaaacatgaccggtggcctgggcgagagccatccatcatcgatcacccaaaagacgcgtttggctcgtagtcgtcttataatcccaagcgataagggttcgcggatcgtgccgggatccggcgaaagcgaccgagcgcagtagcatcgcgcggcgcgctgaaatcatgtggcacgaggccggagggagcctgcgatttttgcgtggaccacggctgtactacctgtccaggccgcgcgccagccgccgggaacgtggtctgcgcgcgctcggacgaaacgcgcgcatgtggatagctcgcggggatgggatcggctcggcgccgcgtcgctgttcgcccgatttttattttcgatctcttcggcggatctctcgcctgttccgtgcgaatccggacgggcgggctgaaccgcctgtgcacaagccaggcttgcaaattgcaaaccccgagacgcgtccgcgtctccgcctctcacgcgcgcacgtccggacgcgccgcgcggaacctgacgattttttttttgtttccttttccgtatccgaggggcgagggcggccaagccaagccggcggccgcgcgcgcgcgcaggcgacggcgtctccactcgtcgtgggcggtcgactcgcctactataatcggtgagcgatccatccagcacaggaaaagccggaaacccgggtcgtctctcctacagcgcgcgtggagagatgtaccgcggctcgtgtagggctcgtgcttggtcggagtctgcatgcgggatgttcctcttgggttgggtgccgtggccgtcatgggagcggactccggtgctccactgtagtggatgggcgaaccggaataaccaaaaagacgagaaggacgtgaaggctttgatgggcgcgagcccagtaagagcaacgtcaatagccaactattgactcaaaacatctaaagccaatctaataactcattcatacaataattaattataaaaatatgctacaccattaatatctggtctcacctctcatacacacgtaacatcttggagtccgtgttgcagctggctacaaatctgtagcccgctttcttctctcttctcttttcttctcgatatatggttatagccggcttatagcctgctattgtacatgctctaacagtggatgccttagggcacccacaatggttatctataagctctctacaacagatccatgtcagcatattttcctacttagaagagattaaatgaagagatagagcaaagctatctactaacatggaaatagtttatagagaaaaacaaggcaatggattagagagctatagatacccatgtagacataccattgaagtggtttattattaatttagtctattgctgagatgtacatattttatagatagcacattactttaccattgcgggtgctcttatgtattccgttgagacattgcaacggattcattcatgccgcgtgcgaatcctgcacactgtataactgcatgcgaatcatgtgtgctaggcatgtaacatactccgtatttctttgtttcagatagttgcgtacagggttcgctaaaccgttcaagatgagcttatcatatcacacggtttaacggatattacggtaaacacggttaccacaaaaccgtacggttattacgagatatacagtggtttaaaaaactttaaacgttattacacgtgataatcgcacaattttataaaccctaccatccctagggaaaaagtacatttgataaaacaacctagagtaagtgatataccagatgtggctatcaccttcaattttatccatatcattcaaacaaaaaataagaggcaacatatacaatatgtcacctctaatacacaaataccaatatctctaatactctcataatttttttaaatttgtgtggaggttgactcttgatttaggctcaaagtaggtttatagtagactataagtcaactgtaaacttacgtggaggagaaagaatttttaaaaaataaagaggattgtctccaatgcaatagctagttattcacatatttcaaatatattaaaggcatagggagagataaagagagagaagaaaaatagagataaaattatagctttttctactataatatgagctcatagttggctttagtattgaacttgctctcatcatctctctccccacttctctcctccaactcatcgctcaattatatgtgatatttttaggggcaatacatgaatcattataacacttgctcttagagcaggtacaatagcaggctataagccagctacaaacatattttaaggagataaatcagaagagagaagagcagcgggctacagatttataaccagcggtagcacgtactctaagatgcaatgtgtgtatgacaggtgggaccagatattaatagtgtagtatgtaactattgtatgaatgggctattagattgaccatatatgagttgaagctactatttggctatactattaaacttgctcatatgagattctatctttttaaggaaaaaagagctaaaggatgtgttcgttactccagttttttatcttttactttctcattttatttaaatgtgcttccgaacaaataaacaatgtgtttttcaaaaaaaaaagaaagttatagagttgcttaaaaaccatattaatctttttttctaagtttttatgaataatacttaattaatcgtgcagagcaatattattttccgtgtgaaaggaaagattcgatgctgtgtaatgccgaacgcacccaagcctctcgtcgaagcttatctaccgtagttaaattttaaaatttaaatgttaatctgagaatagaatttggtgttattttcaccgtggtccatttcttagcatttattttaagccgctaataatatactctctttgtttcacattgtaataagttaatctaggtttgtcatacgtcaaaaaaaaaattaaactcaaccaatttaacagaaaattacaaaaacatttctgacataaaataaatatactataaaatatattgattgatggattcaataaaaatactttagtgttatggatgctaatatattttttctataaacacccaaagtaacttataatatgaaacgaacagaacagagtagatgtgtgaaagtttttgctataaattattttggttatctttttgcatggcttatcagtcgtacctcaaaagatcaaactatatgcctttcaagatgaaccttaaggcactgttgcacacccgttaacgatggatttactgtaaaaaaaacagagaaaaaccacaacatataacccgcacaattaaaaaaaatcaagatccgttacaaatagatcgaataacatgtggatactttttttatatcatgacaaaatattggcaatgttgaagtctagatggaattggcatcaccaatattttagcaaactatttgtttgatggcatatttttttaagcaaaccaaacatttgcaaagtactactacgtccctcatataagttgttttagttttgttcttagttaaaattctctaactttgattggttttagattattttttaaaataatatttttaaaagaaaacttcaaatgttatagatattggtatattttatttttataaatttggtcaaagtccaacttataacataacttaagcaccttacatcggagataataggtgctactcctattttaaacgtatcctcagctcggcgctggccgaccagcggtccagcagtactatactattgcaaattgtaatgccgaacttatcaggcgagctactagttcaaagcttcccgtctagaacatacgtttacgtagggcagcaacttgcgaagtccatcctcgcgcgttttggctctcctcaagggcgtttcagtggggagtacggctgacccgattgttgagacgagtggcggtttcaactctcaactgacggaaggggagacgcacgcatcgtcatctgaccggccgctcacccgatgaggcgagcgattcgatcggatgggcggatcgattgggttgggttgcattggattggattaggcgcgggaatcaggtggcgacggacgggtggaagttaggacggcagcgcagctgcaagttggccggtttctttttgtatttctctggcgtggtcggctggttcagctagccggtcagatgcatggagcggatagagtcgatttctcttgtacgagtagatcacggaaggaatgatgatatttttcgtacataggcctagagaatttttagggcgtttcgtagtggatgggtcaatgtatggagcactgtgttttaataagacgggaaagctggaatccaagtagaaactcctggagacaccgccgcgccggggggacaagcatcgtgatcggtaggaaggcgatgagcgggagaacaacgatacttgcttaggtcgagtacgttagatcttccgcgttcttttcggcaattcggcccactgaacacggctggtcttgcggcccacagtagcggttggcaatgtcagtttattgacttcctgagctcaagctacgcctctctgaccatggaatcgtttttttttttctttctcgaaacaaaaatacaaacataaagctcgtgtacatacttcccattcgaaacttgagacaggtgaaaattaagcaagggcacgtaaaataaaaaaaatattaacgcatgattaattaagttttaattattataaatttaaaaatagatttatttgatattttagagcaactttttatataaggttttcacacaaaacatatcgtttttcagattaggaaaacatactaacgaaaataaagtacaatctgcatcttaaaaaaaagacctcacttttataagggcccctttgatttggaggaagatcatataaattttggataatttcaatcctatagtaaaatttcatatgaaaacctttgaaacaaaagattgaattatatgttatcttttgaaattcctatggaatgaacaatcctataaagattttggaggaaatttagtaagagctacaacctcttggaaatatccctttgagtctatcttgctcgtccgattcctatgtatttcctggagtccaatcaaatgatcatttttgtatttttcctatattttgcaattctctgttttgcacttatatttctattagaatcctatatttttcctattgctctatttttgtgtacctatgatataattataaaggggtcccgaaggaacacacgcacgctacctctacgtgcatttatgagatattgtactagcacatcttttgattaacaaaatcattataaacatctagctatcgaaggatacatcacctgtgatagaaataaatgaacgtatcgtgtaggatatgtttggttcgatacgatttaaaaaatgtagttttgaattttataaaattttgatagttaccaatccaaacatacgttaaggctcgattctgtttatctgattagatgatagacgatatatcattaggttttgtgatatttacaaacgaatgaactaattattataactattataaagttgaagtgtttttaaatactatcaaacttgtacataaaaaagttctgcaaaaatcgtacgttttactagtaattttgtagcttaacaagcttattcatcatgataatttatcctgtgaaaggaaaataccctacgttacctatcccaacttcccaagtcgtgtaattctgtaaattctctcacctaacaccacacaaaagtgacgaggctttaaacttaaaacactttcgcatgcttgaacgtgccagcttcaaagcaaacagaccctgtgttttgaagggagaaattgcaacatatggtgaaatgaacgacggacgacggactgtgcaatggcccattatctcactgggcccggtcgtgtgctgtttaaccgcagatagaggatgatgaatcttgttaggaagaagattattttacctccctcaagtaagagctgagatataatcgaaaccctcatccacaaaaccgggtcaacttatcgtctactgtaagacacggtttggacattggtttcgtcatacataacggaaaacacaagaataataaaaaataatggacctcgcgtgttagtgttagtaggttagaaaaattaaaacaagttatgtgacacccacatgtcaggagtactttctcctagcttgactcatccactcagtctctatgcatcctatcttggtggagaggagaagtgtaggaagagctcgccggtggtgcatgtagagaaggcggcgatactcaatggagaaagaggagatagagctcgtggccgaggtagtgcttggcattggaaataactagaggctcaacacctttccgaggacttcctcctgttgttccaagactgcctttatcttgggtatgctgtagcccctatgccatcatcgggcctagccgcgcacttgttagatcgatagtacggaagctactcacatcgtgcccgtcagttgccgctgctcgatggactagcacgattgggggcggcgaagggtggcaaggcctagatcgtgagaccatcgttgctgtgcttcccgatagctaccgcctgcgtctaccatcccaaaagatctcccgacgacgacgagtttattttccacctcttctttcctctatctccatctgccaccatggtcgatcttgtgcccgtggcccactcatcgagtactcgattttgccactgttagcgccttgctctttggcggcggcggcctgctcgctttcctccgtcgtagattgacgagtaactatgaactaggacaatgtgccatgtaggagtggataacgagccagctcgcctcggctcattaaccttaacaggctaaaagcctagctcagcttggctcgagagttggctcgttaaactcattaatatatatttaccaacttcacaatttcaattttacaagtttaccatgtataaatataataataaacactactatctccatcacagtattagtgcatccagaatataatgtgatatatcttagaactacgagtcttggatgcacttaagttaggacggagagactatctaataatgaattcactaaatacaaatagtctggatataattaaatgactaaacactacttaagaagcactaagtatacatgaagatatgacgatctcttatattaaaaatgcgtttgaacaaaacaagatagctataagcgcatgattaattaagttttaattattacaaacttgaaaaaaagatatatttgatattttcaaacaactttcatatagaaagttttcgcataaaacacgttgtttattagtttgaaaccaaggtaaaatcttcatttttttttgagaaaagaacatgacctaagtctctccataaaaaattcttaagcatatgttattttctagctttttaaaagagaatgatatatttgtagtcttcatatatccaagacttaaatgaagatgttgttttttggttttgtaattctaggttaaattgataatcagaaccgaaacaaccattttaatattcatttttttacatgtatacgtataattgccttttttacgtagtacttacatatatctacctataatagatcttgttatgactatacaatggattttggctatatatttatatatttagtataataaaattaaatagacttatattcagatttattgtattaagatatattatactctattcgtccaaaaaaattaacctaggactgggacgtgacataattttagtatagttttttatttttttaatggaaggagtagtgttcataagaccatcagtgacgagcacccaccaccagtccgatctgatcatttgtgaaccgtctgatatgtggagaaacagtacaacctgaggtgggctttaaataacgcctccgcttcccaaaacgccaaaaagcgcgccaaaccaagggacgctgcctttgccgctgcgggacgggcccacgccgtgtgtgtttttgcgggcggactgagcttaccgatgcgacctgtccctgtcactcccgcctcggtaaccggcgcgctaccctcgctttcgcttgctgcaagagcgcatggccgtggactccatggaccccctcctcctactactactgggagaatgggcccaagctcctgaaccagaaagggttttctcaagcatttaagcgactgttttctcaagcaaagcatctacccaaatgaaaaccaggagcccaggatagaatatgtcgctaatgagcctgtctaaacatggtaaagtacactccacacgagtgaagaagcatcaaaacgcgtaaacgacccggttctaaagtcattttttaccgcggctcctcagctcgaccgacatgtggtggtccatgtaaaagaatctccccagccgcaaacattctcgcattctccacgactccactaggcacacttttttttctctctctcttggtccgattaccactgatacggacgtgggccgcttttgtttgaacactctcaacccaattttataacgcccacctcgcgtccgcctcggcacggtcacgcacgcactccactgcactgcactgcccgctttgttgctctgtgcctgtgggctgtggcgtctgtgaccgtcaggcgtcagctcgtgtcctcgcctgctcgtcctccttcctctccgctggtgctctctctctcttccctccacgactccacggacggtcagggcaagggcacggtctcgcaccgagccacgggcgcacgcatcgcgaaagcgcggccaccggcttgtgttgggtaggaggactggcaggggcaccaggcggcggagcggagctcgggggctcggacgccaatggcgcatgtggcttttgttgcgctcctcttcttgctgctcgtcggtgagtcgttcaaccacaccgcgttccttcttccgttgctctcgctgtttgcgtagtagtgatacttttgtggggagagtgttcagtgagtgagtgctactgctagatgccttgcttgccggtgagtgtagcaacctgcagatgtgggacaagaatacgattcttcttgtttcatggtccagttgttacgatgcacattgaacttgttcgttcttttggggtgaaatcactcattttatcgatgtgtatttcaagattgtttctttttttttgggagatgaagaaatggaagagaaatgatcactaaaactatgaaaaatgcatgattgcaaatgtggcttttgcagggcattgcctcggaggcaaggttggcatctgctacggccgcaacgccgatgacctgccggcgccggacaaggtggtgcagctcatccagcagcagtcgctcaagtacgtgcgcatctacgacaccaacatcgacgtcatcaaggccttcgccaacaccggcgtcgagctcatggtcggcgtccccaactccgacctcctccccttcgcgcagtaccagtccaacgtcgatacctggctcaagaacagcatcctcccctactacccggccaccatgatcacctacatcaccgtcggcgccgaggtcaccgagagccccgtcaacgtgtccgccctcgtcgtgcctgccatgcgcaatgtgcatactgccctcaagaaggccggcctgcacaagaagatcaccatctcgagcacgcactcgctcgggatactgtcccggtcgtttccgccgtccgcgggggcgttcaacagcagctacgcctacttcctgaagccgatgctggagttcctcgtggagaaccaggcaccgttcatggtggatttgtacccctactatgcgtaccagaactcaccaagcaatgtctcgctgaactacgcgctgttctcgccgcagtctcaggatgtgattgaccccaacaccggactggtttacacaaacatgttcgatgcgcagatcgattccattttctttgcactgatggctctgaactttaagactctgaagatcatggtcaccgagacagggtggccaaacaaaggggcagctaaggagaccggagcaacacctgacaatgctcagacctacaacactaatctcattcgtcatgttgttaatgacagcggcacacctgcaaaacctggggaagaaattgatgtgtacattttttcattgttcaatgagaacaggaaaccaggaattgagtctgagaggaactgggggctgttcttccctgaccaaagctctatatacagtctagattggactggcagaggcaatgtggacatcatgactggaggaaacattacaaatgcaaatggtacttggtgtgttgcttctgctaatgcgtctgagacagatctacagaatggtttaaattgggcatgtggaccaggcaatgttgattgctctgctattcaaccgagtcagccctgctaccagcctgatacattggcatcacatgcttcatatgccttcaacagctattatcagcaaaatggagctaacgatgtagcttgtgactttggcggtactggagtgcggacaactaaagatccaagtaagttgccaccattcgtatgaaatctatatcggttatagtaccattttacaattcctatgtactacctactagtggatgttttggtgaggtctgcatcatagtgttgtagctcaatgaaagcatataactggaactagcatgtgctgattatgacctgtttatgatggtaagtggtaacataggtccttgaccgaaattgtagtgatagctgatagataagctggtaatagatgctgcaatactggctaaatttctgacttgaactaatattcaaatgtttatggtttttggtgacatggataatacatatgtaagtatgtaactgtaataacatgcttgttgtcaatttgagttgtccgttatatttttctggttcgctgttctcttgtgcattgctttgtcttgcattatctcttgggagtttgctaagtgttgataagtattgttgatttggcatgtatggtattcatgctctgctctatttcactagttaatagtattctcaatgttccaactctgttgatcttgtggtgagaacactaataatgttcgtaggaaattcctagcccttgtgcatggatcagcacatgcttttgtaaatcatggatatcaaaatttgatgatggatattgtgtattaatatgggttaccgatgggtaggttgctggtccttagaccttagtccttcaaaatgctatgtggaagtggaacaaccttcaagaccaaactaaaattataaagatattgatggttacatccatgccaattattgttacaatggagattttgcatacgctcgattgtttagtactactagaatataagatgaaggtatattgaaatgtgatgatgaattgttttgcttgcgtgcaggttatgacacttgtgtttatatggctgccgggtatggaaaagctttctcatatctttgttcaatttttttgaagcattttttcaccaactcctttgagaaatagttctgctgactattgttttttcctcccttgaaggagtaagatgagcacaacaaattcatccaaccttccagttcaaagtgggttcagcccatcgcgattcgacaaaaacttctacctgttgttctccatgctacccattatgattgctgcatgcattgtgtgatatgttcggagagagatcttgcagaagccttttgccatggaggatggaacggtaatcgcctgatactggaaaccagtactggtttgtttgtcatagttagcggagtgttgtagtatgactatgtagtaggaaactaggaattctcttgccttgcgcggacagcatatatgagttagcattatgaactaggaacattgcagatgatgtctcttggtagttataatcctattatgctcgctggatttttcagtgccactaattctttgctgctacctttttttggggacatgtttgctgctattcttcacatgatctgatcatcacatataataggggggctaatgggcgattgaccgatcggtttgccccccccccctccccctatactcctccctcttctcccccttcctcctccccttcttctctttctactacagtacaccacacaattttttttaaaaaacaaaagttagaaaaatttatgtatagaaatactatatataaaaaaattgaatttaaattcaaatttaaatcgggtatgtaaacttttgacttataaactttgggtctataaattttagttgtataaactttagatgtatagaaatgctatatatagaaaatatttgaattcaaattcaaatttgaatcagatataatttaaatttaaatttgaatcgggtatgtaaacttttgacttataaactttggatctaaactttagatgtatagaaatactatatatagaaaatatttgaattcaaatttgaattagatataatttaaattcaaatttgaagcgggtatataaacttttgacttataaactttaggtgtataaactttagatgtatagaaatactatatataaaaaaaaatatttgaattcaaattcaaatttgaatcggatatataaacctttgacttataaacttttggtctctaaactttaaatgtgtaaacttgaggtgtataaactttaggtgtataaatttactaaaatagaaaagtaatgcggtgacaaaaaaagaaaaccaggtggagggtggggggaggggatcgatcgctgtcctaacccgaacagcatttccgcatataatatcgtcttgcacctgtggctctgaactcaattgctcttgggctgcaccgaaaactattcagcccaagatttgttttcttctcattttgttatgtttagcccaggggaaaaggtacacccaaggtccctcaaccttgtcatcgagttacaaaatcgtcccctaaccacaaaaccagatatctagcgtcccttgactagttaaaaccggtcacaatagatccttcggtgattttgaccccggttttgtcctacgtggcaactgagacagcgtgggacccacatggtgcctaaatgtcaggctgagtcatttctctccccctcctctctagtctctagtctcttcctcggttcctcctctctctctctatgtgggtctgtaggccggtcggaggtgcgaggcgggagaggagggcggtgccgcgacggcggccggcggcggccgcggtggggaagcacggcggcagcccggtggagaggaggaggaggctggtctgccggcgccggagctgtgcggtttggtttggttggttggtgaggggattcagggattggtttggtgtttagtactgtacgtgcacgatggcgacgtggaggagcttgccgcggaggccgacggcgatggagatggcggccatgacggccgggccggtcaggaacctcaccgtcatggcgaacgtcgccaccttgttccggcacgcgatgatccgcggttgcagcgccatgaacagccctgagagtgaagaaacgtgtttgtgttggtaagttgcaagaactgtgttgtgaggtaaggtgaggaggagaatgaaccgaggctgaacatggccatgccatggccggcgtcggagaggatggagatggatttcaggagattgatttcccattgtgattatcgatggcctgcattgctccatcgattctacagtgaggacggagccgagcatcggggaggcggccgtggggagggtcgcgcaggggaccaaagtcctggccgagggcggtcacgatagaatattccggtatgtgttcagcgcgccgcccgacgagcagctccgcaggtcctacgcatgctacctctccacctccgctggcccacgactgttcctcatccgccgggctgccgccgtgcttccccactgcggcggccgcggccgccggccgccgtcgcggcgccgccatcctcctctcctgcctcgccccgtcgacgcccgcgccgtccgcgcacgtccgtgcctccccgtcgacgcccgcgccgttctcgcctcgctaccgcctgccacttccccgagcccatctttggccgtcgcggaactccgctgggctgccgccgccgccggccgccgtcgcggcgccgccctcctcctctcccgccttgcctcgccgagtcgccgactggcctagagagagagagagaggaggaaccgaggaagagaagagagggagagagatgattcagcctgacaatgtggggcctatatggtcccatgctgactcagccgccacgtaggacaaaaccagggtcaaaaccaccgaacgacatgttgtgaccggttttgactggttaagcgatgctatggttttgcggttagaggacgattttgtaactcgatgacaagttgagggacctttggtgtactttttcctagcccaggatgtgtgtcggacaggctacgtttaagcccacagtcctatatatggactggcccaagccttgaaatgttagacccacgtggtccctttttacagggccgagacatataaagcccaaaggagcttctagtcggacattggcccttcgagatagagttggagttaatgcacgtaatacgagagagacagtaacacataataataaattaagttttaattatgtacaaacttagaatataaattttatattttaaagaaattctcatatataattttttcgtacgatacacaatgtttagcagtttaaaaaagtgcgaacaaaaactatggcaaaatctacattttaatgaaaactaaggtactctctccatccacaaaagttacacatattacatattactttttgacataaagaccaagaaaaaattaaatcaccttggatgttacaaaatcaagaagtgaatataagcatgcaaccaataaacatttagatgactccttgggttctaataaaatatttaatttctctttttatttaagttttgaatgtataaagactacaaataggaacaacttatttggaaaaactcaaatgtgtaatatgtgtaatttttgtggatggaggaagtaaaatttactggttgcaagtttcaacatggtgtagtataatcaaggtaaccagtttaacatactggttgcaacttgaaagcccgaaacacaggagagtacttatctatttcactgttactgtttgccaagtgtatattattatgactttttttttactcaaagtgtgctgatcattttttggaggggaagggatgacactgcgttgaagacttctagtagtaccaagttgttccttgtttagtgccacaaaacgaaggttgttccttgtttaaactgtgccacggcgtgcaagtggcttggtgatactttttacagtgattttcggattgattagtacaaatggtagtcgagttgcagagctttgtgcacatgcatggtttgcagcagaagatcacaggaaggcaagtggcatccaagctttgatccgctgccggtggttgccgcaagactgcattgtacgccagcaacctcggcggatccggcgcgcatcctctgatgctctgatcaccagaacatgtatggcggttgcagtggcagttaaggaggcctcagctcagctgctccatcattcattagcaagttctcgaaccatcttctataaacaaatagtattgctaaatgaaatggtctggaagctttttgcttagtctggacaataggtactcgagcaagattgtttttttttttggaaaaaaaaacaatattcagaggaaaggatgtccttccgaatatttttgtaagaagaaaatgcaaatgtattgaggtttgaacactgaactttaaggttgaaattatatatcccttaatactgcactatcaagtgcatctcaagattgcaagtttgcaaccgttccagctaagggcacccgtaatggttatctatatgctctctacaagagatccatgtcagcatatttttctatttgaaagagattaaatggagagagagagagcaaagctatctactaacctggagatagtttatagagaaaaacgagacaatgtattagatagctatagatacccatgtaaacatactattgaggtggtttactattatctagtctattgctgagatgtacatgttttacagagaacaccttagagcacccacaatggtaaagtaaggtgctctctataaaacatgtacatctcaacaatagactagattaatagtaaaccacctcaatagtatgtctatatgggtatctatagctctctaatccattgcctcgtttttctctatagactatctctaggttagtagatagctttgctctctctctccatttaatctcttccatgtaagaaaacatgttgacatggatctcttgtagatagcctataaataaccattgcgggtgtccttactggtgctctaacaaagacacattatatgataacagcactaacaaatatgttcatgaatgcaacttagaactggctgattagatcggttccagaactacaaagcggcagccgcatccacagccaatctgcgaccggtcagccacgacaatcgccggatcgggctggagggttgcacgtacgcacgctctctcaagtctcacacaaccttccaccattgatcgagcgaagcatttgttgggaaacgcagccgtccaccgagcatcacgatccgaccggcccagaacgtttcggatcacgcaaatcgatcgtacatccggcgcccgatcgcgaacgaccaccacccatgcatgcatggccctccgcatgcacctcggtctcgaaccgatgtaaccaccaccacaggtccaagcgcgcggcggatggggcgccccaatccagtggcgctaccaacctcggtcaaaccggcggccaaccgaccggaggcgggccagccatcgccgggcacatgcgctgcgtgtaccgctgtgcgcgaggcgttgcacgcacctaacgcgcgcacccacatgcgccgatgcgccgttcgctcggtcgagaggcgagcgaacccggcctatctcgtccgagcgagcgatcgatctagcggaggggccccggacccggcggatcggagtagcagatcgacatgcgtatctcgctgcggattacggtgcctcggctgccgtcgcgcacgagctgcaagcacgccattggatgcttatataaaactttccgatcgaggcgcgcgcatcgtgatgccgcgcgccgctgcgtcggattggtagtgtcactcaccaccacgcaccggtggcgtgcgtgcggtgtgtcggccggcatgcagggccgttaaaaccgttgcaagttgcacgcagaatactgtgggatcagtgtttacccaggctctgattttgttttaggattccggagctccccgatcggtttcaccgtgttctaggattctgtccaagtcgctggcacgttggttggtttactgctggtgggttgacattgatctacaccgccaccccgctccaatatatacatggatgtggagtactagactggagtatttcagagactatttacctctattctctgccttagccaatcaaattactcctcttggcttgctcatgccttaacaaatgaatgaataagaagaattgggaatactcctactagtaggatgtgtttagttcacactaaaattaaaagtttggttaaaatttaaacgatgtgacggaaaaattgaaagtttatatgtgtagaaaagttttgatgtaatgaaaaagttagaagcttaaagaaaaattttagaactaaactcgaccgtagcatactgatctcttaacttacctactcctagaggggttttttttttaagaggtactcctagagtatatagagaggatttgattggtcagagcaattcatgcattttcatttagaggttcatgtcagtccaagggctgccagatagcacctgtccgcatccaaggaggactgttttatgtccagacaaaagacagagatcggattgggttccaatagcgatattcccatgtgccggccatctcgcactgtcacctcatcacattgctcatgactgtgcatgcggatatgttgctcgctagtacagagtagcacagtcaattactatccctccgtcttaacaaaactcacttttaagggcctgttttagtttaaaaattttttttcataaaaaacatcacatcgaatctttaacacatgtatgaagcattaaatataaataaaaatactaattacacagtttgcatgtaaatcgcgagacgaatctttagagcctaattagtctatgattagcaataagtgctacagtagcccacatgtgctaatgacggattaattaggctcaaaaaatcgtctcgtggtttccagacgaattataaaattagttttttcattcgtgtccaaaaaccccttccgacatccggtcaaacgttcgacgtgacactcaaaaattttcatttcaccaactaaacagaccctaaatttaaatcaaactcacttttaaatttaaatctagacataggctacgtacatgtctaaaaaaactcaacctagaaggaggtctgaaccatcccagtataacgaatctgaatagagagttattcagatttattgtattaagagagggtcacgttcttttctagatttttttttggacggaataagcatgagtgattttgttttggagggatggtatactagtatctcctagtgtggcgtatatgctaccgtatcaagggggcatacaattaatactaataagtaatctaaacgatatttctctatacatgccatgcatggatatattcccctagaaattgagcacatataatatatcgggatcgatttgagtgggtaaaataaacaatgtgttgtctccatttttcgtctcatactccattactacccccatgtttcgacatgaactaattgactcgtacgtactagtacaaaatgacgaagcttgggagactgtttaagcacgtacagtactacatgcacattatacggtgaggcccagttaagcataaattaacgccgaccggccaatataggtgaaacgttggcgtcatggcccgatcgatgcatgcatcttcgtacaacgtatggggggcagctgggacagcaaatggtgaaactatcggcgtactcgtcggtccgcgcgcccccttttgcccacacagccacacgccacgccacaccgatcggtagatcggcgggtccgcgcgcgcgaaaacacgaaatgcatgtggtgttcctatgcgtgccggataaagtccaagaatatattttagataatttctggtatcaatacaataataagagggaagaaaaaggctatatgctatcaatattaaacagtcttgctgaatatttccatctaatgaatgatataatgccaacatcagaaaataatgaagtaataccacaaaaacccatatatgttgtttttgacggaaagcttcctggagtgtacatatcttttgaagagatagtagcccaaaaaatagatgcaaaattaatgggtggattgtcatggaaaaaatatatagattttgatgaagctttaactcaggccagaaaaatattaggaataaactactacttggaaccagcagcaaaagaatatatacaaaaatgcaaaaaagccaaaaataagaaagctccagagaacccatattgttcaaatattaagaatgaaggatcatcccaaaaacctacgtataaggaatgcttgactaagggagtagatcctttggatggcgaatatatcgattggaaaataattgaaaaatttgaagaagcatcccccaaattaaaaaagaattgaaagaagaaatacttaaagaattaaagaaagaaatgaatgacaaatttgaagaaatgaaaaaagcatatgatgaaaaatttgaagtctccttttctgatgtagatactatggatttaggtggtcatgggcagcctgaccaataaagcaatataatataaattgataataaatatccattctttgggcgaatgaccaaagtatgaattgaatttgaatcaatccaaaatgcaaggacagtgaatgacatttgactgttaaaaatactgtggagaatattgctttcggcggaaaagaaaggcgcaggtacagaggtgtctccaccttggccaattcaaggacaaagtaaagccaaaaagaagataagcatctccatggtgcgagccagctcgtgaaaatacagtatctagaagataagcttgaagcatagtcgagcctcccgagctcctataaaaggaggggtttgctcagctgagaagaacaacgaagacaccattcagagcaaagctttcaagcgcgctctcaccctccattccaccattcttagtagtagtgactttagcctaccttgcatagtatattgaagcaaggagttgtgttataacgctgtgtaaggtaagaacagcttgcttgtacctaccttcgggtttcccgaaagggaaaaccgtatgtaagcttatctgtttaatatgaagtaattttccttaagtattcctgcacgtttattctagacaagtgtttatgctaaggaccctataggagaaacctcttcggtttgttctcgtttttagcctgcatcttgcataggcgtctggagaatcggtatccgtagagaagtgttcccttcgggtggaactgcctggggagacgataaactcttagctagaacaagtgtgacttggaatatctttttaagttgcttctaaaaagatagataggtgaggcatacggtgagtaccgagtaggactttacatcatctgaaacaagcttctgaggctgtctaaataggattcgccaccctgcaaagatcctaaagttaaaatatctctcgaagtgaacagtattgaacagtaatttaaacagtaaactaaatagtgtttttgaacagtgttttttgtccgaagcatatatatatatatatatatatatatatatatagagagagagagagagagagagagagagagacttacttttttttgttaattgaccatttagttgaccgtaaaaaatttagttttaccctcggatttcgatcgtccagcgcgcggtcgcggcggaggcatggagatcggagaggccacggcccagcgcaacacagcggcgaacgcgacgtggagcaacgcctcatgattattcgttatgtgcatacgcatgacactattctggtttctgtagcagccgtcgagcacgtaagcaaccaagctatcacacattcgtaccggtctactacaactctacaatagcgaaagcaattggtccaaaccttttttgtggttgacatgcatatgcatgattcaatatctatctattatattatcaacaccacgttcgctgtggcggctagaaattctcacattaatcggagaaaaagagaaaactttacaccattagatcttagttgtctaaattttaagggctgagatttaatagcatagaagttttaatatggtaatcagatacagatacgtgtattatagaaattggccagcagcagttagacttttcttaccaaactagcactaggaaacaaaaattgtaataggaatctagggaaaaaagctatgtccgtgtatgattttgtgtccgattgctatggtggctagctaccaaaaaaaaaaagatactacaaagcaatcacagcacgtacagtttcccatctgccgtctccaacaaaataacgaagaaataggagccagagaaagagaaggtacgaccagtacacgagagaaatagatgtatttgatggctggtccatttattcaattacctcggctaactctttgtactctactcctgttatgagggatagaaattcccacattaacccaaaaaataattttcaagtaaaaatacaatttaaaagtaactaaaattcggaattaaaaataaacaatattgaaaggagagtctatatatataagaatccaatatgagattaattaaaatttaaaatataaataaaataaaatccgaatttttttttaacaaaaagaagatttcaagtagtaaaataactaaaattcgaaattaaaaaaataagcaatgttgaaagaagagtccaaataaaaacccaacacaagagtaattgaaattcaaaataaaaaaatgagaatacaaaaataaaaatgagagtggaatacattatataaataactaaaatttgcaataaaaaagaactattgaaagaagagaccgtatatagagagattaattaaaattcggaataacaaataaaataaattctgaaaatagaaaaatatttataagagttcatataggaatataatttatctccaaataagaacccgacatgagagtaattgaaattcaaaataaaaaaacacaaaaatacaaaaataaaaatgagaatggaatacattatacaaataactaaaattcgtaataaaaaagaattattgaaagaagagaccatatagagagattaattaaaattcggtataacaaataaaataaattatgaaaatagaaaaataattataagagttgaattaggaatataatttataaataaaaaatatcggaatgaaaaatatggaattttcaaaacaaaaaggtccatttagaacactacgatgacaaatacaataaagaggggagaaacaatgagcccgtaaagaaatagagtggtggtggttgatgggacatctaaaaactataaacaaaacccgaaatagaatcaaatgacaattaagaggagggacgacaggcataccattaagcaacacggttatgacagttggcgagacttataaaaagtaaaaccccgatgataattatgttcgattttaaatatctctatgggcgggccatagaggagtacagtggcgaagccgttaatgttttggtgggacttctagaaagtaaaaaagaacacaaacaataattatgttcaattttttaaatcctaatgataaaaaagagaggatgcggtggatgggccgtagtggagtacattgacgacgtttgacgggacttctaaaaattataaaaacgaaacccaacgagacaatcaaatctgaaaactataagttctaatttttgaagttctaaagaggatgaatagaagtaatgatagatcaagcaatcaaataaaggtgtagcagaggagcaagggtagcgactaacgtgacttttaaaaactttaaattagaaacatgggaatgataaattttaaataaaatcatatgtaaaaacaataattttatacgggtactagccgcgcaattgcgcgggctacccaattataagagttaaagtaggaatatattttataaataaaaaaatatcggaatgaaaaatatacgggttctaaagaggatgaatagaaatagtgatagaatcgagcaatcaaataaaggggtgacagaggagtaagggtagctattgacgtgacttttaaaaactttaaaattagaaacgctagaatggtaaattttaaataaaatcatatgtaaaaggcaaataattttatacaggtgctagctgtgcaattgcgcgggccacccataagagttaaagtaggaatatattttctaaataaaaaaaatatcggaatgaaagttatggaattttcaaacaaaaaattcatctagaaaacagatgacaaatgataataaagatgggagaagcaacatgcctgtaaaggagtagagtggtaacggttgatgggacatctcaaaactattgataaagcctcaaatagaatcccattgatgattgaaagtaggaacaacggaaaggtcgttaagcaacacggtcacgacatttggcaggacatccaaaaaataaaaaataaagagggaaggcagcggcgagccgtagaggagcacagtggcaaagccaatgatgattggcgggacttctagaaagtaaaaaaaagaacacaaacgataattatgttcgatttaaatctcaatgacaataaagagatgagacagcggacgggtcgtaaaggagtatagtggcagtgtttgatgagacttccaaaaataatagaattgaaacccaatgaagataataaactctaaaaactataaggtccaatttttaaatgttccaaagagaatgaatagaagcagttgtaacgattgatgagacatctaaaaactattaacaaaaccccaaatataatccaatgacgattaaaagcaaggacgatggataggctattaagcaacacggtcatgaaaaaaaataaaaaataaaccccaatgataatcatgattgattttaaaatctcaaggacaataaagagggcaggtagcgggcgaaccgtagagaagtacagtggcaaagccagtgatggtttggtgggacttctagaaagtaaaaaatgaatctaaacgataatcatgtttgatttttaaaatcccaggcaacggatgggtcgtagaggagtacagtgacaacatttgatgggacttcaaaaaaaatataaaaatgaaactcaacgatgataataaactatatctaaataatgtctactacatccgtcctaaaatatagcaacttttagctatgaatctagacatatagttgtctagattcaaagctaaaaatgcttatattttgggacggagggagtaatttttaaagattcaaagagagagaatagaagtagtggttgatcgagcaagcaaataaggaaggaggtgacgaagaagtaaggagtaacaactggtatggctttaaactataaaattagaatcacggggataataaggtttggtcctttaaagttttaaaacaacgagatagctatttaataaattttaagtaaaatcattttagaaaatatataattttaaatgggtgctagccgcgcaatcgcgcgggccatccagctagttccttcgtatggtagcagtgctagtctgctagacaggctcttaattttgctcaggataagaaagtagaaacacgcctagatcattacgcgcccccacctcgcaggtgttatctcgatccagtactgccgcgattaatatggaaataaaagcgaaccgacgccagcccatgctcggtcgcaggccgcggtgtctttccaactcggtcgatcagcactccagtatctggtcggcacagcatttgcgtaggcaaccacatctccacacatacaagcagcacgtacagcggtacactatacgtagtcacgtagcaattttcgtaccgctagctgcagctagcgttgctcagtgctgttcccacgtatatctaatgacacccattctccgtttctcctgctgtcctgcatatacgagtccaagcttaataattctgccaccttcagaacaacattatgtggactcacaaaatctgcgaatcgatatattagcatgatttttttttacaactgtaacccgctgacacagatcatggagcattacaggggagaggaattgaagagcacaagagattaactagcaaagataaccagagtctaaaaaacaagaaggaaaaaaaggagagagtttgtgactaagcgccaagaaaaactcctaaggaactaggcaacaccgcaacccgaatcttctcttatgcggttaaccatcatctctaccgtgaaaagtgtcccctcaaagcacaagcatttctttccaaccataggtgtcatgtaataaggatgacgaggagagtcaaacctatttttgttgtgatcccacaaccactggcgagaagactcccactaaaccggaagcaaagattgttggcagggtgatagggaggccaatgtaacctaatcctggacaataacttgtgccaaacttgtcgcgtgaagacacactgcaccaagatatggtgatcattttcagctcttactcacacttgatcaacagctcaacaccacagtcgaagcgcaagccaaaggaaaagtttgcccttcacaggaccagtgttgcgtcaaagaaacacgacataggggaaggagattgatcccttatagaatgcgtttgttggtcgaggcggcgttatactcactgcccatccagtgctagatgaactcatcttggacgaagtcttgcagtgggcagttttgtattctatcccaaagcgcaaggaattgggagaggacgcgcatagtcagggcacccgtgatgttagagatccaagttttgccaaccaggccaggaaccatcgaagtggagttctggcgacgggtggggacgacaaggaacatatatggggcaatcaattgaactgattgcccgttgatccagctgtccaactagaatagcgagcatcatccgtctcctatgacgaccacgacagccgctcggaacatctctgacacacactgctcttgcggtagtttgaaaccaacccaatgctagagctagggtcaccacatctgcagggcctagcccatggtttggagggaagcggttcctctgacgtgaactgtcacatgacgtagtcactgacaggtgggcctgcgagcggtagggcccacatgttagccaccacgtctctctaacttcacgtcagatgatcccaatccggttcgaaggtccgtgatttctagaccctcacatttccttgggtcggtacaccttgggccaagcgacaaggcaattccggctgtagaccaagtttgaccacttccaaaggaaagctttcaaggtccaatccggcaagcccgatggcaagggagaggtgcaccgaggtggaggagaggacgagttgcaccaaggtcatcatgtccatcatagtcaagagcctctcctttcaagtagacatccagtcttggacaaaatccacaagcggttgtaggatgctcttcagaagattcgtgacggagaggggactacctaggtatttacatgggaactccacaatcgcgcaaggcaggatacgagagactactaccatatcatcttccgagcacctgattggagtggtggagcactcatcgaagttggtaataaacagcctcgaagctggagtggtggagtggtgaagcgtggcctaggtacgccattgaactggacacacgaggaagataatcgaaggataacattgtggagaggggctgggatcgccattgacgtacgccattcagggcagtcccaacccataacactaaacatggtttccataaactccacatcatcaagaaactagtactagacattactcttccaatgcaaacaccactattccatactttaatttaatgctacttatctcacatgatgtcttggatattgtgtagaaaccatgtctcatgcaagacatggttttcttctctttcctcatttattcacttgccacatcattttttgtcctacgtggcaacttatttaatgatatgaacaccatcctaatcattgggttgggaatgccctcagaacaactaatcttgcaagatttcaatatacgaatcagttaaattcccgtataaaacggcactaaacaaaaccaaagctggtaattggattgtctatttgtcttcgtcctggcggccggtcgatcgattgatcgtcgcctctcgtcgacggggactgcccatgcgtctgcgtgccacactacatttattcgagctgttaacatccagcatactcgcatgtgaggcacagctgggcaccagctgctacctgggccccgctgcgcgacaggccacgccggctgcatatatcatacaacgccccatcttatggatgcaacagcaacctagcttgatcgaattaattcgtagcgaatgccatgcatcatcatattaaaccgattgttgttagggctcataaagtcataatctcgtccacctgtcgtgtcgatccatgtcgttactggttactggttaccaacccgtgatcgatgattctgattcattctcctcgtcttttagtttctttaattttgggtgattagttgtatggcctacccatcataggccatttgtacatcttatatccacagacagtgtcagtgtaatgttggcaaacattggacaggggactcacacagcggtccttttctctgagagtctgaattagcatctggttgtttcaggctcaagtcaaaatacagtaacatggctatcttcgtgctagagatcaagactccattataaaaacttcctagggcaagtacacaagattaaggggttgtttggttgatgtctaagcttgtcataactaagcttaggcaagttgtggcatgtggcaaaagtatggctaagaaatagttagccacaagtgtggcaatattagctctaattatctgagtatgatatgtagtacctaagggtaggaaagtgtggcatgacataactgtggcattgaaacaaacacacgactaaaaactgtggcatgactgaagtgtgacgtggtaaagtgaagcaatcaaccaaacacctcctaatttcaaaaagaagaagaagaagaagatgaattcagcctacttactttgagtgggtgttgatatgaactgagcttattaaatgatgaaaatgaaacgagcagagagttgatcaatccgtgtcgagtcaatatcggccatgctgtgatacagtggtagcatctgcagccagctacgagatgattgcaccgattgtttcctctggcctcgagccaaggatgtaattacagtacgtaattggtgctattcaggccagtttttttaagcttagattaagttgcgcggcgggccagggagcggccgtagagtatttgttttagtaatttagggtttagctaggcatgcacgagccaacgtggagaagatatcgttcatgtgcaaaacggcaaatctcttcccttcctacgtactactactactagcgtcgtccaaaatttgccgaccgaatccaaactcccatctgcgcaggcgcagcgacccaaaccgggccgcacgcggctacaccaccactacatataacacgcgcgaggggagcagcagcagcaacggccgcgataacacctgcgacaaaccgggccggggtgatcgagcgcagctagcgcgcggcgccatggacccctgcgcgttcgtccgcctcaccgtggaccagctcctcctcaagctgccctccgtgccgcgcccgagctccggcgccgccggcgtccacccttccacctccccatgcttctgcacgctccacctccaggaccacccctccgccggctcccactcccgcaccgcgcagctgccgctcgcgtcatccgagtccccgggccccgtcgccgccggggagcccgtggtgataagcctcgacgccgccgcggtgcagaggctctcggcgcgccccgccgccgagctcgtcgtgtccgtgcacgccgggcagaaggggaacgccggctgcggcatgagcgccggccgcgcgctgggcagggtgcgggtgcccgtcgacgtggcgcgcgccgcggccggggagaccgtcgtcgcgcgcgacgggtgggtggacgtgggcaagccggccgcggcggcggcgtcccacggccacgcgcgcgcgcagatccacatggtcgtgcgggccgagcccgacccacggtacgtcttccagttcggcggcgagccggagtgcgggccggtcgtctaccaggtgcccgggggcgccgccggcggtggccagcggcagccggtgttcacctgccggttcagcgctgggcggagggcaaccaggaccaggttggtgacttggtgtgcggtacacgtattacaatgtgcatgcatcattccatcttcttcgtttgctcgctaagttaagcttgcggtgttaataatttgctttacagtgaccctgtgctgacaaacgtgtattttctcttcaactaagtgcttctcgtacgttgcttatatgctagttatatgtacgacggtaattgtgaagttcactgctagataagatagctagagctcatacttgggggcgaaaaaaaattcttacgttttatacagtatttagataatgaaacacagtcagtgttagttttcatggttgataaaagtgttgatgaattcattatacaagtagagttttgcttatttttcttgaaggtgcaaaaaagaaaaacaaaatcggtatgtaatcatgttaggatttaagttttcgaattatagtattcagcatgtacgtatagctagcagttggacagtatagtacgtgcccggccttggcctctgcggactgcggctctgcccatacacgcttatcaatgcaattatgcaaatgtccccatcagtccaggacatatatgatatatggacatatgaattaaaaacaaacaactcaatttatttatcttgtcatacggcaatcgatttgctaatcaataccgacttgtgattcggcaatgctcgattatttgagaaaaagaaagtagcacagctcaatgaagaatatgatgcgattctatttcatcccaactatcttcataaagaagttgaaaatcatttcgtctccttttcaatttcgcttttctttcatacggaattccttttcattattggatgccagctcttagataccttgtggtttatatcatgcaccggcactggcagtcatctgataaaatattccaactcccatacgtaacgacattttaaattaatttgccatggaagggaaactttttaaggttagaataaaatggttggaagacttgataattaaacaggcagtaccaatattccaagccacgtactactaaatacaaatcctattaagaaagttaagcacctccaatcctgcatgaatatatttgtgccattgctatttgaccagtcaggttgggttatgacatatgagaaccttcactgtcagtgcagctcagatctccatacatatacatgctttgtttatgctagctctacggaactttagtcactggactttgaaagtgaaacatacgccatggatggacagcatggtcagatatagacgacaccaaccgttcatgtgacggtcttagcattctgtctagttaccttactaatttgctctgcaaaatttaaatctttaacctcattagctgtcttcagaatcttccttgtatcatgtccaccattgccatcacctactggctactgatcttgtaccagtcacacttggcaccaacttgttatgcgctactcaaactaagcggttctttaattactagctcaaagatagtatgttgctatcttaaaccttttggtactagccatgcacgcatgcacttgcatgttactactacagagctagttaaactaatcctgcatgtgctgtttgttttgtccagatcgttgacgtcggagtcgtccatgactcggagcaccagcaggaagctgcggtcttggctgagcacgctgcacggcgaccgcgacgcgcaggcgcggcgcgagcagcgcaaggggtggacggtgacgatccacgacctgtcgggctccccggtggccatggcgtccatggtgaccccgttcgtgccgtcgccggcgggctcggggcgcgtctcgcgcgccaaccctggcgcctggctcatcctgcagcccaccggcgccgggccggcgagctggaagccgtgggcgcggctggaggcgtggcgggagcgcggccccgtcgacgcgctcggctaccggctcgagctggtgttcgactcgggccccaccgagtgcgccgtccccatcgccgagtcgtccatcagcaccaagcgcggcggccagttcgtcatcgacccggccacgttccccgtgggcgccgccggcgccgcgtggccgttcgccggcggcttcgtgatgggctccacggcggagggcgaggggagggccagccggcccaccgtgcaggtcggcgtgcagcacgccacgtgcatgggcgacgtggcgctgttcgtcgcgctcgccgccgccgtcgacctctgcatggacgcctgcaagctcttctcgcagaggctcaggaaggagctgtgccatgatcaagaggactagcagggagacgaaacggaatcaagtgcatgtacttgggggtttggcttgtgaagttgtgatgcatgcgatcactttcatgattgtgattaaattagttaactatagatattcaattgtttcttgtgaaagtgatggcctgtggctgtttttagtttaggctgggtcggatcacaagaagagaaacgtatgctctatattctttcctcgcgatattcttttgattctttttaatttatatacgtttctgttcctcttttttccttctgaaagtctggaaataaactcggctgcccgatgcaaatctgccctttggtgtctctgtagactgtagcctgtaggtgcctctgatgagttgatgtacactacacaaattgtcttttcagtcaacaggttaattatactatcttatttttcaccatcccgcacataccaatacccaaaaaaaaaagaataccctcgttttatcaaatcccaatacaattatttatcactttatcatctcccaatatattaattcttcactttcacatatttcgatgcaatgatttactcaaaaactaaacttatttgggataaatgggatgtcctaaaaataaacttatttccgaacggaggggtagctatttttggtgtggaaacgttcggccaggacagtgcccattggctgatgggcttaaacctgacgtgtagcccattttcggttggccacggggctgctactgacatgcgggcccatgtattacgacggaacggggctgtggcagacctacggcctgttaaggtacacatgggccgttttgggcaggttgaggtgtatttacgacccaactcgtacaactgccttccgattctggtgggcttgtgggacgtagggttgggtcagacgctttccattgtactccctccacatcaatggctagatttgtggtggcgcagcggcgccggagccatcagccatgggctcatcatcgtcgtgaagtatacgtttcagtaagtttcttcagtgcagcgtttggtgattatttaagtaggaatagccttgttgttcctttgtgaaaaaagagatagtctgttcctgtttctagagaaaaagtgtgttagttttgccgttgcgatattttcattaattctatctcttttcttgtttgctgttagcctattagtgttgtacctgatatggatgactataaacgatatggtattaaatttgcattgttcataacttcagtgtgttcaccaaaaaagtacatcctctttgttttccgatgcgagaatttagaggatttaccatcaaattcgcctgctttagggcctattaggattgttaccctaccaaaattttttgtagtgccaaaatagggcaagttttggcactaccaaatatttggtaagataagattatgtttgatcatatttggtttgctaccaacatatagtcaaaatgtgaaattgtagtaaagtatgttctagatgatgccaaatctagattaggtattaccaatgaatgggcttcaatccaaatcaaacacaactactattcaaattaccaaaatattggtagggcatgtttttggtaacaatccaaataggcccttaatttttttaccacctaatccgcaatgccctcaataatatattattagaactgttaattagtatatttgataccactttctatgtttttcatgtatttcttatttcttaattccattgacgttcaagcgttttctcagagaacgcaatacaaaatcaaagcagtattgtatatctataagctatacacataatagaactacaaaagtagtacacaagcatgtgtacaaaaaaatctacacaagcatctgtacaagtaacattccaacttcgtgcttgaatcgatcgccatgaattgtgtatatcttcattcttttccttgtacttaaggaatcaaattgtaaagaggatcaatagccagcataacatgactatccatgcaggtcaaacgttctttggcctgttggattgtttgattgctgaaacaatgtccagcctattgagttcaatgatgttatgtcaggctgccggcaagtacaacagaagcctgtgttattgccctcgcgactctgtgaatctcgtgctgtacaaacttccacgattctgtagtgttttccttccttgcactagctatagcattttctacaccaggataagatgcactttcccagtcattctgttctgatggtccatagacctgcgagaagcaacagctgccaattagcacaaaatacaaactgcaatctgaaaaccgtgatatcatggtgtaattcaaaacaagaaacaatgtaaactgaatccacacaccagatgtttgaaccattctcgcttgaacaggccttccctgttagtgaatgcccgttctgcctgcatgagccggtcattgagcgaccgtattttcattgaatcctttttcagctggttgctcgacagttgcctttgaagctcctaagaacagtcattcctcttagtcatgatgaaaacctgacctagaaggctgtctgaaatagtagaaattcttcatgtacatttacctttctctcgccatttactttggtagctgccgttttcagagctctaattgcattgtgcagtggagagcaactgatagccgttccccttacttcattctctactaccttcgtatatgcctgtgataaaaaaaacattaaaatcacgtaataattccagtcacagaaaagggaaatcaacagagttcctctctacaaaatactactggaagcatagtgatgatacctcaagttcaacagggtaggacatgtaattgaagggcaggatctcttcgtcagcaagcctcaaagccatcattccccagatgctagcagctgtaatacgaaaatgccgctcatcatgttgcagagaaagtactaacagccttcaaaaaatacagagcaatacctgcagcgtgcctactgaaccctggatctccgaatttctccatccacacgaagtcatcgtataacgaatgatatatgggatagcctggtcctgcaaaggacaaggcgaaacaagcaaaatccattaaaaagatagaagtgaaaaatccatttaaaagatggctcgatagattctggaacatgaaaacccttgccttctccaaaacccatgctggttgaaggaataccaacatgctggacgaaagctgaaaaatctgatccaccatggcctagccgtccaatcttttatgtgggggcaggtgatcagcaatgacgttaaaattattttttttcgaaatgaaaattttacagctaaatatatcaagtaacttggaaataggaattgctactataactattctgtttctaatataaaccatcttacaactcaccaagggggaaatgttggatttgacccatgaatcatacacggcttgagatgaattgtcaggatcttgaaccttcatgattggagaaagtgcatttatagttattagaaatcacaaccaaggatacgttataaacataaaatgtctcactagtgtttgaaaaaaaaagttgaaacacccattattgactatttctacagtaaaaccaaaagaaaaggcaataaagctctgccattttttttcgtcttttcccccaaaaaatgtcaacgtgactcgttttcaggaatgatgtgctcaccaatttcattgtttcctgaaatagttcgtcaagttgcggagttgcagagggatgaaataccgggccaactactgaaacgtcaacgttaagataagcaacagctcttgaggaaagcatctccctattttcttcaacccattcagttgatcctgtctgcataaatgtaagttgtgaatgatcaccattctagttgctcttactctgcataactctgtacatatatagtgcagagagagagagagagagagagagtcagagatatttaccagcccatactcttctgcatcccagctgcagaagattatagttcttctaggtctccatccttgcttttgcagcaccgaaagcctttgagctagctaaacgacaagtaaacaacacgccaagatgcagacatggccatgttctgagtgatcagtcgcagtattataaaacggtgttttggctcagcaaagttacgataaagtacagcctactgaacttcggagaaagaactttgtgccccaaaaattacctcaatcatagctgccgttccgctattgggatctgatgctccaaacgtccaggcatcacgatggttaccaaggataacatatctgcatcacaaaagggtcaaatttcagttaagtcacatcctaagttcatctctgatttcattttgtgtggttgtgcctagactttctgcagactgatacgtctctaatcagtcagctacatgatttttttaaaacgaaaaatgtgtagctgtattactttctgatctctatattctgcaggatatggatatgatagcaacaggagacggtggacatctacatccgaaatataaagtgagccatgtatagcttgccaagataatatttttgttatctacaaatctgttgaaatattgaaactacagagggagaaaaaaaatgtcaagggctcccactatccaaatgtcaagggatagaaattatacaataaatattggactagaaaatcatctgttgataatggtgggtgattgggtgaatatgtcaggcctagattgataatgtagaataaaattgttgtaattatacattcccggcaatgataagatgaaattttgtggcaaatataggcatgtaaaagtaccacggtagtgcagagtattaggtcaatggtagagcacatgaaatttttttatcggtagttatgaatcttcataattttagtgaggctagagatatattacagatctctatcaacatatggttagcaattccgaaaaaaatattgtcaacgaatggtccaaaagcagtgcatggcaatgcccaagtgggatgcatgtgttaacaaccagcacaggttgtgattgaaaatctgaagcagcagttagttagagaaataccccatgaagaagtgtatactggaggagtagagtaatttaatctgatgcaatgtcaaaaagagttacctgtccggctcctctgcaccttcgatcaccgcgaagacattctcgatggtggccatcgtatcattcccctgcaaactccacaagaaaccattggctcgttggttgcaagttgcgacccatgaggccatgactactaaaaaaacaacatgcggatttcagtgatcgagacagaaaggctcgtcgaatgttgcttacggtatacgtcaggttcaggatcgccgggccagggccgaggcggtacactgggctgccctcccggccctgccagtccgccggcgcagcgtcgccgcccagagcggcgtggatctccgccgcgtcacgcgcggacaccggcagcgcggggatccccggcatgtcgtcggtgtccatcgcctcctccacactcacgcgctcgcacccttcggacgacgcccacatcggcgtcgtcgggtcgcccacgccccggaacaggctgcccacctgcacgccggtcggcggcagccaccgggagtcggggaaccacgcctcccccggggcgccgccgtactgcagaggatcggtgtacaccaccgcggccgcggcacccgccacgcgcgcgttgtgcacgatgtcctcgcagtggatcctcccgtaccgcgcgaccgccaccttgcccgcgacgtcgacgccgcgggaggcgaggtaggcgaagtcctcctcgcggccgtagttggcgtacacggcctcggcggacaccgaaccggaggcggcgtaggcgtagaacgtcggcatgacctccgccgtggccgacgcgtaggggtcgttcgggtacgtctcctgcgacagggcgaagctcgtggtggtggcgcggccggggacggcgagggagagcgagcgctcgaccgggtaggagaggaggacggagtagggcgtgatgtgcgccgggatggagagggacgagaaggcgtcgcagacgtaggcggcggtgagcgagttggccctggtgcccgcgacgtgggggtgaagcgtgagcgcccggaggtggagcgccgcggtatcgttggaggcgagggagaggaacaggctgccatagttcggcgctggtgcggagtggacgacgaggaggagcagcgagagggaggctccgagggcggcgagggtggaggagacgacgcagatgagccggcgcggggtggtaggtttgtgcggcggcgtcagcgagggagagaggaggagggaggtggcgtcgaggcgcgacatggcgcgcggcgcggggtggtgcgcgcggggatcgcgcggcggaaggaagaggagcagagtgcggggtgctctgttctggctcgtttgcttccgtgccgcgggcgcgctgtatctggctcgcgcgctgtttaatccgcggagacaactgacaagcggaccagtggcaagctggatactgctgctgctactgccacaccggcagtttgatcgtgcggcggcgatgcgaccacagcgcacgccacaacaatggcagtgtttatagtttccgcctattcctaactttccatcacatcatattatatcaaaattgtcctacgcatataagctttcaactttgagtaaattacacccacggtacaacaatttagtaggtgggtgtaatttagtataataacttgaaaaataagcgttctagtacaacaacttagcaggaaagtacaatttagtataaggactttataagtggtcgtataaatgcaataacttttaaggtaggtaagattttaatacaagagtaaagtttatcaccggtccctaaacttgtcgctgtgtcattccggtccctaaactcgcaaatcgatcattcagatcctcaaacttgttcgactgtgtcatcccggtccctaaacttgcttatcactcgtttaggtcctccaacttgttcagttgtgtcaccccggtccctaaacttggatttgaatatcatctgggtcaaataggaccgtctaaagactttatatttaaaaataattcatagtttttccatgtgaactctaatgaaaacaaactttatatcaaacttgtagccctcgacgcgatctacaattttatagttgaatttttttattttaagtcattttttgtcccaaaatgtaattttaaaattaaaatttcaaaatctataaacatgcaacaacattttgggaccctaaatagttttaattcaaaaccttttcaactacaaagttgtaggtcgcgtcgagggctacaattttgatataaagtttgtcttcattagagttcacatgaaaaaatatgaattattttttgatataaagtttttagaccgtcctgtttagggaccggggtgacacaactgaacaagttggaggacctaaacgagtgatctgcaagtttagggaccgggatgacacagtcgaacaagtttgaggacctgaaaggtcgatttgcgagtttagggaccgggatgacacaacggtacaagtttagggaccggtgatggactttactcaaaagagtaaaataaattataattttgacaacttaatttcaagcattttttatataaattcaaatttttaagtacttattttgacaatatactagcgtggatttgtataaacatatttatattttttcctaataactaataactgaaagtcaattaaactgaatatagaaattattatatttcggttgatatttgagaaggtgaagaaaacaaaaaattcttaaaggtaattggatataaattgtatgtgcaatataattcttaaagattaaattcaatattataaggtaatatttgtatcaactaaaaaaaggtaatatttgtaggattattgtgttttggcatattgacatagtgaaaaaactcacctagcatatgcttatccaaattgatttaccaaaatactaaattattaagttcttgtactagaatgcacccacttgtcaaattgttacacttggacgttcaattctaaagttcttgcactatatcgcacccatctgccaagttgttataccgtgggcgcaatttactcttcaaccttttttttttcaaacttccaactttcttcaaacttcacttttttaggaactgaacacacccaggccgtatttagttccccaaattccaactttccatcgcatcaaatcacatcgaaaactttcctacacacataaactaccaactttttctttaacctaccaactttctctcaacttctcaacttttccaccatctaaacacagccccaatttctcggatgaaaatcgtgtgaggctggacgctggagaggatcttgccggcttgccgctttggggaaggagcgattattatagatcaggttctcgctgatggttcgctgtttcagccactccgtcacaacgtgcgctacagttgagtaccccaacttcgccgctcgtgtgacgtcgccggtggccatctccagctcagacatgtttgtttcctaataagataagctcccgtgtgtagtgcatggtctcccgcaaggcgctaggcgctaggagcctaggatgatggtgatgtagtacttactcctacaagggatcaactacatcaccatcaagtttaatagttattgattggcggcaggcaatgccaacagcgttaggatgttgatgagcgagtgattgggtggtgtcccaatgctacgctacaattagcggaccaatctgttaatgttccattagggacacgcaggggtactccaactagagtccctttcttcctgtcaattcatcctattacaaatccaaaagttgaacaaagtatggaggcttaattatcttgggcacgcactatttgtggatgcctcgaactatttggcttccaggtttaaaatttgccatctttttttttctatgtcgacactatgtcctcatcttttatttgagtgtcagattaaacttgctgcttactacccctccgtgttagaaaaagtgcagttttacacggttcatgttcaaccattgatcatctgttttatttttaaaaaatatgattggtattttaattgttattagatgataaaacataaatagtactttacgtgtgactatttttttttatgttttccataaatttttcaaacaaaacggacggtcaaacgttagacacgaaaactcgtatctacgcttaaattgggatgaaggtagtattacttgttggatgaacaactgaaactctcggatgtgacgtcaaaagaaaattgggggtgggggattggaataaaggccctggttagttccttttcatcctgtcacatagaatgtgtcggagaatgaactcctccaccagggaactgtgaggcccccctttgtgagttcggccgggggcagcgggtgagattcgaggatttggtgagcgaagctgtgtgatcttgagggggttagcccccccctcaagacgatgagacaaaagaggtttatacaggttcgggccactgagaagcgtaatactctactcctgtgcatggttgattgaatgtaaaacaagtgcttggggttgcgagacccaagccccagttcaccccgaagtccccctctccaccactaggcctggacctccttttatacctcaaggggttaccacatgggcccaacaacctaacctagctccggtggagaagtattataatctttgtattaaatgcatgtcttgtctcttgacttgggaagccaagcacacgtcatcttgatgatggggcctgtcaaatcttgccgcctgacacgggggtgcccctgtcaatcaccatttaatgggtgaagacttctgggctcctattacaccgagaaacgggagccttactttgaccagagcgggaggaccgactccggctgggataagacaatgagaaactctcaccatcattatttgatgggacatgttaggctgcacgccgcctgcagcgcacaggcgcactagccagtcccatcggtcattcgaccagtcacagaccggttgagtgcactgcacgctgcgcgaccgctcgggacgccataaatgtgggtaggtggacacctggaggcggacacctaacccaccgtacgtggtgacctagagagggggtcgggggagcccgacccctagtcacgggagggggcggccgccgcccgacctcggggggggggagccacgtggcgcctggggcagccttctctctctagtctcggccagggagtggccgccgccctacctcgggcccgacccccctcgggggagggccatgtggaatcgggaggtagcctcctccatccagtctctgggaaggagtggccgccgtcctacctcgggcctaactcccctcgggggagggccacgtggcatcggggggggggggggcagcctcctccgactattctttggggaaggagtggccgccaccccacctcgggcctgactcccctcgggggagggccacgtggcatcgggggcagcctcctccctctaaacccgatactcccgggcccatatcaccgacagaatgtttagacacatgcatggagtattaaatatagataaaaaaactaattacatagattgcgtgtaaattgcgagatgaatcttttaagtctaattgcaccataatttgacaatatggtgctacaataaacatttgctaatgatgaattaattaggcttagtaaattcgtctcgcagtgtacaggcggaatctataatttgttttgttattagactatgtttaatactttaattttgtgtccatatatctgacgtgacacgccaaaacttttcataaaacacaagttttcagcgtcataaaacacacactaaagttttcagtgcttgaatttactattccgacccagatcgataggtgtgaccaacgaaccaactgctgcgaccgacgctacctacagcagatctatcggccaagcagattcacgaggaatcaatcaataaaaactgcttgatccgtgtccttgtgtggccatggaggtgacgcaggatatactcgtctggcaccattccaataagctgcaagattccaagccttatcgagataattaaaaaaaagagatactatcgtactggtcaatttgttgtggtacactacgacagcgaaatggagacggtcactcaactcttaaacaattatgcttccggttttattcaacagaatttgggttaacccatctgaaaaaaaaactctcaaacaaattattcgtagtaccctagagaatcacgcagggtaatccacaagagagtttcttgtgtgcttggaattaattagaacccttgatcacctataatccaacgcactaagataaaaggtacaggagcaaagtagtaaaaggatgggccaggtatgagaggtggaaggttaaaatggtaattaacttctatagttgatttgtgtggttaaagataaatgcgttatcttttcaatattcatctctttacgatccgctcaaaactcccgatccgttccaaatgccgtgcacgtcctgatgccaccgctggctgctcctcccgccggttcctcgccgggacgccggctacataagttgatgttcggacttctcggataggttggccttcagagtgtgccgtccatgacctcgaggtaaaagcggctgccgctgatgtcgagtgaacctgccggctttgcataaacgtgcttgatctgcttaattaaatgatcagcgattaaccacagaatatcttgttcgatcaggatagcaattagatgcatcaatttcgcaagaaatcaatgaccaaacttttcaattccattcaacagctttcgagccaatcaatgcttaacaaaaatgaaataatgcttcagcatttaggaaccatcagcagcagccagcatccagccgtcggtcgcaaccatcgtacatgcccgccggtcgtcgctgccgaacgcaaccgtacgtgcctgccgatcgcagccaccttgcgtgctgcccctgctcctggtccgttctttcacttgggatttaaagttagggttagacatagagagattgaggtcacgctaatatcgtgaaaaaaaacaatctcattgaaacgacaacgtcagccagcggatggggattggacaattactaagctacccttgttaatattatttcataatcctaaattaccctttaggaatcaatggtggatattaattagtttaggaggtccctgggatacctctcaagcaccgtaaaagatctccacaattcattaacatcaataattatgatactaactgaggatagttcttcagtatcttcacaggtacttgtgtaactatatcatatcatcgtaactacgtgtagagctggtatctggtactttaaactgcacaaaactacgtgtagagctggtatctggtactttaaactgcacaaaatggaatcgtgtagtgatcttaatttatgtactctcatgttagtctaccatcaaggacagctgaagccttggacacagcccttgcagccctgtaaatttcatgctgcaggagctgccaagattcggttgtgttgagcttatttgccttgtcgatggccgacacgataccagggaatgccttggtgccccagtcgtcttggtcagacgatgcgtatatctgtcaaaagaaaaaaaatgattggacataggttatcactttgtcagcatcaaatttggatcagaacggcataccaaactgcagaactgatgatactcaccatatgtttgtaccacggcctaccgtcgagcccttcccggttgatgaagcctcgctccgccatcattaaccggtcgttgatatctctgacttttactgtgtacgctctcgtttttaggctccagttttctgcttgtagcatctgcaaggcagaaatgagatgttttcattggaatgttggagcaattttgcgcgccatacacttctgtttcactgaaaacggaaggcgttaccatcttttctttgtgaattttgttggctgcttttctaagctggtcaattgacttgtgtaaaggagcgaaactgacaggacatcctgtacacccaccttccacaagttttgtgcatttctgcgataaaaaatgtggcaggtaattcatatgttaagcatttgctgcagattgttccaccaactctggtaatttcataacctaacatttacccatcagcgaaaagtgtatcacaattatgttctgtttttatttataaaatgaatcgaggctttgtcttgtgtcctaaattggtcatctcaattgaagaaaagaaggaaagttacctccagttctgatgcgtaagagacataattgaggggtaagatctcatcatctgcaagcctcaaagcaatcagaccccatacacttgccactgcatgattatgcaagcaaaacaaatgaatctgtcagtgtttgcaatgagatgaaaaacctttgaacaacaactagttcagtacatgcaacatgtctgtgaaacaacggatctccgaatctctccatccaaacataatcatcgtacagtgagtggtaaacagggtaatcttccactgcaagagcaataatattagtagatgctaaaggagtgacagcagcagagactgcaaacaatggtgaagtaataaaaaaaattaggagttatcaagatcaacatctccaatatataatcattacttgttccgtaagacatgtcaagtgaaggtactccaatatattgtagaaaagctgcaaaatctgttcctgctccagccactctatcaatctgaaaagaaaactttatcactttcagcacaaagataattttattccagatctaagattgcacataacaggattataaagccatttcaccactgtacaatgtacgcaccggaggatggtggcgaatcatagtgtcatacaatgtctgcgatggatcatcaggatcttgcaccttcaaaagagagggtggaaaatgaaatgatttttgtgcctttgtaagactgctatatactttgatattggccctgttcaaagaaaatttccctccctccctctcttttcaaaatgacggtcttagttatacttcttaatcaaaaacaaaatctggctgtccaatttgtaaaaaaggaaagacggagtaaagcttaaataccattttacttgcttctttgatcaactgatcaagttgaggggttgcccggggcctaaaacctccagggccaaacactgttatatccacattcaaataagcaatagctcttgaagccagcatatccatgttgtcctcgacccattcagtagaccctatctgagacattgagtgtgccgcatcaatacacaaccttctgataaagaagcaattcagaacaagtgatcaaggacataccagagcaaactcttctgcatcccaactacacacaatgattgttcgtctaggcctccatcccttcttctcaagcttggacagcctttctgcgatctatatatatacgtgtgatgctaacattatatcatcaactcttggcattcagaaattatagatgccttttatcatcaacaaaaagaatatgcacttaaatttgttgtttggaaaatgagacaaaggctaactagaaagggaaaggatgaaatattcatgtctccaaatgtctgatgaaagatgacatatctgtataatttgctcctctaaactgaattgattacctcgagcatagctgctgttccactgttgggatcaactgctccgaatgtccaggcatcacgatggttccctatgatcacatatctgttcacaaacgggcaaatttatccttattagctttgccttggctttacaaaatttctagaaatctaatcatctcctgtgggatgaaaaatgaggactttgatctaaactcagaacaatatgcagggcagggcactaagtcaaagcctgataaacagtgataccacgtgtccacgtgcaactgaattctatacgtatgcagaaaaagacaatcaggaatgccattcacttgttcgagcgagagattacctatcaggctcttcttttccctcgatcacggcaaagacattttcgatggttgctaaggtgtcatttccctgcagttcaccacagaaacaacgatgagtcgatgagttttcttggataatgactcaactagaacactaagatccactcacaatgtacgtgagattcagcacagcaggaccgggtccgaggcggtacatgggcgcgccctcgccgccctgccactccgtcggcgccgcgtcgccgcccatcgccttgaggatcgtctccccgtccctcgccgacaccggcagcgctgggatgctgggcatcgcggcgctcccgtcgagctccccctggctcagccgctcgcagtcctccccggctgcgcaggacggccacagcggcgtggtcgggtcgccgttcccgtagtacagggtccccacctgcacgccggtcggcggcagccagcgcgcgtcggggaaccacttccgcttccccttcgctcctgcgccgccaaagtccttggcgtcggtgtagacgatcgcggcggcggcgcccgcggcacgggcgttccgcaccatgtcctcgcagtgcaggtttccgtagcgcacgagcgcgaccttcccggcgacgtccacgccgcgggaggcgaggtactcgtagtccttggtgttgccgtagttggcgtacacgacctcggcggcgacggagccggaggcggagtaggcgaagtacgtggggatgacctccgccgccgcctcggagtaggggtccccggggtaggtctcctggaccagagcgaaattgaaggcggccgcgcggccaggcacggagagggagagggagcggtggatggggtaggagagcagcacggagtagggcgtgacgcgggtggggaatgagaaggaggagagcgcggcgcggacgtactcggcggcgacggcgttggcctccgtcccggcgacgtggggccggagggtgagcgcgcggaggtgcgcggcggcggtgtcgttgttgccgagtgagaggaagagcgcgtggtagcgcgacgcgggggccggcgcgaggtggtggtaggaggcgaccagggccacggagatggccaggaaggcgacgaacctgcgcctcctcgtggccgcatcaccgcgcccgccgtcgccgcctcccatgggcgcagcatcggggaggatcagcggctgccgctgctgtggcttgccgtggcgagacatgggtgatgggcgcagtggcttgggtggagtttggagaggcgtcgtagtttgcggttgcaagcaacgtcactttgtcagcgccaagagcccaagaggttgtatcgtctcgatttaattgggtcgttcgcatcgcaccgcagcgcgcggtgctcgcacacgttgcaacttgcaagttgccgcgcaatgcttcgttcggcttcaataattaaacgcttataataagtgtggaaaaatatcaaggctgattatgagcgtcagccatcagctcacttttgttgatgcccacgagtttttcctctaaaaaatattagctcgtgagcaacgttccaactccgcgagcgaaaagtagtacttgtctctctaataaacgaagttacggattgtctctctaataaacgaagttacggattatgacacgttgaaatgcaaaccatgtttttaatatactccctctgttttttaatagatggcgccgttgacttttgaatatatgtttgaccatttgttttattaaaaaaatttatgtaaacgtatagatataaattatgcttaaagtactttgagtgataaaacaactcataataaaataaattataattaagtaaattttttgaataagacgaatggtcaaacgtgtgataaaaagtcaacggcgccatctataaaaaaaatagagaaaaatagaggtagtagtatcttaaagcataatctgtagtgctgtagtgcgggttagtttctagaacgtttggtggttggtcttgcgctcttgttaggaagaggcttctggacgtggcttctctgatatagagcactactcgtactttggataatacaaaattttgatacagtaattaaattgaaaatgtgtattttgttcagacttcagaggatttgaaattgtgtttggttcgtcgcatgaaccaaacataagatgcgctttgctgagttttttctgcacccaaaggcatcatggagcacatcgttgtcgaaagggtgaaccaattcggatactgggaatcgacaacaagattcattcaggtccttgtcaaagattggtcgtaggtggaaccggacaacggcacggaaccaccacgaattagcagatgccccacatcaataatgcgccacggcccagttcagagcgtagcaattcatgaggatttttttggcaggaaattcgtaccctttgcttttcggagttgaaacgagaaaacgcaacatcatcaccaattacaccgcatcacctgctcctttggaaaatactcaccggccggaatggcaccgcgacgacaacggcgtcgacttcaatcgacgtgatttgggcaatcagtgcacccagaaatcaacgagacagccaaagctttggactttcgggtccggttgatatcttccaacggtccaaggcctatccaaaattccaaatatcccaactcgaataaaacgaggagaacatgcatgcatcaaaatgttgctgggctcaaaggccttaaaatgttttcgttgcatggcctaccttgggctaaatcagatttacggcttgtttggtttctagcccaaatcaaaggaataagttcactttgggtccctctatttgtcgtccagtccgattttcgtcccttggttgcaaaaccgggtacgacaggtcccccaacttacaaaaccgtttagattaggtccctcggcagtattgtgtctgatttttgctgaggtggcgcctacgtggctccttttaattagtttttgtctaacgtgtcattgatgtggcgtttacgtggctactagattaagggtgtgtttggttcatagtaagactggataggatatggccatccatattttgagggatatggtggtccagttttttgtttggttgggtggatgagaatggattgaatgaaaacaacaacatattaattaataatgaaatatgttaattatcattaatatagccataatttatactaattaacaataaaatagagtaattatatctaattttgacaagctaattactgattaacaataatataatttaattattgctaatcaagaactaatgatcaaaattagcaaaggtgaatatcctcatccggccaatttggtcgcatacactcatccagcatcttcgtggaatattccctctccaggccgtcctatccaccttcgcccaccaatcaaacacactcaaaaactggatcgccatctcccatctagggatatccctccaaccaaacacaccctaaaaaaaacccgtgggacccacatgtcagtcacagacacaaataataaaaaatggtgggcccatgaagacccacacatcattctctcttttctctatccctctctatcctctccctccttcttatctcgctctccaagccggtggagcggcatgggcggcggccgaagcgggcgacggcgaggtggagcggcagccggagcgggcaacggcggggcggatccgaggggcgaagtgggtcgggcggcggctgatcctcgctgacacctcggtcagcatggcaggagagtggaggcggccgttccgcgatccgccggaaccagcctggcggcggtgacggcgccaccacgaagccgagagcggagggcgatgccaagggggaggacgatgccggagggaacgacgatgaggaggacatcgccggcgccgcgcggtccccctgacccgcgctggcccccgccgcacggaggatgggggcgtcggcggcggcggtgatggaggacggaggcaactggatcgagtgggcggaggaggacaaggagaaggtgtgggcgcgggagtcggcgcccgtcacagagatgcgccccaccggcgacgagcgaagccggcaggcgagaggagaaggaggtgggacggtgacggttgcaaggtcgacggtttggtcgccgttgacgaagacgacgggcagcatggccttgggccgcggtggcagtgggggggaggcacgtggacgcgcccgtgcaaaccttcgcctccgaggacgcaaggacgcaagcggccgtgactagcagcgccgacgcgggagcagggcggcggcggcgctcgggtctacacggcgctagctctagcggcggcggcatcgaggagggtgtcggcggcgcgcggggccccagggcgcaagcggaggatgccgtcgcccccgtctctgtcttctccgctggcacccccaactcgccaccggggcagcctcgccccctcgaactcgtcggcagtgtccgcatctgaccctaccccgtcctggtgggagacggcgaggtcccacatcctcgcgctctccaacatcctcccgccgccggccgattccgacgtcgcggcgctcgccgactccgactgcccggcgcacgcgcttcttcggtcacccgcgcgcctacgccgcgctgtccacggcgctccggtcggggggtagcaccgaccacgctcgccgcagccgccggagctcgcctgctccgccgcccacacacaccgtccgctgcccagaaggagagagagaggggaaagggaagagaagagagaatggagagggaaggaaagagaagtgaggctgacatgtggggcccacatgggccccaccattttaaaattattttttgtgtgcagctgacatgtggggccacgttttttattattttgctgggatataattgccacgtaagcgccacgtcaatgccacgtggggtgaagacctagtcaaaaaagccacataggcgccacatcagccaaaaccgccgaaggacctcgtttgcccggttttcgtaagttgagggatgtgtcgtacccggttttgcagtcaagggacgaaaatcggactggacgactgtggggacacccaatttaggcttgatgccccaaaaatccactcgtgatcgtccaggatttcaatcacgcacagattgatgtacagaacagctttcgattatttacacaggtttattcatacaagctaattatactactgttaaaaggtgaaaagatccaaactaaagaaaggatatttaaagatatttaaagaaaggatatttaaaggaaataaagaaaaggtaattaaataaagaaagaaaggatatataaagatatttaaagataatttaatttaaaaatggttttaaataaaataagaaattttaaaattaaagggatttaagataaatcaaataggtttaaattaaaagggtatttaaacaaaattttaaataggaaatttggtatcaaaagggagggtttgaaattagatgaacttagatcaaaggttcactggaattggatttgtggttggagagatatgggtgcctaaagtttggaatttgaaataactcaaataaaagaaaagggattactgtacagtggggcccgcttgtcatatgtctcttctacctcttcttcttctctgcttctttgatccgagaggagggagagaagagggcgagcggggcgccggctctccggtggccgggaggtgggaacgccggtaggagatggtgttcccgagcaacgcgcacccggagagggtggtggaaggcggaggaagagagagggatggccggaacggcggcaacaagagctcagttccggcgataagagaaggtggtggtggcggcttatcccaaggtggagggagaggggaaagggggaaaatggaatcatctgggcaaggcggagttggtggcgcaagggtttggcttgcgaagcttcggtgagggagatcggccgacggtagtgatggccggacatgggagtagagagagaaaaagggaaagctccgttgtggagagggagaggggcgacctcgttttctatttataggtcgcggaggtcggtttggagagaaggagagcgactaaggcatggcgacggcagcgaagagaagaggagcacggcgccgatttcttagcaactacggaaaagagtttgcggcggcgtgcgccgtgcgcaacacgtgcactgggaggaggagagaggcggctgggctgtgggccggctcggctgggcttcggctcagttgggtcggcagcccaagaaggagggaggaaaagaaaaggggaatgggccaaaagaaagggaaattggcccaaaataaataggaagttttgataattttgtatagaggattttgaatggaatttaaaggagatggaaactaaaggatagatggatgtggatttttttaatcttagtcaaagaattgaatctaaggaattttgaatggagggttaaataaattttaaaggagataaaatttaaaagagaaacgcttgagggtcttttgaactttataagaggaatataaagtttttttaaaagcaaaaatgagtttaaaatatttttaaaataaaatcaaatatatttattttgagatataaattttgaaaaggataaaaataaagatgctccaatttaaatagaattcaaataagaaccaaatgtaaaacttgtcacgaaagatttaaaaatcaaacggaaagaaaaggcaataatttaacttctaactttggataaatttgggatggtggcaaaaatagatggaggtaaaaactaagattttagcctccaaaatatgtggtatggattctcagtgaattatttgtggctaaaggaagttggactttgaatagaagggattgcaaataagtttcttagcacaagagcaatcattcaaatatttgtgataatattattcttgtgccaagaatgtgatcaagtcataggaatcaaattggtggatggatcaaaataggaacttgaccacagaatattttggatggattaaaaggagacaaaggttttcggagataggtttagataggggttgatccaaaataaattccaatggaaagggaattatactggtttaaccctaaagataaaaatggttaatggtatataatagagagttgggtcaatcggggaaatattggcccaagctaaatggtagactttgtaatcttgaatggataatttaaatgaacgagatttcaaagtggtaatatttgtgagagtatagaactggatttggaagtatatgtggatgggaatttttctaggaacggaattggtggtatattgataaactctaaatgatgggtatgttgactcaaaggggggattgaagaggatatttttagggactctaggaatatttaggtggagatccaaaggaaatgtatcaacatttcatgtattctggagatagttgagtggagatcaaaaagaaagtattgcttcaggggaaaataataattggtatttgtggatgttggagatgttcaggaatggaatcaaaggaactataatctagagccaaagttagagattaaagaaaataaatagagaggttttgtaaaatttaaaagagagcgattaactttgcaaataaagttttaaatccaagttaaaagaaattaacagaaggtaagatcacttcaatagaagaatcgagaagagtgcaactaaaatatttcgcaaaaaaaatttctctgaaaatttgagtccgttacaacgacaaatagagggacccatagtgaacttattcccaaatcaaacgcacctaccttgggctcaaaggccttaaaatgtgagacgatgattcatttggtttgttgccaaaagagttggtagcaaaacgtaacccaagtctatatgctcccaaaaatttggaaagaaagctaacaggcaaacgacgtcaaatagacaaagaaataagttcactttaggcccctctatttgtcgcccagtctaattttcgtccctgaaccacaaaactaggaacgacccatcccccaacttacgaaaactgggcaaacgaggtccctcggcggttttgataacgattttggctgacgtggcgcctacgtggctaatttggctcggtcttcatccgatgtggcactgatgtggcgcttacgtggcaattcgatccggaaaaataataaaacccgtgggacccacatgtcagtttcacacacaaaataataaaaaatggtgggccccacatgtcatcctcactcctccctcttctctctatcctctgctcgccgccgggggagcctacctcctcttcctgctcctcttcaagctcccctccatctccatctccgtctccactgcctcgccggcggtggccaccacgcaccgcccgcgccaccgcgagctcgaggccgcctcctccatgctcggctactactcctcctcctcgcctctccgcccgctcaagaccgccttcccttcctgccgtccccactcttcgtctcgtccatccgcttgcgccgctgcaactcgtcttccatcgatgcttccgccgcctccgccttcactgctgtgcacccgctcatgcaccacctcctctcctcctcctcctccccttccccgtcatcctcaccgtccccatctccatccacgtccgattcatgcccgtccacgatctcagtgcctacaccgcctacatgtactgccgatcctcgtgcgacttaatctccccgcgagcaagcgcggggtaggaggccccgacgaattgagctcgtgcaagaagatgacaaaaatcaagaacacgatgcaagtatacatgtttgggccacacgggtgcgtaaggccctacttctgtgttttgggagatgtgaaacgtattaagcgaccaactctagattagatgccctttttccctttctaatcttccaaccccttgctaagggggtgtttggatacattagtcctaggactaaagattagtctcaggactaaaacattagtcctttttagtcctagcctgtttggttgaagggactaaataggactaaaaccacattaattgagctgtctagtaggtattcataggtactttttaatgaacatgcattgcacaaaacatcccctcatgcagccacagatcaaccaagaccatcttgcggcatggcaaacagattcacagtagagattacaaagtacaagaagatttgttcacaatacagagttaaaattcaacacagttttaggccatcaagcacagtttgacagcaccaccatatgcagacatatagcatacacaatgaaaagtacagtacatgaaaatgcaaattcccgcatacatatcagttattacaagttatatgttccaaagtccataagatgaataaaacaggagactacatattttttaaactccacagtccattggcaaccgtgtcccgaaattgattcatcacttgactatccaaagagctggttggatcatttgattaaggactttgctcagacaatggaacatagctttcatcttggtcacacatgtcgaattcacagtcggctagtttactatctctaatgaaattatgcaatgctaggcaagcgcatattatcttactctgtttttgctgtggatagcttggtaagtggaacaaaatcctccatttatttttgggtgaatacccaacatgatccttgaactttcgcttaaggatcaatttagtccctgatatttcgtattgtccaaacaagtaccttaagttcattgtgtgattcaatatagtccttagaccctctaaacatgccatgtgtacatgccacatcatctctgcatgcaaatttaatatttaaatgtcctttacacccttatgttttcataggaaataaagaaaaactattgagaaaacacacaaaaaaaaagcttttgaccattggcaaaaatatgtagcattgatagataaaaaaattgacatttttctttgttttatgattgctttttcttgtttttcttttctttatttgatagaaaattgaaggttaaaatggacatttaaatgttatcttgcatgcacgaatgacgtggcatatccacgtggcgttttaagtgggtctaaggactatattaagccgtatgataatctttagggtcttgtttggacattataaaacatcaaggactaattcgagccctgagtaaaagttgaaggactaaactgcctattcaccctttatttttcaacactccaaaggacctctctatcacatttcgacacgaagaatggcagtagttaaagtattccttcctatgttggggcattatgccttcgttgtattcctgaaagtgataagttattcccttatatggtgcaagataacccggcctgtttgggtaccctgagtccacgagatagaacatttctaacaaagcctgtttggttgaatgcctcattttagctcttaggaagaatttttccttcaagttcttatatcccctagttgtccatcctccttggggacaatttccattccttatttcctcacaggctactacacacaacataaaagtattttcttctatccaacaagccttgtcataaggagttttatcctaaagaaaaatttattaatacatagattaccatattctgtcctaacaaagccagagaaaagtataatgcatctaaaatatacaagatcacagatccaagtctaaaatatacaaccattcatatagcatgtcaaacaggattgtatgtgtaacatttcaccagatcaatgcatgtaacaaaagctcatcaaagtaaatgaaaaaccaatgaatactctggtttggatgattaccgtgcgttgaccatcgttgtcgtcttcgtcatcgtcctcaacgtcgttgtcctcctcttcggcagctgcggttggggcagaggacgtcccagcatcccatcctcctccaccgaagcccccataccccgtagcaccgtgggacatagagctcccacggccgctgacacccgcactgtgggacatggagctcccatggcccacgacacccgcaccattggacatggagcccccacggccagggggaacgaatcccctcatccgattgccggcggcggcaccaatggtgccatcccttccgcggcctcgacctcggcttcttccacctcttctgccgcccctggaaccaggtactggacggcgcgacggggcgatgtcggatctggtggcttggaagagtggaggtattcctccaccatcttcttgcaagatctgctggtaggagccgaaatcggggaagtcttctgcttgggagtttagatccaggcccgccgatctcctccctagaaaatggtagcccgcaccagatccgccatagcctaaggaagcttggctgaatctgtactcggtggcgtcaacggaggcggcttcgtgatgtgcttgtgattgggagaaaaaaatcaaacatgtcgtcgtcatggccggccatggctgaagggctacgagcggcggcggcagagacggcagccgcgctcacggcggaggtggcggccgcgtgaggtcgcgcgcggcggcggcctcgggagctcgcggaggcggtggccgcgggagcttgcgcgtggcggaggtggcggccgcgctcacggcagaggcggcggccgcgtgagctcgcgcgcggcggccgtgggagctcgctcggcggcggccgagggagccttcgctcggcggcgtcggtggcggcacttgcgccggatggggggagtgagtagtacaggagagagatagcgaagtgtgtgagagagagaccgagtgaagtgggagtgacatgatagggttaatgcgctctgttataggtttttagaccgtataagctcctcccccagcgacttattggcctatgctgttttagtctcttttaagtccctcccgtttggtagtttagagactaaaaaatgacttatttgaagggacctatggattagtccctcaaaccaaacaccacctaagttgcataactcctcttatacttcgaaggggagcctgcgccattacattttgcatagggttatgtctatgtctagtcttgtcattgtccctcctgtcacattagtctgaatgtactcattgctactgaccgagcctacgcttgtgccccaggaagctgagcatggggcccaggacagctggaacgagcttctagcgtcacttatcgtgaagtcgggcctagtggacctagatgagggcgtaggggattgtccgcccttcataacaccatgcagccataccaagtgttgctcgctggtgcatggcgcgttgttctagccctattccttcgggtgacacaactagcttgatcacttcataccttgccacctccttcttgcatgtatctgagttgtaatctcgaattgtaattatttgggtaccgctttgctgtggtttaatgtcattgctcgctgggcccgctaccctgcatagccggctgggagatctccaccaagctcagggcagcgagcaccaccgatgtggtctccaagtcaaacccaagtgacatgtgcaattaggctcgccttttgacatggtaatattatcatggccggactcatgccctgagaatgcaagcagtctgcaatctcaaggcgcggttcgtgcttggcgttggatccgtgttcgggccctgcaggtaccctcgggtctgcacatgctcccatgctgcttgacgagatgtcgtgttatttctgataagcttctcgaaaacgtcgttgatgaaggatttcatgatagacatggcctcagagggagtgtcgatgttaagatgtggatcttgtaggtttccgcactcttcttgatatcttgaagatataaaccttgtgtggcgttaggcgccgggatcccagggcccaggatgaaccaagccttgggttcccaccttacgccacacatcacctaccaccttagtggttttctgataggtaatgaattatgtttgtgtgaagacgatcctgcaagcccaaggtgcaacaggcccttggaggaacaagaccctggttcccatttctctagctaccaacatttggtaattataaaaatttctactcgcagaactaccaatttaaggtgtcaaaattttggcattagcaacaaatgtgttttttttttcagtgaactcaacaagcctttcgatctaagcttcaaacttcaaagagaactacactgatgcatcacaggagatcgaagcaaagagacgatgaaatggtgcaagatcattgcattagaacttgcaaggcacatttggtatacatacatggttacatatcacccaccaagaaatatattgcactgtggtagatactttgaaaagaagatgcagaaaactgctcaactgggcaagaaaccagcaaaatgcaggagaaggttacaggggaaaacgcctctagtggagcagggaaggagatcaccgaagagcgcatgggatagcaccgtagcaaccaggccaatcttacaggatcacctcccagccacaagaccactgaacacttggctgttcccagctagcgtcgcttcccactcgatcgacgacagcagtatttgcgatagcgtgattactgcctgcttcatgtctggccgaagaacaggatcttcctccacgcactgtttcgctagcatggccatctttataagaagaatttagagtgagatttagctttgaagcaaaggtatgtgaaatgtgcaggagatgttgatcatcaagcaccaacagattttattgtgcataccttgtatacacagtcatgtggatacaggtccattagattagggtcaatgcagtctttcaggctccccatatacattgagttacgacaattctttagtgcactcaacatctgcattgttaaaactaaattagttcaaaacttttggagtcaaaatagcaagtaaaatatactaaaacttcaataaagccagtgaaaaacactgcaacttgggatggcaaaataattctaagcccgtaagttataatgggcatatatgttcaattgcttatgctgaacctagaaaacttacaactgatgccaaggaacgcctttctgagtttgatccttcgttcaatccatcagtccttgtaattgcctcctttccagatattaactcaaaaagtactactccaaaagcataaacatcatttttcgtagttgccaggccatcgcgcaagtatctacaggaataaatgaaatgtcaggattgagctagatatttttcttttccaaatccatactgagctaccagaaaatgtactcactcaggggccaagtaaccaaatgtacccacaacttttgtgacagaagcctctgcatcagttgacttcactaccagttttgcaagaccaaaatctgaaatctacggagacagaaaatgcaggtaaacaagctgttctaaatggtgccaggagaaaacaaatcagtaaacaaatttcaaatcaattaacctttgctctgaaggattcatcgagcaagatgttactcgatttgatgtccctgtgaacataatgatcctttgtatgctcatgaatgtattcaagtcctctagccgcatcaagagcaatttggaccctgtagatccaagacaatgatgtgtaacctgaaaaagaaacaacacaaaatcaatcaataacgatagaaaatgtatgtgtgttcagaaaagaaaagttaacaaaacttgagttagcagcaatcaagaaatgttctcaagcagcaatattttagaacttgtacataagggttgcttttgattggtacctactcaacaaatacaatatcaaaactgctggaagtggaaacattacatggcgagattacccaagttaaacagaaagcaattagtaaatcactcgtacaagtcctaaatgatggtatacctttgctttgaggatcatgaaggtgattcttgagtgaacctttttgagagtactcgtaaataaggtatagttcatccttgcttgctgcatagccaatcaactctacctttgacaaatcatgggtaacacaaatgaaattcaataaacaggatataagacataatctattagaaggatttacacaactgtaaaatggcataccagactggcatgatggaccttacaaagaactttcatctccactataaactctttagttttagttgctgtcattctctttatagcgacctcctatgaaaaaacatatttgttattggcaagggaaaatcacaacagttttgcatggatatggtcagctcagatcacatacctggtctcgaagaacaccataataaacagagccatatgtaccatgacccagaagatttgcatcagaaaatgaatcggttgatgcaagtatttcttgataggtaaacacaatgggcttctccctatcaaacacgtccactacaacacctgcatgagaggaaaattgagaacagcttgtatgtgagaggaacgaaagaaaattagaacaaatcaaagcagagcgttctaggctgctagaaatggcttgtcacactaagaaatcatgaagttgtttagttgtgaatttgtatcttgacgttttgttttctttgatattatttggacaatgtacttcagtatagaagttcagatcatcagatgtgtttggtgctacttgaactcatacaaaaatttgaacagatcgtattcctgcttaaatcattgcaggaaaagcaactaagcgatgctgacatgagtgtcatatgcaatgacaatataacattttgaaaaaacaaaacccctaagggatatgcatatgacaacatttcgatctttaatatgcctatataaggcactagattcatcaggccactcctatattaatatccacgcaaaatgaactcagcaaaacccattcaccactgcattgccgtgctgtgcagatgcagtggccaggaattattcccatcatatatatacaaaaaaaacatgttatgcagcacaatgatggttaaaaggagatgaactaaccttttggggtattcatatgatgatcactgccatccgttcttgattgtttcacatttccaaattggcaacataagtatcttccagaaccataacaaaaactaccactcttaagaagttgaaacttgtgtgatatagactggtctgggctctttccctggttatttggagcttggggattgtattgggagagcttgcacagaacaagtgcaaggagagcaatagcaatcaaagcaagtgcaactcccatgctgccaataacccatccataagggaattttgtggaatgatgttctgatacatctgccgatgtaattcagaaaaatacactgttagtttatcataaaaaggaacatctcaattgtaggctacccaacctaacaaaaccaaaatatttcaacattaatacttgaagaaaacaataggacaggatcctcagaatgaagtgccaacaatgtggtagcatgttatacaactattagcattaagtgttctcagaatatcatatagctgccaaaaaaaaaacctagaaaacaaagtgcatcaactctaacaggtacctccatacctgagaatgtattttgtgcgggtgctggcgcaggagtaggagaggaaggagatatcacgggatatggttgtccaggaactgcacatgacatagttttacaggaatgaagccaaaaaaaaaaaaaaaggtaaaagcaagaactatgcccaaaagaaaccttacaagctagaagagaggtatccaaaataacaaaataaaacatcataaaagaacaaagtggaataatatcattgtatttgtaccaaaaagggagtgctatacagatatgaatgataacattgaacaaggttaacccgcaaaaatgcaaaataagaaaataagatgaagcacctagctaaccaaaaaggccaatattgccaaatattaaacgtattgtggtccttgcctgtaacttagggtctcattctattaaatacatcaaacagatagtaccttatgtttggtgacaacacaatttggttaaattcttagtaaaacttagaagcatggcatgtgtttcgagtacaatcattcgatatcacaatgtgcctccttgtttgtgccaaatttgtctgtagcagcacatcatcagatgccaccaaccagtctaggaatgaagggattattttactccattcagtatagtctctacaggcaatcatatggacctcacaactccatggtggtaacaattttcagagatttgtttaggctgaactaaatggtaatgagcactttacgtgtttcagattgttattttactccattcagtatagtctctacaggcaatcatatggacctcacaactccatggtggtaacaattttcagagatttgtttaggctgaactaaatggtaatgagcactttacgtgtttcagattgttattttactccattcagtatagtctctacaggcaatcatatggacctcacaactccatggtggtaacaattttcagagatttgtttaggctgaactaaatggtaatgagcactttacgtgtttcagattgtgttcatgctattaagttgcatgcaccagccagttgcacctaaaagcctaagctgatagggaaaggcgggcaattcactttatacactccaacacatgctccttcctatctgaggtgatctcaagcaagaaatgaactgttaaatccagttcaatatagctgattactatgtaatgggcaagcatctctgttcctccctcattaaataacgctgcatctataaattattagaccaattaatttcaccatgttcatgaaataaatggtaaattctcggttcagccaaaaagaaaaatgcagtataccgtgtgtaaatagggaagtttgattgatcaaattgccggagtgaatgatcgctaaacatttgttcacctgagttgagtgggatgtagtacacctttcccgtggttataggatcagggccggccatgccattggcggcctcgatggcgtccatgctggccccgaaccgacttgatagcgattgcaccgtgtctccgtcgacgccgacgtagctgaggagatagttccaggggccggatgagcagccacagagcaggtggagagccaccacggcgccggggcgcggcggccgcagagccggtccgcccggcggcggcacggctagccccgcgtacgccgcggcagccacgtcggccgccgtggcgttcgccgtcgccccggcggcggcggaggggacagtgtaggtcgtattggcgaggtatgtgcgggaggcgaggcaggagcagttcttgcggacgaacgcgtacccggggctggcggccgcgtcggccgtgatgtcccccggcgcggcgtcgaacatggactccagcacggaggcgttcgcggcctcgccggccgccgggaacgcgacgaacgccgtgcagacgcgcgagagctcggagcaggggagcggcgccgaggcggtgacattgccgggggcggcgtcatcaccggcgacttcgccgggggaggcgagcgccaggaagatgaggaggatgagaagcccgggcgcgggcgggcggcggcggggaggcggcattgaggggggctagggttctgggctcgaggtggcgaggtggtggtggtggggcatggaggtggcagtggcgagcagcgagctggatgcttcgcgtggtcgggtcactggagcacactctgggggacggcgcttttagtaagacgacggggttaattagcaagcaaagcccgcaccgcacgcacggccatgggtactggactactagtagatcactgtctccttcattccttgtgtgttatgcccatattgcccttgcacgcatcaataatccgcccgtttttgcttccgtcggtctgggaggtggtaacggataatggtttacgacgcctcaacttgttgagtgctatctctgtttcaaaataaatttactttcaagtaaaatacatcagcggtccttaaaattatcgtgaggtttcacttaggtccacaaacttgtaaaacgcacattgagatctctaaacttggtttattgtatcatttcggtccaaagtctcgtttgaccgtagtcttgcctacgtgacacgccacgtggacgatgacgttgaattttttattttttttctcccttcttttcttttttttctcccttcttcattttttttctccggcggccgctgcaccgcgagctccacagcagcgcctccatctccttctccatcagcctccgctccgctcgccgcagctttgccacccgcttcctgtgacctcgtgtggcctcctctctagctccatgccagacaccccgctgtcgtcttcctcgtcacggcgacgatgcctaaccctccttccagctcgatgaactcaccgtcgtccgaccactcctcttcctgcagcggcttctcgacctcgatgatgacaacgacaacgacgacgtggtgcgaagctcgcgacgttcattgtgccggcggagatctacccagcgaggctgcgtgcgacgagccacgggatatcggcggcgtcggggaaggtgggcgcgatcatcgggtcgttcgggttcctgtacctggcgcagagccctgacccggccaaggcggcggcgcacggctacctgccaggcatcggcgtccgcaactcgctgttcacgctcgccggctgcagcttgctcggcttcctcctcaccttcctggtgcccgagcccaagggcaagtcgctcgaggagatgtcacgcgagaacgaggtcggccagccatgatccacccgttaattccaccagcatctgtatgcaagatccatgcatatgcacggttagtccactatgagatttttgttctcttttttctagaatccattggaagcatatgttttcttctctttttttttctttttggggtttagagcggtgacaattagaggcagtatgatgaaataatggccgccaattaattgttgacgacaatgtagtttagcatcaggtgggtcatataatggacgatcattagggttcatgctgattctgtttcggcacgagggatcctcgggttcgctccttttttctgttgatgatctcctccaaaaaaacaaaacagaacgcatctctctctataatcaaaaggattccagctcgatgaactcaccgtcatctgatcactcgtcttcctgcagcggcttctcgacatcgcctttgtctggcgaggaagccgcacggccgacgccatcggtgtccgcgaaataacccgaagcaagacgagtcgagatcgacaatgacaacgatgacgacgacctggcagccacctccatcatcgccgtcgccgccgctgcaatggtcggcgtcgcgtcaatagatggcaaaactccgagaacacaaccacgagacgacgtcgacgttattgcgtgcacaccacttgcgagacagagagcgcgcacgtgcggtggagaggtggaagaaggccctgacaggtgggcgccggccctcagcggcagatgggagaggagggaggcaaagtggaaaaaaatagagaagggagaaaaataaataaaaattacatgtcatcgttcacagggcgtgccacgtaggcaacatcacggtcaaacgaggctttggaccgggatgatacaataaaccaagtttagagatctcgatgtgtgttttacaagttcgtggacctaagtgaaacctcatgacaagtttaaagaccgctggtgtattttactctttactttttatattttacacgtatgaatacaaaactaaaagtactttatcaaatctcaatagaactatttctcatcttatcttcttctaatacaactgtttcctattttcacaaagcatgatacaatgattactttaaaaatttattttttaaaaaatggaagtaactataaataaatttaatatcagaccgaagaagtaaaaagcttaacataatgatgatcattgatcagggggagcgaaatgaatgagcttccaatgtaaattttctttccgcaaaattttattttgtaatggttcgttgtcgtcttattaaccttacgatatgcaccacaatgtgtttttaacagtgaaaagaaatatgtattcccttcgtttcaggttaattataagatattttaagtttggtcaaagtcaaactgctttaagtttgaccaaatttatagaaaaaagtaatattttcgacccatgataaatttttattataaaaatatatttaattattaatttaataaaactaatttaataatataaatattattatatttgtatataaatttagacaaacttaaagcagccttataatctaaaacggagggagtagttgtgatacagcaacattggcgtgtgttggtgttcaaaatcaaaaactaaggcttagggtagcatctctggataaattactactggaagtgtggttatattacaaaaactggatcattggatgatggatccaactatcacaacatcgaaaatccccccggttacatctatcaacaaatgttggtttctgacagttcccttcatatcgatcaatcgtccgattgcaccaaattaacaacagtgataaaatttggtaagaactaaagataggctagtaagctacgataatataataaacttaaaacttactaacaaattatggcatgtataatatcgtctttcatgataatcttctaatgcgaattaaacaggtatttgattaattagttaatcaatatatatcataacaaatataaaaaagtaaactcgggcactgtaaatatatccattcctaagatcaaagaaacttcggggagcgacgtgggaattgtaaatctaccctgcgcgtggatcaatccacgtacaaaacaatgggagcagggccaaacccaggaccgcacaattaacgagcctccgtttgtctttgatacactattttcactctttgaaaaaggttagcaatccaaaagctcccgatgatcaaagattccattagccggctagttagtgttccaaattaaagaagagggggtaacagggtagcaactgtaatgctgcctcctcctcattcggacacttttgacggtgagttatctatcccccacggcccacgtattatatgctgcatactgttcagtgatgttcaccgagagagagagagagagagagctactgctccatccactgtttggtttctcttgccatctctctgcgtactgctacgattacaggaggatgtactgcaacttatggtaccctgagcaatgaatccaccatgtacagaatgaaatcgtttcgcagttacaccggcactattgcactaaccattaattagcagcatagacgggctgagtaaagcagggtagtagtactactgcccgcaataaggcctggtttagttttcaaaaaaaaaaatttcaaaaagatcacatcgaatttttaacacatatatgaagcattaaatatagataaaaacaaaaactaattacacagtttatatggaaatcacgaaacgaatcttttgagtttaattagttcataattagtcataagtgttacagtaacctacgtgtgctaataacggtttacttatgcttaaaagattcgtctcgcggtttgtaagcaagttataaaattagttttttcgttcgtgttaaaaactctttctaacattatcaaacatcccatgtaataccaaaaattttcttttcaaataagacctcggtggtagctgggcgtcgttatggcctgggccgagcggcaacgaaggccgatgtagccaaaaggccccgcacgtgggggtggccgacagctggttgcccggtactactaccatggaactatggcagctaacgccacgcgaggagggagccccgagtgggcgaggaggtgggtgccgtggtggcgcaccgccacgccacgcgacgccactgccagcgtcggtacagacaggcgagaaaagaacgatttcctcgctgagttgtctgagcgttttcgtacgagcacatccactcagatctcccgggggtttattttaagcgcctcgcccgcagctcacaaagcctgccgccgtgcgtgcatgcgggctgcgcaccagcaccagctttgcgagaaatataagatggttttcttgattatacggcggggtttgcgtgtgctacgtgctgtccgaatatttccgtggatacggtggatgtatagtggttacagtattatcccgtactactactactgtgtcctactgtccttgtttagtactccgtaggaatttagggcaaagctcaacacagaaacagaaaagtaggtgaccgaattgacgcacgcggtgctgttgctgttgctgaacgttagtaaggccgagtttagttcaaaactttttttaaaaaacttttaacttttttatcacatcaaaacttttctacataaacttttaattttttcttcacatcgtttcaatttaaaccaaacttttaattttgacgtgaactaaacacaccctaataagcagtcccggattgaagtggaactaaattggcagtgacacctaggggggacaagaaaaatctcgcctcccatgtcgtgacagctgtgccaatgcttaattcatgcgtcggtaatgcaaaacagaagtactacatgaaattcaggggaaactatgataatactcgtaagcacctgctgttgtgatcgatcaaatcatcaactgatgattaggccgcttccacgcggacgggcacctcacgggtgatgtgcgattagtgcgaacgtccggtgccccgcgtatgccgcgcgcgctatccgtcgtacaggacgcgagagtagctgttacgtctcccggccggactgttccagtgtcctgtgtccacgcgcacggtaccgggcggggcggccggtataaacgccgaaaatacacgacagattccataaaacaaccccgcacatgagctctatttagaagagaacatggcctgcttcgatggacgcaataatggagatggcccagacgccagtgggtgagccccatcaccgtggagttcgagtgaaacactgaaacgtaaccaagccgatcgataagacgaggccatcgatcacagcttcacgtacacctttcacggccacgatctgcacgaaaagggaggagtccaaaacatccgaggtgggggctactgattgacgtggtggaccattttaagactttgcagaccgcaccacgtatatggcgtatatcctcaatattggaccttggtccaccactccagcctggggacaggcccgaaatctttttatcagctacagtaggtagctttcatacacaaaaagatgatactgtagatgatctcccgtttgcaattcagagtacagaccgaacctcggtttgcgatgataagtagcagtctagcagaaacagtgatccactgcttagctttacctggcctatgttagaccgtgatatcgtttggaatacattcttgcttgctgctagaagaaaggctacctacacaaggtcacacctaatggcaactggagggtgggagacacagaactacaaaagcaggggcattcatgagtggtgggggtacagccaggtagtgctgcactgcccgcgtaccactgtccagctcgctaagcgactcatgtcatgtgttaggtcaccaacacgaagcgctttctcctctccttgtctcctctcctgtgttgctaccagccctatgccaatatcggaacaccaacgaatgcgtgcttgaaaattgctaatggaaattgccaaatttcatgtgctctcagtcgcctttaacctctagaatggggtagacaagaagataggagagccaggggtggtggcagccagggcttgtcggcgacgaccgacgaccgcgagctccttgacaaccccttccatcttccgcaccgtgaaggacacccgaattccagcaacggatgtacggattatggggtttttagggtgggggttagaggaaggggaagatgatgttttttccgagcttgaaaggatggctagggagatctgcaggggaaaaggatgggcgacaggatggtggtggccgtggcatcgctatagctgaggctcgaggacacgggcatgcattagatcaggagtggttagaggacggagtttaaatagtttaccttctatacctccttaattgatgagatggaagaaaaactttctcgccacactgcgtactataattcttctcttgtgtgatgtatactccctccggactgataacacttatcattttagacaagggtgaggtcaaactttagaatctttaattatgaatcatttttaaaatatttgtctttcaaatatggtgactacatgtatagcttagtcaaagtactttaataaaatcatatatttgttagagaatttttatagtccagtaataggtaccgcccagtactgatatctgtaggtacctaaaaagatcggaccgttcaattcggaagcgtacgatcgggagaaaatgtaggtgcgctcgcttgccatctagtcgcagcccacacgcgtgtgtgccgtaatcctttccccttccatgccctccagcggcaactcctcagccgccacgtcctcctccttcactgccaccgccgcgtccccttcctcctccgccggcgcctactcccccgttgttgcctcctcctcctctggcactgccgccggcggcttgaaaaggatgagagaaaaatagggaaaaaaaatcaaggccacgagtctccgtcgccatggaggaggagagcacaagctccctgtctactcgcaacggtgaggaaaaaaaggagcaaaaacgaggagtcgaacaaatcactctcatgaatgaatcaatagtttactcttttaccagtttatcagtgagtgaccttggtccttaccagaagcatattagtcggagtcacccaccggaccggcaacacaaccactccggccttggtaccaccactgtgtgttgccgtcgagggtttcctccagccactgaacagctcgcttggtagctagcttcctcgttcagctccacgcccttccatgtgtgctctacttcacgctagttgccgcatctagggatccacacgcactgccgctggccgtctcacatgccgccgccgtcaccggccgcctaatccgaacaaagaggttcaccggctccgatcgtttcaacctcatatccaacgcaaaaatacagttttacccttccacctctatctcctttggccggtaccacctacaaactgaatggtacctggaggtactgattgctgttagccgttcgatccatgcccctcaatggttcagatttggtaccgacccaggctgaagaactgtaaaaataatctagttgttaacatttttatacatattataataaaaaataatggtcaaagttattttttagaaaccgtacccttgtccaaaacgataagtattatcaatccgggggagtaccatatataccactaatgagtaaatatttttttctttgattccaagatttacatgtagatctcataatatataactagtgggcttgcattttttttaagtaatgaatgggaatacaatggacatgcgttgaacttggtcttctaaaaaggacagatatatggaacttggtgatataaggtatatttgacaaggctgtaactttagcttcattcctcttgaagctagagcccaaccaaaaagttttaattccatctaaagaaatagtagagaaggttacagtgatctgaaaaaataaactagagaggtgcatcgggattcaaactccattcttgaaattattgtttggaaattggagccatgtcaaacatggccagactagtttgtagatattagtggatacttagagcctcttttggggagcttctaacatatgcagcttctcctagaatctctaattgccagaacctcctttaaacagtctagattttcagatagattataagaatgtgtagttgtagaatctaaaaaataaacaagaaaatacaagttgggaaacccaacttttccaaattctcactagctagcttctcaccaaccgcttctcagaatcttggagcaccttcaaacaaggccttaggctagcggctaggcgttggctgctctatggggcctagagcctaggttagtcgcccactggccaaacagatgaagtagagttatctcccatggtccagattggcacggacatcccaagagcaacaaatgttactcgcttgccaagttatcggacagaaaatgaataagtccactttgactccctcatatatagctccaatctaatttacgtccctgaaccacaatatcggatattttgactccccaactattaaaccagtgtaatttgatttcctcagcggttttggagggcggtttcgctgatgtggcgctttgatctgatctatcccgctgagtcaccaagtggagccacatgtcattctctcactcctttccttcttcatcccgtagacactttggtctatggagaagccgaatagggaagaggaagaggaagaaggtaaggaatgagataatgacatgtgggccccatatgatgactcagtgttatagacctagtcaaaagcgcaatgtcagcgaaacaaccctccaaaaccgctgagagagaatcagattacattgattttaatagttgggggttaatatatccggtattgcggtttaggagtaatatgaattaaattggaactatattgagggagtctaagtgcacttattccgacagaaagacataacactggaaatggcccaagcttcggcttgacaccattttgggcctaaactacttactgcttatcaggccttacgccagcagagagctcggcccattttatgccctagtgaagtctacgcgtgcctaccgactaccgagtaccactgacttgtccggttgtcccgtaatgcaggagcggcggcggcgtgccagcgccatcgtatcaagaaacaaagaagggagttactccctccgaatttgaattttaatgtataacgttgttaacttttcgaccaacgtttgaccattcgttttatttaaaatttttgtgcaaatataaagatatttatgtcatgcttaagaaaatttgatgacgaaccaagtcataataaaaaataatatttacatatttttttaataagacgaatggtcaaatattagataaaaagttaacggcgtcatatattaaaatatggaggtagtacaagacaaaatgagataaaatatggtttcagcggttacatgcactaagaagttgataaaggatatctatcgcgcgcctagcggtttcatccggctgataatgtcgcttatgcctgatcagctctaagttcgtcacttcgtgggctcgtggcgctcctgcctaccgcgagaccacgccgagcagcaagggcaatgacccagcaacggcgcaccgcgtatgactatcaacgcgcggggagaaattaagcagcagcaccctgaaacacggagtgttcggctcgtcgcgtcggcgtcgaaagaggcaagtgatgcacgcatggtgcagatcgatcacggcggaaggggctggcgacaacggctcgcgtcccgtccaaggtgaggaggacagtattcacggaggcgagctctaaccgcacgaacggagccccgatcgaccaggcgcaggcgcggccggaggataaacccgtgctcgacgtcgccgaagcccgaagttacaagcgacacccccggctagccatgctcggcgccacggcgccgtggttcatcgcccgcaaggtcctctcacgatcaaccagaggccagagccggctgcagctctccatcgtcgtcaagggcaaggacatggccccgcgcctgctcatcaccaagaccggccttgacggaagccgagaaggccctcgtcaacgtacaagcgcggccgggagcccgggagtactcgctgaggttcaggtactcagcggcaacgccaccagctaccagctcatccgaagctgggtgaagttcctgagagagaatgaattactcatcggcgccacgcggctataagtttgaagcgccgtgtgtggaccgtggggatgacctggagcagtgggcattacgctcgcgcgaactgccagcctgccacatgccacgggccccgaggatgccggccacccggatggcgcgctagggtttctcgtgttgcacggcgacgacgacatggaggagacggctgccgtgatcaaagaaagaagaggtgcctgcggctgaccatacgtccatacacgtgcagagaagggtgaggagaagtcgagtttgatcgcaaaacttgctgcatttgtgatggtgtacgtactcttgaggacaagcactcgatcaagggaaacgaaacacaaaactgatgacgatagacgaaggccatagaatcttgcatgtatgcagcagatgcacgaggaaattaattgttgtcagtgctcttaagagtagtatgttacctccgtgtcccgtttcttatacacgcaagtttaatatatagattattgtgtaatctatcactttaattattaacacataccccctccgtgtcttaatatgagggattttgacatgttacttgcactggttgaccatttatcttattaaaaaataaaattattatttattttatttgtgatttactttattatccaaagtactttaagcataactgttcgttttttatatttgtataaattttttgaataagacaagtggtcaaacagtgcaagcaaaatgtcaaaacggaggaagtacaaggtgaaaacctacccatgaaaaaaaaatcattatggtgcggtgttgttgttagtcggatattctttttagttgctccatgttagagctcgtgaatgatagtggcactacaattcatctagttaaatatttttagtgttttttttatagatatatatgcaagaaaaaaaaggtgtgcccttaaatggcttaaaatatagtcccacgctatatgttacaggcattccccctgtgtaaagggtgtgttctttacaacatcttcctaacttttactttctcttctttcgtgcgcacgttctctgaactaattaaatggagacgttttttttagcaaaagtttgctatgagaattactttataatccatttctccgctttacgtgcccaggagaaaacgtttctataccctcccctaaagaatacacccatccgagctgggaaaataccttgactttggaagggtgccaatacattctcttcaaaccttgcttttgagaaagcaaattggatgtttttgtagctatatcttttactacatactcctaccccagtctacaaatatgattttttttaaatttttaatgttaaaaataaacctttctgaaacttatttcaagatctgaaccttttgaccacgggctgacatggtaggataaaactgtcacgtacgcccgtagcgggtggcgtgacagtgttattttgccacaccaaaatatttagattttgagaataagttttagaaggttttatatttaaataaaaattacaaaataataaaaattccacaaatataaggcgtgtaggtgcatatcttcgagttcgatagactgaggtagtatgcgctagttatagatggccatatggcctgtggcccgcggctcggcccaaagaacgcgtgtttggcccggcccaagcacggcgcggcccgactggagtcgtgctcgtgccggcccggcccgacagcgggcctctgtcgggccgtgcttgggccgcgccatcggcacgctgggccaacacggcacggtggaccggcatggcctggcacgctataacggcaggcacggcccgaccgaggcacgcacaccgcagcccagcccgctggcccatcgcctccctcgcatatataagccgcccccgccgctccgctcctccgcctcctccgctcctcaaaccctaaccctagccgcctctctctcgaccgctcgtctctctcgactgcttcgtcgctccaccgcctccacgcctccactccacggctccacttcctccacgcggaccagcggaccacgcctccatcgcttcgctcttcgccggatctagcaccgacggtcgccggcctaccgctggggacatgaggggctgagggccgttcttctctctctttttctttcatctccacctctccgatggccacgctatcgatttcctctttttttttgccaccctcgtcgttgctccgtgagcacttcgtcagatccacccccatttccagtctctgttctcgtcttcttgtagatctgtcgatctctgtcatcaacggcaactccggtgcttcggatgcgtaggtaggtagagtaaaaaaagtccatgtttttctttagttttttttccatgcgacccctaaaccctaattattctctgtgtattgtaggtcgctgagcggtgagcgccagtggtagccaccgttgaggaacagtagtgtcgtcgatggatgatccatccttctgcaacttcgagttgaggctattgggaatgcggggtgatgacgaagatgacttggaggaggaacgcgtggaggtgttcggcaacactgcctcgcctcggatcgatgggtcgcagccggagacgaagacggagccggacgatgacggtaccggtgctggtggcaacggcgcgccgtccggctcaagtgctagcaacaaacggtccagatctcaggtatggaacgactttgaagagctctatgaatcctgaaatggcagtcaggtttgtgtccatgctaaatgcaattactgccataaaatcttgtctgctttttcatctggtggtactggacatttgattaggcatattaagtcatgcaaacctataaatgctggtgctctgtctcagtctatgctccggtttaatgctgatggttctgttagtcaatgggaatataagacagatgttgctagaactgagttggttaagttgattgctagagaggatcttccactttgttttggtgaatctgctgcttttgaggagtatattcaaaaagctcataaccctagattttgttctgtctctagacaaactactagtagggatgtctttaaggtttttgacagtcagcgtgctatgcttattgagactttaaaatctattagctctgttgctttgacttctaatatttggtctggtaatgctaaggaggattatttaagtgttgttgctcactttgttaattctaattggcaattagggaagaggattttgggtcttgtgctgattgatgtgtcacacactgctgaaaatatttcggaacatattctttctgttgttcaagagtatggtttgactgataagattttctctgttactctggacaatgccgctgctaatactaaagcaatggatcatctaaaacatgctatctctggttatgttggtgatttatatttgcatcagcgttgtgcatgtcatatcatcaatttaattgttaaggctggtcttgagatcttcaaaaacatgctggctgattttagatctgctatttcttttgtgaatgcatctaatcagcgcattgctttatacaaaagcttctgcattgctaagggtgttcgccctcgtaaatttggtttggacatggatgttagatggaatgcaacttatttgatgcttaaaaatctcttgccacataagggtatcttttcagtgtttattgcaactaaccatccacctgttaatggtcatgcattgttgactgatttacactggacaattgctgagactgttctgttattccttgaacaattttatgattcaactattattatgtctggtgtttattatccaacatctccattaattatgcatcacattcttgagattgctggacatctaaatacatatgagaatgataggaaccttagaaatgttgttattcctatgaaatcaaagttcttattatactggtctgagattccatttctgtattcatttgcttttatcttggatcctagggctaagatcaggggttttagcaatgttctccaaattatgactggtaattattctgagtatttaactgaggttagggctgcattgtctgatatttataagaagtatgaagctaagtttggtgatgtaagattgcaaagggcaaccccaagcagttcttgtggtaagaaaaagacagcttgggggaaaatttttggatcatccgctagtggttccagtgttggtgctggacctggtgtaggtgatggatttgctagtgccagtccaggtgctggacttagtgctagtgctagtccaattcctggatttggtgctagtgccagtccaggtgctgggcttggtgctggtctatttagcaggagaacttctgctactgctttgattcaagctgtttattctactgctaacatgaatgcatctgagttgtttgcctattttgacagtgacacagtcaaccaattcgatgacgacttcaatatccttaactggtggcatgagcacaaacacacctatcctattctttccctcttagatagagatgttttgaatgttcctgtttctactatatcgttggaatatgcttttagcttaactggcaggatcatcgaggatcgacggcggtgtctaggtcctgccatggtgcaagctctggcattgatcaaagattgggagcaagcagaatcaaagaagcagcattcagcggagaataaagagcttattaagtcttttgaatacttgtatcttgatgatgaaaccactggggatggggatgggactgggactggagatggggctagggctgggactgggacttgatgctatttgtattggacttggactttattatgaacatttgatgaaagatgtggattgcactcttttttcctttctagggttttctcacgaggtgtgagtttttacctagaaaggattttaatgaggcaaccattgcactacacagctactttatatttgcaaataattgccttgtgtctgtgatttgtctgaatcagtgaatgaatgagtgactgtatgactaaatgctttcaaatattgtgaatagtgcatctgtgatatgtgcatgtaattttttggacatgtgacttgtaattttttgaaacttggtgaatgaattgttgttaaagtttgttgattcaatctgtgaaatgagtacttctgagttctgattcaaaatgttggtgcaaagatctgctgaatgagatgtcacaggcttatcgtgcctgggctggcacgagcccaatgggctggtcgtgcctttgggccaacatggcacgacccgagtgtttgtgggccgtacctgggcctgaggtgcagcccgtgggagggcacagcacggcacgaagtgccagtcttgccgtgccggcccgattgacctcggcctaggcacggccgtgcttgggccgggccgggccgggcggtccatttggccatctatagcgctagtggtatggaattttgttatatgatcatgtcagccaaacttgtacagtccacaacctagatgtgtcctatagaacaaaatttgcagttggacataattagagctagtgtgtctttgtgcttctctagattataacttttgactttatatcagtaagactaaccaaacaaagaaaaataatcgtgggagatgttgaatattggtataagaaattgcctaacacgtacgtaagacaaaatcaatcacttgatggatgatggataaatgccaaatggttgtttaattatgagtatattagttggtgctcctattgttacacacatttgatcctgaatcgcccaccgtttgaaaggtggagttaaaaaataagtgtatctgagattggcaggttgcccaaattaaaatcgcagaggaccacatttggaccagcagtagttacaacacatgaggtgatgagtcgcaatcaggtaagctctcaatcaagtttttgctgagtttctgaccaactcgctgcatcaggatttgttcagcgacgtcaatcttccgctcccttcactgtccacagttccacatatgcccactgcagggatcttaagtgcactactcttgtagatctacagcgttcgtgtcgcgttgtttccagctaggagacgagccatccgatcggaatggccgtgcttaattcgggcgttcaatcatcaggaagcctgtcggagacgcagctaactttcccacagctagctcggtagctctgcttcctgcacgaacgcagcggtcgcaggcaaagcaccggaagacacagagagagacagggacgactccctccacaaaaccaaccgcgagtgcgtccaaaacacgcacgacgacgacgacgacggcgaacagtgtggagagaggcaatcaaacgtgcgcgcgccgtcccagtaaaggctgtgcctgcccgcgccccctggaccctgcgccgcgcgcggcagctgaggcgaccagggcgtcaccggcggcatcagggcgcgtgcatgcatggcgcggcatggcatgcatgctgcgttcgcgcgtgagacggcgtgcgcgatcagatcagggggagcgccagagcccgcgcacagtgcaggcgggtcgtcgcagccgcgcagcgcgaggaggccgatgcgcgcgggggccggatcgagggcgacgggggccggcgtacgtcgtcggcacccgcggctcacgagcccccgtttttctttctttctttttttgtttttttttgtcccgtgcccatcaatcaggcccctggccggctagctactagcctgtgcccctgtgcacacggccgcgccagccacaaccctgcctctgacgcgctatagctccatcgtctcatcacccgcgcgcagctgcgtacggtgtatgtaggagtacgtgcaaccgctggcccgtcatgcgcgtacgtacgtggaccatgcatgcaacgcagtcacgcagcgcgctcgcgtttggtgcgcatgattgaatgcgggaaaatgtttgcttcctctactgatgtttcaccactctgccgcgcgcgatccgatccgatgcgatcgcgcgtacctatacacgggtagctggagtagcatgcatgcacgggccggtgatgagtgatgatgcaaacgacaacggccgccctgtgacgtgccatggcgcatgccgggatacgtgccagttgtgtccgtgcgtggtcaccgatcgccgcgctgcaatgataaaccaggccatgaatccctacgacatgccaggacggcaggtccattttgaggaagcagcgaagcacagtgtatatggcactactgggcactgtgtgcgtatactgactgctactgttagatgctttttacacagatataaatcagatttctctcggcattcgggtagagcagctagctgtgtccatggagggcactaccgtttcagttcacatgattgaaactctcagttcctagctaggacagtccgaataaatttcactaaactttacaatacatattcatatagtgtagtgcccctgttttctttgagctttgctcctctacatgcaccgcgccggccatacctctttctctagtgaatggcaatacatatatattcatatggtgaaggcaagggtgatatggtgatctcgtcgagaagctcttacaataggtcgccggccatacctctttctctagcgattggcggagccgcggaggtaggaagctagtatgactagagtcataaggggtcaatataacaagagcgaatagagagaacaaacctccgtcaaatgcatgcttcatgtcaaagataaaagatagtgacagcggtgtgtaaggccgtaaggaataaaaacggtgcttaatggcatacaaagtatcgagcatttcgatcttcggggcatgaaaggaagtactacctccatttttagatggggcaattacaaatttaccactgctttgaatagttattgcaaaattgccactagaaaattacaaaaataccactataactatcattcgagtggcatccttgtaaaattgaaaaaccggtggcaaatttgcaaatgcccctttttaatatacaactccattgatcttttttatacattacgtttgataattcaacttatagaaaaaataagtatcatctattccctccatcctaaaatgtaacaacctaattaatacacacatcataatactagaaaatgtgtctaactagtactagggacttgtttagattcaaacttttttcttcaaacttccaacttttccgtcacatcaaatgtttggacacatgcatggagcattaaatgtggacgaaaaaaaccaattgcacagtttgcatgtaaatcgcgagatgaatcttttgagcctaattacaccatgatttgacaatatggtgatacagtaaatatttgctaataacggattaattaggcttaataaattcgtctcgcaatttacagacggaatatgtaatttgttttattattagtctacgtttaatacttcaaatgtgtgttcgtatacttcaaaaaacttttgccacacgaactaaacacagcctaggttactatattttggggcagatagagtattttgttgtgacttattttatcactaaaagaaagcatgacttgaattttttttacatctgcactaatttttttaataaacgccatgtccaaaagcctacatcgtcatataatttaaagcgagtagtagtaccgattagtgaatgtttagtggacatgtaagaaaattacccttttatccttttacatttttaacaatacatactataccaaataagaaatgtggctacaactctattgttacaataaaaaaaccagctaacacaagataaagaggtatttcccttttcttttggtttcggtcaatttggtgctagagttttctgttagtacattgttatgatttctaaagacgcagaatgcagaaacttgttgaggagaggcagctggagtatatagatcaagtactaagatttgagtaattggaggaggtatatcccggggttggtagccgctcttgtcgtaatgatccggacgcgtgtggctgatttcgacaaaatgggctttaaaaacttaggagacggaaagtgactaggctgtaatgattagagcacaagcagcacctattatactaatgatggatgagaggtagtagcactgattgagttttagatatcaattagaggaagctaatcatctgtggtaaaattggccagctttgagaaaaggatgtgctatttactctttatagttccaatctgaaaggagggaggggtacgcttttgtccatactgtttagattatgggcaataaaagtacatgctgcagcagcactgcacgcatgcagaccctaccagccgcatgacatgcaacggacggcagagggcgcccaggaacagcgaaagctaacaaatttgggatttttcagagggaagagccatactaaaagccactactactcatccttattagtcagaatccgtgctgtttgttcagtcatgttattttagaagttcagtaacatgttggatgcattattggtgcatcagtgagggactttatgcaattatttcaaaactcggcccggtcatatatacacacagacaatgtttggctaatgggaaatggcaatgattttccacccaccaaaatgcatctttaaatactaaccattcattctccctctttcatttaatcctaaccctttattcatttcccaattccaatctcaccctctatttcccattatccaaacacactcataagagtttgactgatctcaatatatagctgtatatccacgagtccaagaaaaaaaacaagtattctttttttcttttaacagatcgagtcagctagcccaaagttcttgaaaagtcagatgccggggtcaaaatgcctggagcagcatgcgcgcatccttactcaacttgcacgactgatgggccctcaactgtttaaagattcgatatgtcaacgagttgaaacagtaaatgttatcgccttcctttctttaagcctctctttctgcacttagctaaggggggccaatgtaccggccgaaagccagcacaatccggatatcaaacaagcacgagttttgtcaacaaagatgatctaatggtccaagcccaatcaattgtctctgacaagcatgaatagtaagcaggtggagctccactccaatccaatccaagggttcagcgaagatcaggagttcagacggggtaatgtcctcatcaacagtggtcccctgtggtcggggcgtggaaggaggtggaaccattccttacgccacaaccaacagcagcgccaatggccacacggatggagtatgtgcgtaagccagccaggaagacaacccatcaaatcactcatcgcgcccccacttgcccggataagcgtgccgctgttcctgtcctgggcgcacgccttgctcgcgcggcgcggccacaccctctcccatatcatatcgcccccaccccaatccgccaaacggcacacgcacacacgcgcaagaggacacacgggcgaaaaaacgcgcacgctttcgtgatcgagccgccctctcttctataaatggattctctactgtaattcacatgctaatcttccagccacacacctagtcagtcatcaaagtgtgcgtgcttctccagaacagtgagagagagaggggcaaagggaggcaggataaaaagccgagctgtaggggactaaagaagaaagaaaagcatagaaaagaacggcaagcaagcagctcgaggcacccgcgctagtacataaagccaccgaggtgcgatttcgcgagctctagccgcttccacttggccatttcccatctgcctcctggagctttagctctaactctagttctagctctagctccggctacgtttgcaactgttgtttatctcctggtgagtcctcctgtcatgttagccgtagattttggccggagcacaaggtgtttttgttgcttgctgattttacaggttgcaggttgttcttctctttcctgaaatggttttgacaaaagagctgttttgatctggggctgcctcaatcatttgcttctatggcaggctatacaccacacttttaagatgttttagcctcattggtattgtttatgtttcattatgagttattacgaaagactttaattaaaacaaacgtctagggtgctgcttgttgcacaaatgagttattcgttccgctttcaatttttcattgccagaacctgatcttaactccgtgtttttccgcgttctctttcgttctcgcttagacctcagcttacgcttcgggctggtttggtgcttttctccagcctaagttgagtgtagaactaaactttttaaggagttggttgaactcctctcattgccttcaaactcttcctactattctaggtggatagcatttagactcttgaagactttgagctagttaaccttatggaagaagggtccaacaaaagagaaggacttcctcctcaactcctagatctcatcccagatgagaaggaatggaagctgagagaagcattaggtctagggagatcaagaaacgcaggcttcgacggtgaagaagacaagaagctagacctaaagcttggtcttcctggttttatagaagatgatgaggcagaaaccttaagagattacaggctacagcaagagagcccatctctctcccttagtttctttccaaagcactccaagaccaccagcagcactactacgacaactggagcaaagaggggattcatagacacagttgaggacaaaacagaaggtaacaaacagcttttcagttctctcgtgagcttgttcttgaaacatgtttatacttgggattagaaacatggaaacaaactgatggaagcactgaactgaaaattactcttttgttgctttataaggttataacgaccagaagcagcaggcaagggcaggatgtgggaaggaacttgcagtggaggaaatgatagcagccgtgagtgagaggaagaaaggatgctgccccccaccaccaccaccacatggtgctcctgctacacctgcgcgcaacagaccacagacccagggaaggtactgatagcctatatggtgctttttccatcttttctgctctcagccaaggaacacatgctcgtttattcctgtcactcatttatagttcattcgaaggattgcatatagtccctccatgctcttttccaggttcccagaaatcgcaggtgtcctatgtccatttcaatcttttgattttaacgtgacgtgcaatggctaatttacttagctgttcttggtcgatatgaacctcaaagaatatactacttcttttatccctcaaaaagcacccctttttttatagaaagagagttgtcctttttctaaacactaaacttaattcctacgctcatagtcttgtctatttatcacttattcaactaagggcattcccgacccaatgactaggatggtgtccatagcattaaataagctgccacctaggataaaaaatgatgtggcaaatgaattaatgaggaaagagaaggaaaccatgtcttgcatgagacatgatttctacataacatccaagatattatgtgagataagtagcattaaatttaagtatggaatagtagtgtttgcattggaagagtagtgtctagtactagtttcttgatgatgtagagtttatggaaactatatctagtgtcttgggttgagaatgccctaagtctccttgggcacatatattcttggattataatcactctaacagtttaattggttggaacaatagcagtacaaatagaaaaatatatatactagtacaaccaattaaattattttaactattttattttattaatattatgcaatcatttatctcgatggcctttcagagacgaactcaccagttttctaacctgtttgtagaggagctgcagcaccagtggttggttggcctccaattcgatccttcaggagaaaccttgctagtagtagttcatccaaacattcccctgaaccacaaaatgataatgccaatgcaaaggtgacgctcacctgcaagaaaaaccctcttgtaaaaatcaacatggatgggatccctattggaaggaaaatagaccttgcagcctataacagctatgatgggctatcgtcagctgtcaaacaactcttccatgggtttcttcaaggtagaaattaacaatctatccaaataaaataagtacttcattttttataaaattcttagcttttatctgatcatattgcagctcaaaaggaccaaactaatgcgcaaattgcacagcaaggtgcagatgacaaaatattttatcaattgttggatgggtctggtgaatatactctagtttatgaagacagtgaaggagacaggatgctggttggggacgtgccatggaagtaagtttgctggtcccccttgtcatttacagtttttactggcatttacaaaataatcaaatcttaaaaacaacaaaaggacactgccaccataatttatattaggcaccaccaaaccatctaaattatttttcctgttctccaattcctgcagagtatttgtctcaactgctaaaaggctgagggttctaaggagttcagagctttcccataccctggtaagacaagctagaccacttaaagtcgtgtccaaatctttggtgtagccataaaaaaattagctttcgctaaatttgaatgaagatagctacacttttatgttagtctcatattctttactatttttttcctattctccagattggagctactgctagggtctagccgtctaggagagtcaccaattgctgaaatgctgggatcttattaaccattcggaatgaatgtgtgcactcaagccagtccattctccattttaggactacccctattttgcctatatagatgatctactgagatgagttggcatacagcaaatgcaaggaaatggcaatctgttttgtaaattaggttaccttgctatgacatgttgcttaattcaattcgaagcgattttggttttatcggggagagccgcatatgtagacttgcaggtcacccatgtaaagtgccttgttctgcgtgataaatttgtattaatcgctgctgcaacccgacatgcagatctaatgtcaccagcgtgtctcagaggacagcaactaggctaacctgatagcatcaagtcatcactccacgtggaatatgctactagtaggaatttttttttttgaaaaaaaaacagaattatccactgggtgagttgttatccttctaatcccatcactttccaaaatttgtcacaagcacagcgagaaaggtttgacccgactatgaaactgccgaaagcaaatatgtgctaatgccttcgcgcttattgggtgtcaaatagctatcatgtgatacaacagtggcatgattgtgaccacacacaagaggggtagatgttcatacttcgttttgctgtgaaagctaagaaataaactggttgtactatttttagtttttaacatgaatgcattatgtaggtccattaatgattaaaaccatctgatagcactagctgccaaacctggatgttatctccaagctgccctggtgaccatattcacattggcttttttgaataagccaatatcaacagctggtggcactgtttttattttctccccaagataaatacagtgcattagtttcaacttgacggttaacactgcaagcatgcctaatgcgtataactcttgcaaatatgtaacacaataggaatattagatgtataactcttgcaaatatgtaacccaataggaatataagatgttagaatagacactggtaatatttttggagggtaattgttatgaggcgtacctgaaataggactgcagaagaatcttataagttacatataatcttgtagcgccttcagtgcccaaagttttgacaggaaaatcaccacacagccatttccagcagttcatgccatctgtacagataaaaaccttatgtatttcaagatcaatgaagcaaacgggcacgaataaaaccagagagagagagacagagagagagagagagagagagagagagcttttctggtaaaggagaatattcaccttgatgcttccgagccttgaaactggggacaaaggaaaggtctttgtcattggaccatccctaaattccggacagcaggaaaagtagaagagacggggtggattacgaaagaatcttaggctcttttgtaatgtccttaccaaacatctttatccccacagtattgtgtgctcatgtgctggcacttgcagtgtgcgactgtataatttacctgtgtggcctaaaaactatactccttttgcaagaacagttctttggtgacagtgaaagccaaaaagaaatgcagacaatccaatgacagaactaaccttatttccagcacccaatcatgtggatttgctggcacaacaagttgaatactagatagattaagacgctaacaccattcaaagatgttctatggaaatacaatagagaaatgtaaaggagtgcatttatttgacacaaagcaatttggcatgatgtgatcaaaatctaatgaacaatgccatgtatctcgtacagtgtgctctaattcatgatgctacagttacactggaaaatgttaacctgacatcgacagtcgccttcagatttcagccccaaaagggagtatgcataaaaaaggataatatttttgctcacctatgaggctatagctagatgacctactatggataaaagtggtactcatcccatgttccacttcttagatgtttggttattaacctcgtaaacatagaccttgcattagtttttagagaacacccaggagagtggcacatgtttgttattaagcagatagctctgcaagacttttaggcttattaactcatgttatcatgtaggatgtgtaagtgcgttcatgggttggtccaacccaacccatttgctgatttgcatccctatgcccaaacataccaacacatctcttatgtccacatgaacagaatcaaatatcaataagagattagcagaagatcacacaagaattatgtacaatattatgatatcaagaggaagaaaataaccgcaccagcaaaacgcatacgtgtaggcttgatggataaaataaattcaccttagggttttatttctggaactgcatataccaactaataaaaaacaaataaatcactatatgccacatttaggaagagacgtgagccaattgcttacgttgcattagagaacaggcacaaagaatacctttacagcacaatcagcaatataatttcacaaagcaatgtaattaaatataaaatgttagctaaaatggcaaattggaaattgtgtaattcagaactccatgtggggcaccatcctgcatatgtgcaaccttataatcaaccatcacctagcctacaaaataagatcgggacgcagcaatagtgcttatatagtttttaaacattatttttctttcagcaaagatattgcatcttacctgtgttcaccgaacataaggcagaaatttgttcccactttatccaggtatgccaactataatttggggtattccccaaaactatttgtaatggattgttccatttcaggtaataagttgggtttctgtgtcttgtattggcatcatgttcctatttccaactctctagccaagtacttgttgaaaaacagtataaggatggtgtacttatgatctatcaggtcaaaccagtgttttacagttgacagctcagcaatgctctttgttttgagaagaaaagtagaaaacatgatggctactgtgcatcagtaaaccttcccgtgtcataagaatatacaaggccagtttccttcattttcaaaatacctgtcagcaactcagccttgactagtatcattattcaaattttaaccaccaagaacttctaaattgttaggtcatattcaacaaaagatatgtgattacatttgccatgcaacatacttcaataatacaataatatgatagctttgaagtattttcaagttcgataaaaaagtggtcaaagtttgaataagaatagtgtttagtgacaagtattgtgagtttgtgacatgggagtagtaatattattacaagagaacatcttgggctacaatagcaagagcaataatatgactatattttgcgacaaaacatgtctaggtatgaatgcatttgaaagagatgtgaaactatagtcttgtagcttgcttactgtgaggctggtactgttgaactattatgttgttctgctttcacttcctaacttttactaagatgatgctgaaagttcaaacatcacaaggggacaatcataaaaatcagatttccagaagatggaaaagaacgccagccaggagacggtaaatagcaggaccagattctgtccagatggttctatttgacttccaattcacatattttttcctctaaatcctaattttcagcaacttgtaaatcaccaacgtcctccatccttccaccaaaaaaaaaaagaacacaatattaatactactgtgaaacagtaactcgtggccctgcatgctgagcaaggatcagttaactctggtttttttaatctccaagcaccaccagttaaaatagactggcattatatttccagaaaataatcacaaaatggatggcaatccccccccccacccccgcgcctttgtcaaacacgcacgcacaccaaacacaaaaaaaaagggaaagaaaatgcccatgatatacagattaaaatacagtaatatactcgtattggtgatgttattgttgctgtaataaaagatgcagtgtccaagatgcctctagaaagatcaaaagtaatacgatctgtaattgtgcatacatgtatggatttcaaatgcaaaaacggtataataatactctataacaacaatgcagtcgttatcattgatcaaaaaggaaatccaaagagaatagttagttagttattaagatcattagttatatatatgtgagcaaagatgtactaaacacaagcagagaaggcagaacatcaataaattcctatgcatgctttatatgttgaagaactttgagaaaactatctgtctgtgttatattatgagggaataattagcaagcaaggataactttgtggatttttcatgaatgccactcagaccctcagaatagttcgaacttcgaacgcgcctcaccttacagccttcaatcatcagttccacacttgaccctcctaactatcagttgctttaaattctctaggtctacactagctgtgttacttttctcagtttattgctttgcgttggattacaacagcaatatatgacatctattgtaactgactggctgcattattttcactaataaattaacacaacatgcagtatttgagtttgtaaacaatgccatccatatacttcagtcggtccatgacaaacagaaaacaaaattattataggccatcttaatcttaaattatttaagtcatcaaaacaaatgtgtgctgaatgaagctgaggtgaaaacggaagcttaagcacaaattatatagtatgtgtaccaagaaccaagcaaatagaaggacatatttttttaatgagaacaactccatcttaaatattttaatgtgtaccaaggaaagccatgcatatggaagctaagttcgagaatatatgaatgaaacgccatacattgaaacgtattacaagactagtgatatcattcttcatatgaccaatgaatctagtttttttcgatgttagtagtcaaagtaaaagaactttgacagtacagcttctaaaaaatcataaattagtaggtacacccatgcttgcaaaattgccttagcaaaccaagagatgtattagctgttagtgcgatttatctagatataatgcagtaatttggtgactaaactaataagaatatatggaatatagactgtaaaaagaagggaacagagcgatatttataggaatgaatttgaggatgacaacttgtcaggaacagagcgatgttattttccaagttgggtcatctttctagtgttacggtattacagagatatttataactgaaaaaacgacactaaacatgcaatattgcaaggtagatgcaggtaatgctcaatttccttggcatgctcacaagagtcgtccaggtaaggaatagatttcctctgccttaatcttttttgaccttttggacttctgaaaaatatttctaactagcaattctttatgtgcttattccagaacataattatggcactatgacaaagaatcatttatgtagaagcatgcgactgaaactgaactcagtacatagagggagtaagtgttaaaagagaactaatataaataattatgatatggatggatgaattatgtgacatccttacataagagggatgctaggcttatcacttacaggggatgcatttgttccagccagatgataaagcaaaacccctgctgcgacacttacattcaagctctccactgcaaggaatgatttcatatcttggttacctgaataattatcaccttcttcccctccatctgtgtctgtatctgctcctacaaaagatccatcaacattacccggaattctgaccaaatgtgtgcaggatcgctcaaccaggggcctcaaaccagtgccttcactacccaacacaaggattgttggttctcctggcacaacttcagatagaggtatagctttaggagcaacagtaccaccaagaactcgccacccattttcagccgatgaagataaaaactgcatcatgttcctacaggagagcagttcgatcaactcaagtgagcctgcactagctttgctcactacaccacttaatggagcagagttcttagcacataacacaacaccttccgcgccaaagaagtaggcagatctaattatggctcctaggttctgaggatccatgacctcatccaaagctatccagacaggtgcctttccatcgtccaccctgactggctccaactctttagtattcaccatttccaagggtgatgcatcgagtacaaggccctggtgtggacggttatccacaaccatgttaaggtcatgctttgatgcttcgatgactttcagcccaatcctctctgccagttgcaacactttctcaatccctttcttgtccttcttcttcttgttgctcacactaaaatccatcccttcctgaatatacagcgcatagaagtccctcctctcagccatgagagctgcaagcacagggccaaccccataaaccccctgtccaaccatttttggcactgtcgattcccctgcctccttccatgtcttcctcccccagttctcctgcctgctccactgcctaacctccggcttgtcaaatctctcccctctaaatctctcaccacgggaccctctatccctcggcaccatccgccgatacttgtccttgatcctgccccacttcggattgtcaatcgagccattatcctcttcctctctaattatctccctgcccgaaccacgatccgtcaatacctcacctcgcgggctttggtcgcctctggagaaaaacttctccgcggaggtctcccacgaggaggagcggccggcgctagccctcgccgcgggggcggcgccgccatcgcggctcgcggcggcgagccaagggagcgcgctcccgccgtcgggcgatgcggtaccatcaggtgcggtggagaacgaaaccctacctcccagccccagctgcgaggggccgcccgggctaaccgcggctctggcgctcgcacggttggtgacggtggttaccggatgaagcgcgggcgaggaggccgtgggcctggagaagcacgctgcgcggagaaggccggcgaggaggatgcgtcgcggcgaggacgccgccgcgaggagcgggaggggctgggatttggtgaggccggagtggagcatagcgcggggcggggggagtagggttttggatgaggctggagccgagggggttttgggcggcgcgcgccacccgttcgacaaaatgccgcaacgagccgacgacgacgatgcgtggaaagtcacggttttgcagttcgcttcatctctggcgaccaattcatccaacggcacacgtgcatctttcttcctttactcgcacaccgtgcggcccagttcacctacagcaggccatcggctagcccatcagaattcagaaagaggagagaagggacttctgtattttgtggacccctttaaaactacagtactgtaagggcaattactataatgcttcatatgctacctctagaaataacacatagaattaggtgatgaggtggaggagagaagtgaggtgagagatgataaaaccacccctaaatgaagaggtggcttccacacaaactccaagaaggatgtgagagtactaaagacattgatatttgtctattagggacagtggcggacccagaaaaatcatattgggtgtgcccacgctaggatgtataataccattctttaactaaaacatgtcaggttataggtagcaaaagttttatgaaatttgatcaaaatttagttcaattaattcatgaaaagttggtaaaatgtacacaatttatgaaagaacccatttcacccatgcttggtccgttgtcgcaacccatgcttgattttgcattttagttttgatgaatttgaatcaagtaacactggtccaagaatcagatattcagagaaagtaaattatagaagggtaaaagactactagttcggtgatggctttagggcctcaaggctccaggccattggcgtcggcgtaacatggactgcgttgtgcgatggtctcagcctcaccgtggccgaccaccacaacatactgtatggccattgcttccgctacttttcttgcaccaccaactgaccaacagaaatgcccacaacaactagagaacgagatcaggtaagccttttggtcttccgtttgtttaggaacaagggcatctaccaaatatttaggccacgaatgaatactacatcctatattttctctgaaatatttgggtatgtccgtgcatacccggcaccatacctaggtccgcccctgattagggatgacctattgtatatcttgcatcttaatttataggtaaatgatataaataaatttgaaggtagcaatcacatctactataacacttgctttaaagcactgtaaaacttgtgtctagtgctggtcagctggcatgtgaggctcggtattatagtgagacgtactgtaaatatccttatggctttgctgttgctccccgctgtcgtctgctactccatacaggaatgcaaaggacaaggctgcaacagaacaataaaaactgaaccgctgaaatataaaattgatttaacattgtgaaggcgaaggatgaaataggccgagtttagttttaaacttttttttcaaacttccaatttttccatcacatcaaaactttcctacacacacaaacttctaacttttccgtcacatcgttccaattataactaaacttccaattttgatgtgaactaaacacatagtagagaaggaagcggaggaggttctggtcccaaagagtgggggcggtggtggcgatgagatagtggtagtgttgtcatcggcaacaatagtggctgcagcggtggtggcacgtgagtcatcataatacgagaggagtttattggcatccctgtcgctgggcaccattatctcttgtttgtctggcaccttgttttcaaggtttagatctagttccaccatcgaaacaggtgtgcactatatagatattttctagcatcggctgataacgcatcatatcaatgatctggtacagatgggtatcagtcgatactagtgagatatctgatactgtctttaggtattactccgtacctgatatcgcgtagggtaccagatggtgtgatacctatctgctatcaaagcatagcaacccctaacaaatgggcctgttcggcaggccgactgtgagggatgcggctgcacacagtgagtacggtgctgttcgtgcgcagctgcagcctggcaaccgaacagatccaataataactcattatgcataatttattatactattttcatcttaaaatatagaatagtttgttaatgtaacctatataatttttaggagtattctgtaaggaaaaaggtgtgtggtaaacttgtgctggaaagagccgtaaagattccgcaacgtagcaccggcatgattcatgagtgccaggtgccaggtgtcaaataagccatgaacccaaagccagtcaaaagtgacgaaaacggtgagggtggttcttggccgctggctgcctgcctccctgcaaaagccggctcgcgaacttcgcctggcccaacaagcgctcctgcatgccgcttttcgttgcgcgcctcctctactcccgtagtcccgttgcccagcaagcgaagacagtttttccgcggtgtctctcccttcccgacctccgtttcttggagatctcaggtgactttccggttcaaaagctttcaaggtgttcattcttcctcgcgcgaggggcgcacgactgcacgaggcatgacgcagctacgatgcttctgccgcacagctcatacggcgcgctacttgtgtttccaccgtgtgtgcaggcgatcgctcacggttgttcgatggccggggtttgggtttggtttggtttggtggtgcttctcgttgttgcgtatacttgcatgaaaagttgaaactgcagcgcgtcgtgtatgcatagcgattgatcgatcaggccatcatatggtcctcactcctcacacgtactagctaggagttgaacacaacaatatgcaacgacgatggttaattatacacggatttactctagatgtacgtgcgtaggtgtgcatactcgagatgcgccgaactgattctattgatcgcttacgcgttagcttaggaggtaataaaggaaaaaaaaaagagagaaagaggttaaggaccgagatgaattgatctgcatgagtcccattttttttcggcacatataatgtccaaataactcttcaggactgtttggataataggttaagaggaatcgaattaagataggaatataagtggacgattgagatgaaacgagggatataaagaatcgatggttaggattaagagtttaaggtggtgtttgaatctcttgaagatgaaaatgaagattaagtgttttatgcaaaacaatgtgataataacgtgtgattagttgagttttattttttacaaacttgaaaaatggattaatctgatattttagaacaacttttatatagaaagttttcgcacgaaacacaccgtttagcagtttgaaaagcgtgccacgaaaattcaaaagtttatccactctttgtcgtggattcgaacaggatggtgggaaaatattttcccatcccaggctcaataataaccattcttaaatagggaaaattggaaccatgccattataattttgcaaaaattgagatatgccatccaaacccacatgtcattgacacatgtgggtcctatattcattgagataccgatggcatatctcaaactttgcaaaattataatggcatggttccaatttacccttgtaaataagttactccaattatctaaatctattctaatactttctccgtcctaaaataaatttatttttcacctatctcacacataccaatagaaaacctgaaagactagaatacccttactttatcaaatctcaatgcattcctctactttattgctcctgtcggagtgtgaaattcctctgacagataaacaacgcgacgctcgcacgataaaaatgagggaggcaagttttttagactgtgttacagccctgcctagcgacgcgtggtgcaggactcaccacgctcccccccattctcaacaagacgggatggtatgcatgcgccacatcactattaattagggggggggggtgttgagcaaccccctcgcctatcaaaacatcatcgatgcgactgcgcttttcatggggtgcctaaggcaggtggcgcgctcgggccactgcttgggcatgaagagtgttcttacgtggtttgtgtaatctttgattctatcttagctgtatatgagcttgcaagagctacaacggatgtgccccaagcataacccaggaggggggcacgctatgggcggatgtgccccaagcacaatccgcggggtgccgcgcccgaggaaaggagtgccccgagcacagcccacggggggttcgtatccggaggtaagatgcgcccgagtagttggtgatggtaactctagttttcatttctctaacaacccccaatacaattattccctacttatgcaacaattactctaaaaataaacttattttggaacaaatgtaatgagctaaaaataaacttattatgagacgaaggaagtaagcaatattgaaattttgtttcaactggttggactcccatttgtttagtgtcgccagtttacgtgtgtcagggttatggataccacatacctaatagtagttgacttaatctcagcaggacccaccatataccatgtcttatacgagaactaactttagatatggagggagttccggataaggaaagacaatcagagttctacatggaaacgacaaggactactcggattgtatccatattggtttccctagttctaccttgacaaagggacacctatgggtataaatacaaggccctctaagaggagagtagacacgagataatcgacacccaccacaatctacagaataatatatcaagacagaagatcaacatacaagccaacatacgccaagacaagacgccagatatcgacttcagagataggcacggctagtcccctacggtgtctccggatactgtcaggagagacgaaagcgctatctttgatctcgccggacacgaactcgaggaggaagactaccctgttgtcgactacgagtcagaccttcagaccaccatgtcgacaacagttatatatgctaccctaaatattgtactggtgtgattatggtgaataagagcaataccggcttcggccaacaggatgtagggttattacctgacaactcaggggcccgaacctgtataaaaatccctgtctccatctcttttacctcagtctcacatatatcctagtaccaacgatccccatactatgcaaataccggaatcgcgacatcaaacgtcgacaacgtgttttagagattttctcatgtgttatgcgaattctcttttagactactatgaaacacaatattttaaaaatacagggataaggaaaatatagaaatatgtcatcacgacttattgaatcccagagaaaacaaaaccacatgaatcgctcaaaatagatatttggatgattcacaggaacaatatactccatccgtcccaaaatataagtatttttagactttgatacggtcttcgagatgctattttgaccaacgatattgtgatagtttgtttaatgataaatctagtaatattaattttacatgattgatcttatttttttgctattaatagttaaaattacaaatatttgatttggcagtatgctaaaaatgcttatattttatgatagagtagaaaacttaagattatattgcgatttgttagagagaggtgagagagaaagatataagttgtattgaaattcttaaaggaatttgaaaacataaggttagatctcacgctaaaaatactttaaaatatggaggaatcttttcctatcctatgaaaatcttttgaatcaatcctaataaccaaataataacctccataggaattgttaatgtgagattgggggtcaagacagcctttcacacgttcattgcattgggcatcgattggttcgtcgcccagccggaaactctgatgaagtctgaactctaggttagaattcccggtcacgggagaactgaaaagtctgaaaagcgatcccgcgccgaggtgctgatcccacggccacgggccgttgcgccgttgagcaccgacggctgccgtcctggtttcccatggcagagcagccgcctctgtcggtcagttgttcagtaggcgacgatggccagcctcttctgtcggtcagttgtccaggaggcgacggatggcgtccgtgcgtggccggccagccccaagcgagcgagattcaggctggcacccggtctacaatctacatccatgcctcccgaggccgcgggaggtatacaccatccgttacctccaatggatcccccgccttcccctgtatgctctcgtattgcgtattcccgtggccgtgcgcccgtgcctcactgcctctgctgtatgcccgtacttattccgtttgtatgatggttgaacgggtcggtactcggtagtaatgcttgctaggtgttcgttgttttgcctgacaagaagagtcgtggccttggcccgagaagcattagttacatttcgttttacagttctcagttactgaatttgttttgctgccgtacctctctgaattcccaagtacaactagtgagaaattgaccatggtttgcttggtggtaggtgccatgtctactattgtattcatattagtctttttttttctattcttaattgatgtgtagttccttataggtgccacaccaaatatgtgtagcgttgatcaaacattttagtctgacacatgacagatcagtgctttatctaattatctgttgtcttaatgatatcgaaaattccaaattgttgctctgattactattctgtgtagtacttctactcctgtcagttttccacaaacagatagttcattaggttggataagtggttaaatttagttgcaaactctgggagagatgcaactgttatcttaacaaacattggatcaggggaagcacatggagtgtagaagataagtcaaacttatgtcagattcccaaggaacatgatatcatgatacacatgcttccagtatagttatacattagcacctggctgcttcgccatttgttgtggtgatgctcatttattatagttttttgagcaagatgcacagttctattaagtcatgtaatgcattttttcattatgcacttgacagctgctgaattttaaattgactttcagtagaagtactattgatcttagactcaatatttttcttaacgcgtgcttgccattctgaaacacaatttctagtttacctgcggctgttattaactcactgcaagttattttctgaacacgaacttgtaagcaattgttctagtacaaattcatatggccatgcattatgtcagcattaatattagtgaaagtgggcaaatggatgtcgaaagaattaaaattaacactttataccatgaatgaacttccttctccatagctttattattctgattttacattaactgtgaagtttcacctgtgccaaatgtaaaagcaagataggttacttttcaaatgtttataaatgctcttccaaatttatttagcatgctgctttatctttcattttcactgtgaggtttgctaatcgaattctttttactgggatattcctggattctgactagattgatcatttcaaaacaggaaataagtttggtgtaaattgaaaatcactcacaatggttaagtttacggttgaagagatgcgcaggattatggacaagaagcataacatccgtaacatgtctgttgtcgctcatgtggaccatggtatgtttgagtagagtgctctaagactgttatacaactattatctttttcctgatatgccacctgttatgttgtcattattatttatactcatgcaaaaaaaaaaaaactactattcctttttgtagtagtgactgtcagtgctcctgccttttttttttcagaaaaagggcccatgctaagaacttttgctctttatcatctgtagttaatgtgttattgtcatatttatttttgcttgatatgaaatgtctgtaagcaaattaactgtatctgccttttcatttgcatgatctcaaaattaaaagctagcattttatagtatcaccttcatgtgtgcatccttcatcctgctcactgtttgtgctttttcgttaattaataaagtaacttacttgtttggtctgttatcacttctttgtttaacagagggttcctgatttcctgaatatattatgctcttgttttcctatttgtttgctgattcaacatcttgagttatatttgatgcaacaatgatgtttgatctgttatgatttctttgcaggaaaatctacccttactgattcccttgtggcagctgctggaattatagcccaggatgttgctggtgatgttcgaatgactgatagtcgttcagatgaagcagaacgtggtattacaataaaatctactggtatctctctttactatgagatgagtgatgagtcactcaaaagttacaagggtgacagagatggaaatgaatacctaatcaacctcattgactcacctggacatgtcgatttttcttcggaagtcacagccgcacttcgtataactgatggcgctttggttgtggttgactgtattgagggtgtctgcgttcaaactgaaactgtgcttcgccaagcccttggtgagaggattaggcctgtcctcactgtgaacaagatggatagatgttttcttgaacttcaagttggtggtgaggaagcttatcaaactttctcccgtgtcatagagaatgcaaatgttattatggcaacatacgaagatgcactccttggtgatgttcaagtctatccagaaaaagggactgttgctttctctgctggcttgcatggatgggctttcaccttgtctaactttgcaaagatgtatgcatccaagtttggagttgatgaatctaaaatgatggagaggctttggggtgagaactactttgaccctaccacaaagaagtggaccatcaaacacaccggttctgatacttgcaagagaggttttattcagttctgctatgagcccatcaggcaaattatcaacacctgcatgaatgatcagaaagataagttgttgcctatgctgcaaaagcttggtgttaccatgaaggacctaactggcaaggctctcatgaagcgtgttatgcaaacttggcttcctgcaagtaatgcacttcttgagatgatgatctatcaccttccctctccagcaaaggctcagaggtaccgtgtggaaaacttgtatgagggcccccttgatgatatatatgcatctgccattagaaactgtgatccagaaggtcctcttatgctgtatgtttcaaagatgattccagcatctgacaaggggaggttctacgcttttggtcgtgttttctcagggagagttgcaactggcatgaaggtccgtatcatgggccccaattatgcccctggccagaagaaagatctgtacgtaaagaatgtccagcgaactgtcatctggatgggcaagaagcaggagtcagtggaaggtgttccttgtggcaacactgttgctatggtgggtttggaccagttcatcacaaagaatgctaccctgacaaacgagaaagaagttgatgcctgtccaatcaaagccatgaaattttcagtgtcccctgttgtgcgtgttgctgttcagtgcaaggttgcctctgaccttcccaagcttgttgaaggtttgaagcgtctggccaagtcagatcctatggttctctgtactgttgaggaatctggcgagcatattattgctggagctggcgagcttcaccttgaaatttgtttgaaggatctgcaggaagacttcatgggtggtgctgaaattactgtctcccctcctgttgtctcattccgtgagactgttcttgagaaatcttgccggactgtcatgagcaaatccccgaacaagcacaaccgtctgtacatggaagcccgcccaatggaagagggtctgcctgaagccattgacgagggtcgtattggcccgcgtgacgatcctaaagtacgctccaaaattctatccgaggagtttggttgggacaaggacctcgcaaagaagatatggtgttttgggccagagaccacaggccctaacattgttgtggatatgtgcaagggagtgcagtatcttaacgaaataaaggattccgttgtggctggctttcagtgggcatcaaaagaaggtgcactggctgaagagaacatgcgtggccgtggcatttgctttgaggtttgtgatgttatcctccattctgatgctattcatagaggtggtggccagatcattccaacagccaggagggtcatttatgctgctcagctcactgccaagccaagactgcttgagcctgtttacttggtggagattcaggcccctgagaatgctcttggtggaatttacagtgttctgaaccagaagagaggacatgtgttcgaggagatgcagaggcctggtaccccactctacaacatcaaagcttacctccctgttatcgagtcatttgggttcacaagcacccttagggcagcaacctctggtcaggccttccccctctttgtatttgatcactgggaaatgctgtcagttgatcctttggagcctggcaccagacagctaaccttgtcctggatatccgcaagaggaagggtctgaaggagcaaatcacccctctgtctgaatacgaggacaaactctagatatttaatcatgttattatgcttatagtgttatatcgctttataattggtagtggccatctatgtgagcagtgagctgctatttcatgtataatattatgtcgaacggttgtacggtagcatgggatgatgatcaggcgatattgttataatttgttatggtatttaccatcatatcataatctgttctctctcgtatgactggtgcttttcatgccattagctctttgacccattttaatgctttgtactgtaacttaatccgatcattgattctgggagagtaatgtatttgattttatgctgagagtattataaatttataatgatgtattgctggccggaggggtagaaatcgcaagtcttttgtgtttcacttgtgcagtggagtaaggtaagaaagcaggtcaccgcaaacttttctcagactaatcacagttccatcaacattttttaagcttgctgaaatatgctccaccgtcagtgtgtggaccgatcattccaacaagccgactgagagcaaagataataatatagcaagctgcagagcatagatctttataatctatctctcagattactcatatagtggttaactcttcactataaatatatggtttatctatctgtctcatagatctttttggttcctgtgactaagccggctgtaaacttacaacccgcttctcatctatcccctctactatcttatccatttacagcccgcttctcatctatctcctctactatcttattcacctcagtattcagtcttcttataaccctctattgtacttgctctgacaagaacaaactataggagtatgcactagtaagggtgtgtttaatttaggtcaaaattaaaagtttggttgaaattggaacgatgtgacagaaaagttggaagtttgtgtgtgtaggaaagttttgatgtgataaaaaagttggaagtttgaagaaaaattttggaactaaactcggcctaatcccaaacggtgaaacaccacgtatgcttcttttattgatctgaatcttttaaccactgtactgtaaacagacagagcgaagcaatcatccaaccattccattacacgatcgaacacatctaaccgagctgagcctgagcagagctcactccggtttcttgtcaaggcaggtgttgttgagccgctcgatggcgaggatgagcgcctgcgtgccgaggccgccctcgccgtgcgcgagcagcgacacgtagagctggtgcgcgagcgcgagccccggcagcgccagccccatggcctggcactccgacaggcagatcccgaggtccttgacgaagtggcgcacgtagaacccggccgccatgtcccgctccagcatccgcttcccgtacaggtccagcgacttggaccccgccgcgcccgtggagatggcctccagccacttcgccacgtccagcccggccttgtgcgcgtacaccatgccctccaccagcccgaccatggtggacgcgatcgcgatctggttgcccagcttcgcgcgctgcccggcgcccggcccgcccatgtacagcgcgttccccatcagcttgaacaggggcgccaggcgggcgaccacggccgcgtcgccgccggcgaagatggagagcgtcgcgctgcgggccccgcggtcgccgccggagaccggggcgtcgacggcggcgcagcttttggcggccgcggcctcggcgatctccgcggcgagggtggggtcggaagtggtcatgtcgacgagcaatccgcctggggcgaggccggcgagggcacccgtggaggggtcgagggaggtggagcggacgtcggaggggaagccgaccatgaggaagatgacatcggctgcggcggcggccgcgcgcgggctttccgcgagggtggctccccgggagacgagcccctcggccttggaggccgtgcggttgtagacagtgagcgcgtagccggcggcgaggaggtggccggccatggattggcccatgacgcccgtcccgacccaggcgacgcgggtggtgtccggggaaatcggacggtcggagacgttcacgccggtggcggacgacgacatggctgctgctgcggcggcggcggcggcggaaagcggaaggggtgggcgacggcgagtgaaggatcgggagatgcttgcgagcatttgggggcgaagtgtgagccgaataatttgtctctgtgtgcagatgaattgtcccaaatgccctctggtgtcgccggagttgataaggtgagcctcgtttgcggtgctcctgaatgcatctcgttcgtcggaaaatttctttcccaaagatccatttgtcaaatttttcgtttaaggctgtgtttggttcctttcaaagttagaagtttagattgaaattagtatgatgtgactgaaaagttgtgtatgacaggttgatgtgatggaaaaagttacaaatttggatctaaacacagcctaaaatctactactctagtatggtctatagtttcatttgtgtactggcactctatatcgaattgagtagagcatcaaaaataaaagccagaatctcctaagagcgattctagcggttctatctaggccacccctcaatttcggcctaggagaatcccatgccacaccgaatccacaacacctgcatgaccattatcacataacatagattagaagcggtcaaacgaaggccgaaggtatagaacgtcatcgctccccgatactcgttcagtcgtcctatcaatgtctcacgtgtcggcaggggctgcgaggcatcttagcttgctcagaacagctcggaaacatagaaaaaacacgtagaaagtacacaggtttgggcctcctaccagataatagcactactcctttgcttttactatttcgatggagagttaagctcttgaacaatataaatattcgagggaatctaagtctctctctatagcaacttaccgctaggcttttatacccacgggtcacgtcctcatccttaggccggtgaaaacgccacgatatcccttctcgagaagtcaaggagttaccatggcaagccaggtggttgtgggtttgttttctttctcggagagagacacacatccaaccctgaggaggggtgactcacttgatccagccaggtacgttcttaacgaagaacaagtggagtttctgggcggctcgccaatgagtttcacacacctatggacatgccacgtttccgtgcccgagcaaccctaggctcccgtctaggtttcgattgttttaatcttaccatgcttatgtgatttgaatggcaaagaggcacatggaccttcttgaaaggacctttatgtcgcctagaggggggtgggtgaataggcgattttgaaatttacttcaaattgcagtggttaaaattagggcccagaacttcctggcaaaaggcccggaacttcctggtagctttttatgccgagcaaagaaagctgcctggaacttccggagttcttcctaggaacttccggggagttgtgagttgctctttcgagcacctcacaacaagtaaattgattcacaaggaagcctaaaccatagaaaggtgcaacatgtatcaaacaagagtaatacacatgaaactacgcaagatagcacaatgatcatacaaggggagacatgatagcacaactagacaaataaggggataagcatcacaatcacatagataaagagagtgggaggagacaaacgatttgttttcccaaattcggattctccaccgagaatcctacgtctccgttgaggagctccaaagagacgggtcttgattaaccccttgcctcaccaagcaaaggcctaggaagaggtctttggtcttcaagccaacacccctaggtacttctctttggtttcaaatgaccactaagattcctaacttgaacaccaagagaacaccacaagtgaggcttgctctaccaagacgacctcctaaaccttagctcggaatccactcaccgggtattctgtttcctttcggaggtggaataacgccctcacaaacttcctgcgattcaccacaagcttgggagctcaccgggcaactcctagccgtctaggaggcttaacctccaagagtaataaacacaaacgatgatttgcttgctatgaactcatgtgctcaaatgatggagtggatctctcaagctctcaaccttgccacctctcaatctctcaaatatcttcccaaatctcactcacaaagatctaccactaaggtgggaggtttgggaggggctatttggtttttgataggtctattcttacccaaagtcagcagcaaacaaaggagagagtggaggggcttaaaaaacacaagcccccaaaaaacttgccattactcacataatagggcccggaacttcctgccccgagacccggaactttttgtcaccctcctcgcccaaacagagagattgggtcagaacttcctggctcagggccctgaactttcgagctaccatgacatcacttcacaaaaacagtcataactccttgctctggagtctgttttcggtaaaattgggctctatggaaagcttattaagagggccacccaacccaaccagaaaaaagctctaaaaccactcatagattaagttaaggctttggtttctctcaaggtagcacttgcataggtcactttgagcaccgagacataaacaaacatatcaatgttgcatccctcttaatagtacggcattcctatactcaaatgcaaatagaaaagctataccactaggaatgccttcttgccatcttcttgcttcaccttgaggggtgccaacgtcaacgccatttcaccatagggactattcttatctacaactagttaagcacactagtcccaaatcaattatacctttgtcttgatcaatgcccactttggcttttgacttgatgttcatcggagaaccgcatcctcttgatcttcggcattccatcttgcggtcttcttataattgatacggattactcatagcttcaaatggcctcgtacggtccatcatgacaaagccttcgctcgcccttcaccaccggattcggtccgtcggcgccaagcctcttgcttgcccttcgctcccgcatgatccattgtagctgagccttacttgcccttcaccattttgccatagatagccacttcatacccgcatcatcaatgtcttcacttgctcttcatcaaggtataatgtccatcttctagccgagccttacttgctcttcaccgttttgccatagatcgtcatttcataccccgcatcatcaacgtcttcacttgctcctcatcaaagtaaaatgtccatcttctagcttcaatcttttaactcgatgccggaacttaacctaatctcactaactcatcgaaatagttagttccaacaacgggttgtcattaatcaccaaaacaatcaccgcactcttagagtcatagatattccaatctccccttacaaggcaactctagggcataaatctttcaaaaccatatcattttttaagtaaaattggcaaacacatgatgcactggtaatgcctagagaattctgacaacaacaactattaacttattaaagtaataggaaaaaggagccaccattttcgttctcacggcctaaaaattttcacattgataggagaaaaagaaaaaatagagtccatataaaaatgtaatttaagaatagctaaaatttggaattaaagataaataattttggaagatgagttttgagtatatatagagatacaattaaaaataacggaacttcggaactaaagaaataggaaattggaaaaacagtctagatgcgtccatatatgaacttagatctaactggaagctggacttaaataataataaatttaaaagtagagtttagaattcgtatagaaatacaatttagaaataactaaaattcaaaattttaaaataagcaagattaggagaagagttcaatatagaaatacaatttataaataagtaaaatacggaattcaaaaaaataagaaatatttagaaaaaaaagactagagtctatatagaaatacaatttataaataactaaaattcggaattaaaaaaataaattttgaaagatgagtttagagtccatatataaatacaattagaaataacgaaaatttgaagttaaaaatatgaatcttagaagaataatctagagtctatataggaattcagacataattaaaaaataagaaaaaaagttaaagtagagtttagagtccatagagaaatataattttaaataaataaatttaaaaaattaataataaacaagattgagagaagagtctgtagtccatataggaatataatttacagataacttaaatttggaataaaaaaaggtatactggaaaaaaagtttatagtccatataggaatacaaagtacaaataacgaaaattcaaaattaaaaaaaactaggaatattggaataagagtttagagtccatataaagatacaatctacaataactaaaattcaaaaatatgaaaaacgaatattagaaaaggagtatagaatccatatatgaataaaatttataaataatggagaaattaaaaaagtaaggaaaattgaaatatgagtctagagtccatatagaaataattaaaattaaaaaaataatcataactatcacgtatatacaataccatataaatatcacatattggttagttttgtcaagttattacataatttaaaattatgtattttaataaataaaatgtggaaatatttaagatattatatgagaaaaataaaacgatgctagccgcgcaatatgcgcgggccaccatgctagtttagtttgtcttacctgccttttattatactatcatttttttaattttaatattgctaaatttcgaaaaggtactaatcgtcctaaatttggaaggatgcgtcacggtggtgagcggtgacgtagctagtctttctatataactcaggccgtgtttagatgctttggaaaaaaaataatgtatacgtacacacgtttgaagtactaaacatagactaataacaaaataaattacagattccgtctgtaagctgcgagatgaatctattaagtctaattaatccatcattagcaaatatttactatagcaccacattattaaatcatgatgtaattaggcttaaaagattcgtctcgcaatttatatacaaactgtataattggttttttttcatatttaatactatatgcatgtgttcaaatatttaataaaagttggaagtttgaagggataaaaacagcctcaggctgatgagaggacgcataaaggcaaaccggctagtgaggagcggacctctcggtctctcggaccgatcctgtgggcgcgaggccgcgagctatagttaacggtgtggattggagtctacgcgagtaacgcaactcgtcgagtcatcggtccgcggtggcgacccggctgaccagtcaacggtccactggtctccgggtggagctttcccgcttggtttccttcctgcagttgccccactagtgaatctttttctttcggttttctttacggaccagtctcgactctcgagatcgatcacacgcgcggtgcgcacgatcagctcatatggacgtccttttcgagcttaccaggccgcgcggaacgccgaaaccgttagtgctaatcaccgatgtggacactcccagtcgcttccgttcaactctctcaggaaggtggagtggatggccggacgttgtatgcacaaaatactctcaccccgtcccaaataaaagaacttttatacatgaacttgatatcttaggacatacagattagtgagtactcccttcgttctaaaaaaacttaatttttaggtttccgtgtctgatgtttgaccgtccgtcttatataaaatttttgcatgattagaattttcattattgttaaatgataaaacatgaataaaactttatacatggcttattttttaattttttttataattttttaaaataagacgaacgatcaaacgttagacacggaaattcaggaattaagttttttttttttggacgaatggagtagagaatagtgagtgccatttttattggtagagcagtattcgatcaccagtattgtttgcatgataaaatctgtatactctactataagctcctgtgtcggggcaaagctcggttacatatggcatctgtagtttataaacggatttgtggaacggtaaattaacgttctggatcttgactcttgaccagttcatccacacgtgtgtagtccgtttgttggttggttgctttcctgttccagctggaagtttttgacctacagtaacatcatttttcgctttctattttgattccccgttgccaagtcgacagccgacttgaacctgagcctttcggcgaaacttgaaacctccaatccccaatagcccacgtacggttgcagacagccttgtagagtcgccgtgtttcaccggagcgaactgtatactcctacagtttaagatagttcggtggaaaaacgagtcgttagttaacgacctgagtaagctccgacttaaaaaatggtgaaaaaatgctgttaatcatgcgtcgggaagacctaactcacatacccatatttacaaacgaaaaataatttatgaataaaacttttatatatatgttcttaacgatctaaaagtaaaggttgaaaaataaatatggataaaaaacaccaaaattaacttcaaatttaagaccgaaaatttaaattttgactgataagtataagtataagcgaaaagattaggctgccagttgggcctttcctgaattctggactctcgatgtcttctcgaataaccatgccgtctgaatcactcttaagtcttactaatccacagaaaacaatcatgtgctccggtaagcaacatgaagcttcgaagcaagcacgcaggagcttataacggtctcgttcccgccgcatttgcttaacattctcaaaccgaactccccccacttcttcccgcgtccacagcggcttgcggcgggggcagaacacaccatggaaaccatggcaaaagcaccgggccctgtgtacctcctcttcctgctgctcgcgctgccttgctgcctcatcccgcaccgcggcgcggcccagcccgcggcgaacgaggcgcggctgctcctccagatcaagcgcgcgtggggcgacccggccgtgctcgcgggatggaacgacacggccgcgcccgcggctcactgctcctggccctacgtcacatgcgacaccgccgggcgcgtcacgaacctctccctcgccaacaccaacgtgtccggccccgtgtcggacgccgtcggcggcctctccagcctcgtgcacctcgacctctacaacaacaacatcaacggtacgttcccgacgagcgtgtaccgctgcgtttctctccggtacctcaacctgtctcagaactacctcggcggggagctccccgccgacatcggcgtcggcctcggggagaacctgacaactctagtcctcagcggcaactacttcactggcaccatccccaagtcgttgtcccgattgcagaagctggagtggctgatgctggacaacaacaacctcaccggcacaatcccgggagagctcggcgacctgacgagccttacgacgctgacgatctcgacgaacaagctcggaccgggtcagctgccggagtcgttcaagaacctgactaagctgacaaccctctgggcgagaaagtgtcagctcgtcggcgacatgccagcctatgtggccgacatgccggacttggtgacgctcgacctggcggtcaacaacttgacaggaagcattcctccggggatctggagcctgaagaagctgcagtgcctgtttctatttgcgaacaagctcaccggcgacatcgtcgtcgccgatggtgctttcgccgcagtgaatttggttttcatcgacctgtccgcgaatcccaagctgggtggaccgattcctcaagactttggtctcttgcagaagcttgaagtcatccacctgtactttaacaacttctccggtgagataccggcgagcatcggtcggttgccggcattgaaggaaatacacctattcaataatagtctcaccggcgttctaccaccggagcttgggcagaagtcaccggatttgtgggatcttgaggttgatttcaacaagttcaccggcccgattcctgaggggctgtgtgacggcggcaagctcaacatattcaccgcagcgaacaacctcttgaacggctccatcccggagaggctcgccggctgcaccacgctccagaccctgtttctccccaacaacaagctgtccggcgatgtgccagaggcgctatggacggcgacaaagctccaattcgtgcagctgcagaataatggcctcaccgggactctgccttccaccatgtacagcaacctttcgagcttaaccgtggagaacaaccaatttcgtggtagcatccccgcggcggcggctgctcttcagaagttcatcgccgggaacaacaatttttccggggagatcccggagagtctcggcaacggcatgccggtgctgcagacactaaacctgtctggtaaccagctctccggcgggatcccgaagagcgtttccaagcttaaagtcttgactcagcttgatttgagcaagaaccagctctccggcgagataccggccgagctgggcgccatgccggtgctcaacgcacttgacctgtcgtcgaacaggctctccggcggcataccgtcgtctcttgccagtctgaatctcaactcgctcaacctctcgtccaaccagctcagcggccaggtgccggccaagttcgccataggtgcctacgcccgcagcttccttgacaaccccaccctctgtacctcaggcctgggctccagctacctcgccggcgtgcggtcctgcaacgccggatcgccaggcagcgcttcctccggtggcgtctcgccagggctccgcgccggtctcctcgtagccggggccgcgctcctcctcgtcatcgtggcgttggccttcttcgccgtccgcgacatcaggagaagaaggaagcgcgtggcgcagcgcgaggactggaagatcacgcctttccagaccgatctgggcttcagcgaggcggccatactccggggtctaacggaggagaacctcgtcggccgcggcggctcggggagcgtgtaccgcgtcgcctacaccaaccggtacaccggcggcgacggcgccgtggccgtgaagaagatacggacgggcgccgcgaaggtggaggagaagctggagcgcgagttcgagtcggaggcgcgcatcctcggcaacgtccggcacaacaacatcgtcaggctgctctgctgcgtctccggcgacgaggccaagctcctggtgtacgactacatggacaacggcagcctggacgggtggctccacgggcgccgcgccatcaacgacgggcgccccgtggtggccgctgtggcgagggcgcggtccgcgcggggcggcgcgcccgctttggactggccgacgaggctcagggtggccgtcggcgccgcgcaggggctgtactacatgcaccacgagtgcaccccgcccatcgtccaccgcgacgtcaagacgagcaacatcctgctcgactccgagttccgggctaaggtcgccgactttgggctggccaggatgctggcgcaggccggcacgcccgacaccgtgtccgccgttgcaggctcgttcggctacatggctcccggtaacgatctctctctgcttgacactgttaattttgtactctccttttgtgccgtattctatacagaacatgtctagttaattaattcgagtattattatcactgagacttactctctctctcttttcagagtgtggttacacgagaaaggttgatgagaaggtggacgtgtacagctttggggtggtgctcctggagcttaccacgggcaaggcggccaacgacggcggcgagcacggttccctggcggactgggcgcggcaccactatcaatcgggagagagcatccccgacgctacggatcagtgcatcaggtacgcgggttactccgacgagatcgaggtggtgttcaggctaggcgtgatgtgcacgggggccacgcccgcgtcacggccaaccatgaaggacgtgctgcagatcctggtcaaatgctccgagcagacgcaccagaaatgcaaggcggagagcgggcaggaggagtacgaagtggcgccgctgttgctgccgcaacgaggcagccgccggaaacagcccgcgaaggccaaaggagcagacgacgacgctgacgagaggagcgatttcgattccattgtctgaagaaaggagcagagcactgccgcacctttacctactaggaaacactgatgtgagcagggaatggttagtctatgagccagcactgcactgcatgaatataaacgccatattagacagtactagaaaagatgatcatactctattaccttaccttgatggtacacttcttagtactattttgttagctgctcgcggctgatcagatcatttgagctttgataccagtgtgtaagagtacatacatagttcaaactgacatacgaaaagtgaaattatgtccccctctttattctgaaatctgaatgacaaaaggctacacgcgaaaccgctgtgattggtttgcgacatcgcatcacaatacaaacttacagggaaagggggaaaataatttgcaggaaaagaacggcatcattcaagcccccgttttcacttccctgcagttgcaaatgcttgttcatgtgataactgcaaactctttggcgccatactagctacatcccgctgcacaggcactcgtttatgtgactgcagaatagcaaaaggagatgcgaatcgcaggagggaaacgaactcccattggaaagaaacggggaaaatgggaggaaaacaagctacactgggagctcagtcccatgagctcctgttactactcgacgctagcatactgggagtgagatgctgcaagaagtgcagctccgatgccagagccatcgtttgccaacttgacaacaactgatgaggcagcctcctctccaagcaggtctgcaagcgttgcttctaggcaggttctgaacttcttgtaatgctcatagagaccaccatccagagcaatgacagtcctctgcttttgactaccgtcacttggcactctgtccctgcccagcttctttagaatgccatatataccagcagcagctaagcgtgcacctctctctgcaacgaggtcgcagacatgaagggtgatgtatcgtgcttccagggaagtatcagcgacctaaacataagttcaggcatatcgtaagtaatcaatggttcttgaaaattagatttgatagtatcctattttcaagatatgtattatcatacccccaggatatccttcagcttagctcccaggtgtttcagatcatgtgaggtatcatgatgcatcgctgacatgtccggcgtcctgcaataccacaattggagttccgttaagaaattttctacatagttacatgaatttatcttattttgatagttctgtgctaccatgatcaaggaacgcataatgcacaccatacagtctatgttgaaattttatcttattttgatagttctgtgctgcatatatgaaaagctagatacttagatgatcaacataggggacatagaagtgcacctcagtataaagcgctgctccagctttgttggaacaacatctccaaacaaggaagcatcatgagcaagcttaagcaagattctgcgcacaatctctccaagatacatgccggaaatcatcttttcatatatctgaggaaaagaagaccgaaattctttcatgcccacatatagttggaaaataaaaagataaaataaacaatacctgctcgcctgggtttaaactttcaaagtccaaggcattatcgtaatctgaacgaggaagcctttctgacttgaagtttccccattccatgttaatcaccttcatcataccaaagatccaaatgttataatattaattgatgtgacaatcatccagtgcagaagttgaagtggatacatacatttatacaaggttcaaagacatttaatgctacaagtataacgaaatcagtcactaaccatatttcctgatctaggtagtaatccagtccattttggaattgcatttgcatgctccacgtaggctgcgtttgtgccagtgcctaatattacagcagcagcaacgtcattatcaacatatcttccgccagccaatgtgcctacagtgtcattaacctgggcaaaatattagttgtcaatttacatgacacagtctggtgatatactagtaaacatccaaactcatagaacattgaaaaactccaaagtcagcattttcataggaatgccaatgtatttacccatcagcatatagcagtagcaggcatgggaaagtttcagatgataaataattttaacagagtcatgaaccaagaatttacttacaagagctgtaactttcatatcaagcccttgcctttccatagccctgctcaattcagccacaacatcttcccccacctgagttcacagaaatcattagtctatacatcaaaattatgggcataacattataaaattaaaaaagatattgcagtgttgatgccacatttgtcttgagaggctagaaattgccacattaaaagtaggaaacagaaatatgactagagtgcttcattcttggaggttcaaatttaagaagtgcaggataagcaaatacatttttttatggttacaagtgttgtatagcaaacacagctctaattgtaacatctgcattcacaatcgccgcaggatttagaagcaattataagatacttgtgaattggataaatggggacatatgccaccatgtcccgtttatatcacatctaagaataactttaccaaacatgttaatttatggataaccaaacatcagtccaaatattctgaaaggaaaatgaagggcaacggctggtcacttggtcaatgcagggaacccaaaagtcaaaagtgacacagctagtgagaattcgtttgctgacacaacgtggtttctaatcaagactgatcgtcaaggtaataaataattcctagatcatttagccatgaaatttatactaaggccattcgaattttaccgtgccattgatggaaaatccctttgtccacttaataagagtgcctgatgatattgatgtttggtgcactgggaaagaaaaggtgaagcctaactctctctgcctgccctctggcaagtggaaatcctctccctcggtcttgacaaaactttccaactcagccgcaatgaagtcaaacagttcctgtactcatatttctgaaatttgagtaaccatgaaagaaattgtgcaaacacaggagaattgaaacataacagttgaaaggaataagccactgaccatagaagtcccaaccatcaggtgaggtggaatggcaacctcttcgtactgttgactaacaacacgcttttcccttcctccaagctgaacacgtataacacggaaattggtgcccccaagatcgagagcatagaacagtccgtgctcatccctgcacaagtggcatgcaaatcagaggaagcataaaagaagatttcatgaagtgataggctcaacatttttcattttccatacgcctatggatacatataataaactgtcaaactcactgaaacttttaagcctcgagtccttgaccatttctttctctaaacttattcataaacctttcatgacatttcctacaaaattcacatggtacaaaaaaaagaacgattgttctgtgatcgactgatcgtaagcccagcatgaaggcacaaattacaaaatggacacacagatatatatagttgtcaaaagtgaccggaacctaattgttcattttataattctgtctggagtcttcactgcgaaaaaaaaattatgtcaagtctatcctggtggccactttctgctaccaccgtgagaaacctccactcagtagatcaaaattccataggaaacgaataggtctcatcattcttccgtgatcaataagaaaagagctaaaaggccgtgtcaaggcacagtgctcttgatatcaatatgtcgcacctccatctcaacaaccgaagatcaatgccacatttatgccaaatccgaacctaagcaagcgctaagccgctagggatttccaaccgattcgcccccgaagagaaacacccctcgcgaacacagtaacaactattcccaagctttctcgtgtcacgtacaccccagaaatcataaaaatcgcacaagcggagcggagggaggcctacccggtggggaggttgtcgacgtagctgatgagcatcttgagcggggcgtgagggtcggcgcggaggccgcgctccatctcctccaccatggcgtccgcgatgccgcgcagcagcgccgtgggcgtcgagaacctctgctccacctcctcgatcacagcggcggccctcctccgccgctcctcctccgcctcccgcttgctcctcctcctccgcgacaccaccaccgccaccccaaccgccgcggccgctgcagcgcacaccaccaccgccgtccccactaccgtccccttccccatagccgcgcgcgcgcttcttcacgctccccccaacccaaccctggcctccctctcgatcgagcgcgcgccaggagcaaatcccccagaccgggtcggcttcccggatcgggagctacgccacccaccactgcagcgtcctcctcctcctccttcctcctgcctccctccctcagtctctctcctctactcttttcttccgcttgcgcaagcgtgggaatgggacgagagccacgagttgggcgtttttgctcgcgaataaatcgccctcgagtttgacgttatttacggatatgcccttacgtatgaacggccctgatttgtcctttctgtaaccgtagggctcagattgcagatgccccaacgcgggctttgtctggattcgtttcgtggctctgcgtgctgctgcctgtaatatggagatttcgtgaggggtttatgtatcaaaagcttcacaagattaacgaacgaacgagcatgacagccagggaccagcagatggcacctgccggccgtgcatttaggagagccaagaagggtgttcccgtcaaattccctaattttcactagagtagtaggagtaatcagttccaaatgtccaactgattactttgtcagaactcgggcaactaggcccaccgatcagcaaaaggctgggagtgattagttaaaagggtggcaggacgtgattatgatacgggggtcacgtgcacgttggggcccacctgcagtaccgatgacgtgaccatgagctcagaagtatacgtgtcgatgaagcaacggccggctgcctggagatgcgtgctcagcgactctgagcacatatcttccctcgcgcttgggcgtgggcgtcgataattcacgactgtagcgagcgagcgatccatccatccggcccactacgtatcgtcgtggccgacgctcggatgggtcgccgcacacccaaaactcacgatcgttttagctactgctaataaaacatctatccccatcctataatataacaacttttaattacgaatctaaacaaatatatatctaaatttatagttaaaaattattatatttaacaacaaaggcaacaaaaagcagtgaacaaagcaacgaaaaacagttttagataaattacaggtaaaacactatatctatgttcttagtggtttaaaagttaatacttaaaaatatcgaaatgtgttacgattaaataactctaaaattaagtgtgaagattaaaattttggttactgtcgataagctaacaaggacgaagagttgaaaggcgcatatctatgggtaccttccacgatttgattagtcaatgtcagaaacagctttcgcacaatcactctcacgcaaaacgtgatataggccctaaagccattagtcataggctcaactggtttgctgatcatatcttttaatcagat

SEQ ID NO: 9979 - DNA, 3284 bp, Oryza sativa
attgtaagacagaaaactgtctgaaccgagcaaccaaaaatggatacaacgctgcaaacaatgtaaaatgactattcacccattctacaaaaagaaaaaccatcgggatttttacagggctactcgataaagttcgtttactcagcagttcgctgaataatatgatctgctggatatggtgtacgacctagcctttgctcagcctaactcgcaggtcctattacttatccactttgtacagatagtacatctcgagccatcgattcattatgctaacacgaacagaaaatgatctttaagctagtaatgatttaccaaaataaatgctttttgctcatgactgaagaagcccgtcaccttcccaaccaagacgtaacatctgatccactaccttcaagctcaactgcaacattaccagctctattagaacgaaggttaagtggcaacgtaagtactttatggaaaagcaagtgctaaatggattttgatacatcaggaatttatggtactcacagcaggatcagtgaacactattagctgcttatcagcagtagacagtagaagatttgtgttctctttgtttagagcgattgctgtgacgtcctggcctttccccagctccattgtatgaaatacctgccagtaaaatatttctggtaaggttaccacaaatgaaaaataagccccccccttttttttttgcttgtgacactaaccttaagtttatgcagatcaacaaagcatacagaaggcacatgaacagattgcctagtttcagcttgtttagatatgccatccttgccatttggttcattaggttcatgatccccagtctcagtactgtcctcacacttataattgcttgaagaacatgttcccattaaggcgaaatggccatcagtagaaatctcaatgcaactaacccgtccacaaaaaggtgatagaactgtggtagcaatagggagtccattgacagtgaatgtagatagtcttttctttgattcattccaaaccagaatgaccccttgagaagataagcatacagcatgtgcctccgctacattaagcttccttatcagacgaccagtcctcaaagaatgtagaagaacacctgacatgtttgatgaggatacaacaagtcccaagtcaggactgactgaacagctagtcacttcctcaagatgtcctctcaatacatgcataggaccttcaattcgacgcctcctgatttctgtaaggttgctcacactaggactgcgtggtgttgtcggagttgttggtggaggctcaggggcatttttcttatgtaaggagcctgcctgatgaatcctccagagtataactgtggtatctcgagaccctgttacaaggtagttgctatcatgagaaagtgcaaggcaggtaacaggagcaagatgtccagtagcagtttcaatagtcttcgctccatctggggagatcaacttcacagaaccatcagcatgcccacctattattgagtaaaatggtattagaaagcagacgaaacttcataaaaaaaatcattaaataatggaagctgcctaccataacacttcattaaaatccagaagtttctatttgagaaaaaaaatccagaagtttttattcgagaaaaaaatccagaagtttcagatcaagctgtttgcttgactttatctagcgcaacaggtgttcagtattttaatttaaatccaatatatgcaagatataaagggcaaatttgcatctttggattcgaagtgttgtcacaactcacaaggcaatcttaaactacattgcttacatgcgcgtgactttttacattacaatatgaatccacaactccatgctgtgttccatttaatgcctttcttgtacgttagtgaatgtctagcacatatgaacttcattggctcatgataacgaatctgtctggtaagaaaatgattatgaatctataaactccccccaaatctagcaggtaggatgtctcatcctccactagtaagcagagaattccccagaaaatggaaagaaaatgatggatgaagaggaaagatcatctaaatgaacaaaaaaaatacatatagaagctaaagcataaacagtcaaaagaaacaattaccagtgataatctctttgtcacatgtgacagcaacaactgctgaactacggatgccagaagcagcaaatgctatagctcttgggaagtcataatcttctccagaactagcagatcctttaaaaatgcgcatcagtgcaccaccggttgaatttgcagcatttctaccatgatgaaatagaaagggtgtcccttggccatctggagtatttggttgccaatggtgaagtgccacatgagcagcaggcacatttacatctacaactacaatagagtcattggatacaaacatggtactggccggaacattgcagcgatctggatttggaagtaaatatgatttaagttcacttggattccggaatatagtctgcacagcaaataaaagggtcagtccatgtaaaaaacagtgaggcaggccgcaagtaatgtctactcttgaacatggaataccagctccaccatgtgaaaactagttagctacacaacccaaacttaattaaattgccagctaatgcttttgggttcaatttgaactactttccagtgttccacaccaggtaacttgaatctgtttacttgacttctatttgacaatactcctcatccaaggtggaataatttggttctgttcaaagaaatgctttgaatcgtttgctttgggggttgttctcaatagccagggtttaatatagattacctgtagatgtaaaacttctgccaatggctttctcctcatgtggggaatagttagcaattgagatggtgtttgtccaaagtaagcaatttgatcttgcatggcttgccgttgcaccttcagcattttcagttttaaaaaaatatgagcagatagatgacaacacgggaaaccaagcactagcttgagcgcatactagtacttactggatctgtgattttgtcaatgtccacagttccttcatatgtaatgtagaagaacacattgttggccattactgcttctttacccctctgtttaaatctgcaaaagaaatattcctaggtaaatggtgatatgcgaggagaaaaaaaatagaattggcttcttaaaaatactaaacagaagtcctatatcaccctacatcattcataaatgctaaatttcaataattcattgatatgatgatccaacaggaccattcta

SEQ ID NO: 9980 - DNA, 2131 bp, Oryza sativa
tgcaacaaaaagaagataaacccatctataacagaacaagcatgcattaaagtataaccatgaaccaaaaactttacaattaagcttgaatcaacaatcaaaattcataatttcatacgatttataatgcaacatcttaacaagcacatagtttgaagaataaacactaaacacatatacctattgcatttatcactctttctcaaatgtcctttagcacaaaacaaccaagagaattttttaaccttttcttttcttgagcctttttgctcatatttttctttttattctgggtacgtccctgtcgtcaagactgtttccagggatttggcacacattattttgctcacatcgaatacatccttgtcgtcaagactgtttccaaggattcggtattcatttttttcatatttttcttattctctttttcacaatgagcaattaaatctatttgaggaataacaattcaataaagcatatatacaaagcatttatagatcaaaccatatgctagcatcaacattgcatatttgcttaattcaagtatagaatttaagtgtcatgcatcatctcccttaaaagcaaaatctaaatctcatgaaaagactagaatacatacaagctatgctatagacaaataaaccttcaaagtattgctagcatgcacaagaaaataccatatgtataaacaaagctctcatttattaattttttctcattgtcatattattgcttgataaaaccatgaggtacaaactccccctcaaatcatgccaaaagaattcacgaataagcactaactccccctcaaaataacctccaattctccccgaaaatcaagaaaaaaatcaaagcttttgaaaaagacatccaattgccaacgatatcaccaaaattctcaagaattgacatatatccaatagtattaaccaaaactacaacctcaaatactagcatatgaaaaaagctaataaacaagagagtataacaaaaaaaaatatgtcaattcaaaagtaaatagatgttaccttgaaaagcaatcgtcatcttaaaattgaacactcatggggagtatgccgccaaaatatctacgaacaagaagatgtcgaggcctccgtgttggggttagaaataagaaattttggaatctaacactgagtcacacgaccactagaaccagtaggtacatacgcacttacaaaatcagaattagacttaccaaaaaaaacttacatttttgcttcacaaaagtctgagttgaatttcgcacaaaattgcctcgaggccggtctgaccgccgttgtgcctatggtctaaccgggcctggcaaccggtctgaccgccgatttacttgcggtcttgaccgctggccggtctaaccgactggtcagtgtcggtctaaccgtggtcctcgaattaaaacccgatttttgctaacgtcgttttgcaaaagcaatttctctttcctttttctatttatgggcaagtctaaaacaaaaaccaaccaaatgtccatctttttcacaaaaagaacaagtgtacttctcacgacaaatttgtgaagtagatggttttgaaattgatggttttgcaacaacagaaggttttgcattcacaacatttgatttcgaagaagatgcattcaaagaagacatgatgccagcagatttaaacacagtgttcttaggctcagtttcaatcaaaatttcacctctcctagcaacacccaaaacagtaggaggatgtctagcatgatgagcataagaatcaaaacttaaaccacgattgtgtgtgctaaccttagattgatcaagaatcatgttgaggttctttttaccatcagaaaatctttgcaaagaacttttcaaataaaaaacctcctgagtaagaatagcacaatttttgcaagcatccaaaagacctttttgttttctataagttgagcaagaaaacacctcatcttgtttaacaatttcttctatgtgtttaacacggcttaaagcatctttcaacttcatctcattcaaaacacactgtcggtgacatggggccgggggtatcgtgactagaggcttgggtagccgcgatcactcacgtggcccgaccccctcggggggggggggggggtcgg

SEQ ID NO: 9981 - DNA, 5446 bp, Oryza sativa
aacattcgatcggcggtccggccccttagagcaagtttaatagtatagtctctaaatagctaatataatagtcaatttatacaatagttgcttactatactattaataactggtctcacctgtcataaacacattacgttttggagtccatgctgcagccggctacagatatgtagtccgctgctcttctctttctttatttatctttttaaaatatgtttatagttagcttatagcttggagttagtaattggctacactattaaacttgctcttatacgccagcttcgcactgcaatgatcgaccggtccacgatttgtcgatctgttgttaccgaacattgaccggacctcgcgcgatgttccggccaccgcgacacgggaaggcacacgtaaccgagcagatcgatcagcaggggaaatcacgcaccaaacccgcgcagccccggcacgttgacgcgctacgcgctcccgcggaaacccagcgctgatccgggcgggtctcgcgtgcacgcgtgcccttggagcaggaggacacctctctgcctccgcggggcgggaggcggccgggtgtgagtgcgacacggcgagacggcgagtctcgcacgtacgcgcagcgcctggccacgagtttccgaggggatagagataccacgcgcgcgcgcggacgggcaactcttggatgagaacgccgtacagcgacgttacgcttacggcgtggcagcgcgcgtatctggatcgcttggcggagtgacgaatctctagggccggtcgcgctcagttttcaccgcgcccgcgaggggatgcactcgcgcgccggttcgagcgtgacagaccgacgttcgtccgacgaaacggagcggagcaggcaagtactccgggactgtgcactggcgtggacgcgtggctactggcatgtgtggtgcagtcgtggagccgttttcttctcgtctcatcgggaggttcggttccgacctgtcctcggagtcgcggaaacaaataattcgatcgaccatagtgacgatgctgaattgatcgctgatcagcagcagctcagcatgcttcccgtcgtcccgtaggtcggaaaagaaaactccagcacttgacaaggagcaaccggataagtgtcttgacttgttttatatcagcatctcaccatcatcctcacccatgttcgggcatgtactccaacatttaagaattggccttctctctatgtattcttcacgtagtagaaattagaatagagtttataattggaaatcttctgaacaagtggagtaaagactaaacagtatgaggtggctcttaattcaccttgggtagtgcagttctattaataaaaataggtaactagaatctatgtggtttaatgttagtcaacaatgaaaaagaattagaggtttaccctatcacctatatctattttttatttgttgaacaaccaaccgttgtgtgctttatggagaagccatggatataaatcatttctattattaaaaagagtgaggtgttaaataattgtctattatattattatactataaaaataatttgaaaataaggcaccatattcactctggagactaaaaattttcaccaagctcgacatttaattcatctcctaggatgaaactctagcgccgtcaccccacgaaagatatccaaaccgctacaccatgctcttcatcctcattggtttctgacaaacacaatggcgatggccgatggcagtaggactctattatatgtttcatcctacttcccctccccctcgactgcctagggagccaaccatggatcggacgtctccagcattgatctggcactttggcacacacatggtagatgatcttctccccgtcttatgttgtgtcgtcatccgaggtgcaacagcgatagggtacagagatatcatcgggcgtcttgtgtgccaagaagttgatataggagcgtccaaatctagctagatacaagcagcatgacatcaccaaccgctgttgtgccactggcagcgtgctagttgacgacatcggcaacggggcctggcttggggcatcacgcctacatccgaccttgactgctgccacctaacgtgtacttctaaataatgttttcatcgatattcaaggtcttccacaccaacctatagattggtgctatcttggttttgattgacaatatcgcttatgtccacatcttactcgttctctagatggacactatggatttgtgagtgtgtgcctatatattggtttgctcgcagcgcgattattgtagggtatcacgtctaaacaaggttataggttatggtgtttatggtcgattggattgtgctaatactgggaggcattatggcactagctcggaacaagagaataacaatactatgagacttcgcttaggtggtgctcgtcgagtaccgtttcctcaactcctaggttatgaatatccagatatcacctagtgtttttccctttgcaggttggctttttggctgaccctgtacatatttctcttgtatttctgctcctctattaatatacgaggcaaagcttttaccctcctttcaaaaaaatgaatatctggatttagccttagctagttataccgggcaaatagcagtttcctcttccttgttgggggtgttgtctagacttttaagaattgctctctacagtgaaaacctatggtttagtctttgttgatcggatcatgacaacatatgaacatacctgtgttcttatcttaggtgctattttaggggaaccttagtcgtagtccagtgttactttggtccacgacgaggaaccttttaaaaatctgttgtatataaattacaaatatatttgcataattatagaagtcaaaagttgtatgaaaaatccaattccaattatatataacccttcctatatagccccgttcacttctcagctgggccttttttacaggtacctttcagttgggccgagcctgatacagctccaggctgaactggccgaaattttccgggacgtcagatgcgaaacgaaaggacaggatcagaactcagaagctgactccaccgaccttccctgccaatgccggtgcgtccccctctcaaaaaggttccggcccaaactcgagcagatttgggtcctccctcctccgcctcctccgccgccgccccctgtatcccaccggctcgccggagagtccgcctcgccgccgcggcctcacgggcgcgtatccagcctcgcggagagcgtgcggaaccgcgacccgtactagggcagcgcgagagagaagctgctgcgccctgcgctgcaaaggtatggctgttactgttcttccgaggggtctctaaatttccggcgattcgaagctttctaaagcatcccggatactgtatcctgtaggctgtaggtagattccgacagtggaagcgttagccgtccccttgcgctccgctgccaattggtagtctcagaatgtgtagatgcagcgtctgcttggggaatagggatgctccctatttgcgctagcctgataggacggcacttcagttgcaatctgatatcctgcttagtgcagaaaagccaaacatggcatgtgaagcgtagaaaatcagaagtaattttgtaacttctcttgctaggtctacagttggagctcttgctgctgcttggaagacttcggacaagaacctaagatcatggtgagttcataaattcacttcaggtcctgttaagtaaccatgtgcaagtttgtttactttgacattcggttctgttcaggtatgtttcttctgttctgtggtcatgtgtgatgtgttccatttttataaacagtgccattttacaggcaagccttgctgattctttcttagcggatcttgatgaactttcagacaatgaagcctatcctgtgagttggtttcagttactatgataatacagattttacaatgatttatttattgagaatttgttaactaatcatcaaatttcaggaggaagaaaatgctgaggcagtgggcacggaagagattggtgatgatgatatgcctgacctcgagtctcttaattatgatgaccttgatagtgtttcaaagcttcagaaaacacaacgttacaatgacattatgcaagtatgtgatcaagctcaaaatctcctttttcttgaagatggttttgtcctcttgttttaattggattgttgtttgacttctttcttctagttttctgattttgaagccctgtactgtcctattgtcacaagaaggctatttgcagtcaaacattaatgggtgtgttttagagtccaagacatgtttaactatatactcaatgttacaaatgctttgcgcaaaaagtacaatccttctaaatttgattctaaaggggactgtcatttgtatttttaggtaacaaagccttttgtttccatacatggcaacttacagaatcactctttgtttgcagaaagttgaaaatgcacttcagaaaggtacagatttttccaatcaaaggtcgatcctggaggaagatccagaataccagctgattgttgattgcaatgctctatcagtagatattgagaatgagatcattataatccataatttcatacgtgacaagtataggctgaagtttcctgaactagaatcccttgttcatcatccgatcgattatgctcgtgttgtccagaagattggaaatgagatggatttaacgcttgtagatctggaagggcttttaccttctgcaattataatggtaatttcagtgacagcatcaacgacaagtgggaagccgctttccgaggagaacttggtaaaaactattgaagcatgtgagagagcccttactcttgatgctgcaaagaagaaggtacttgaatttgtagagagcagaatgggttacattgcaccaaacctgtctgccattgttggcagcgctgttgcctcgaagttgatgggaactgctggtggtttgggagcacttgcaaaaatgcctgcttgtaacgttcagttacttggtgctaagaggaaaaatcttgctgggttttctactgccacatctcagtttcgtgttggctatcttgaacaaaccgatgtattccagagtaccccaccagctctgaggactcgtgcttgcagacttatagctgcaaagtcaactctagcagcaaggattgattcgatcagaggtgatccaacaggaaaagctgggcgtaacttgttagaagaaatccgtaagaagattgagaagtggcaagaaccgcctcctgcaaagcttccaaaaccacttcctgttccagactttgagcctaaaaagaagagagggggtcggcggcttcgaaaaatgaaagaaaggcaggccatctttaacctcctctttttttttctcaagcgaaaaacaaacaataaacattctcttatttaattgtgtgttctactaat

SEQ ID NO: 9982 - DNA, 13505 bp, Oryza sativa
cgctcttcttttcctagagtccaggcttgctgagagtcgtcccttttctcggtgggcaaggtcctccttttatagctcaaggggataccacatgcaccgcctctacctaacttttcatgggagggggacccacttcaccttgtccgggccacgatccgtgccttcgcccggaagctaagcagcagcccgtccttgagcgcgacccagcgccgccccccgcctgacacgggggacaaccctgtcatccccttataaatgggtgaagacttgtggtggtcctcctctcgtggagggagctccgaatgacgctccgatgggacgggtcatacctatctccactccgccggatacagaggcgacgtgggggcacggccgcttgtccaatcggtcttgaccggcgatgggccggtcacagacttggtcagtcctgactaacgtgcgtcagtcgggcggcaccgcacgtctgcccctaccgcattaaatgcggtgaggggcagttggggcgcctcccattgatagcaggttagcctgagtcccctctccgctcgctccccctgccacatgcacttgggctaggcctcagggcaaggcagcacgagggccctaggggcatgacatggcaccccgagccccccccccccccccccgccgtttctgcgatttgcaaggtgcgggggtagggccaggatgtagggccacgtggctggatgggaaggtaaattcccctcactttgcatacccccaggcccatatctccgacagtccctaaatatttgacgccattgactttttttaaacatgtttgactgttcgtcttattaaaaaatttaggtaattattaattcttttcctatcatttgattcattattaaatatatttttatgtatacatatagttttacatatttcacaaaagtttttgaataagacgaacagtcaaacatgtttaaaaaagtcaatgacgtaaaatatttagggacggagggagtatcttttttttcacaaaattttatatatcttgtgaacggtgctatacttttgaaatccataaccaaatatctcttctattttactatgggtagcgtataaatgctgactgaatctatgcggtttaacactaattaataataagacagagttagggtttgtcacatcactttatatttattttttatttgttaaacaaacttatggttgtgtatcttatagcagaagataaagatgtgaattatttttcattatctaaaaaatattatcttggactttcatttcttaagtgatacaataataacacaagctctctcaatggaaaaacaaaaagtacagttaaagggatagagctaaaaaaaaaagggcaagatgcatgtatgtactatatagttgaagtggtatatattatgagtgatttactgtttttaggaggtaatacgaggtatcagaaattttctggtgtaattttataattctcagtactggtgcatccctataacaataaaatttcccgtaatatggtccatatatgcatgcatacgggattatagagatcaggcatgaagctactacacatgtatatgtatctctcttcgagcctaagctacgtatctcctagctaggagaacaggattccgaataagactaaagttacactgaacaatgctgatcgatcgatccactggacacgatcatcatgatgagcagacattcaccggccagtacatcctttttcctgatcaatcggtgagaaaaggaggaaaaggaggaagaaaaagaataaaggaaacgtgatcatgggctacaatattgtactgcaggtctcagatatttgcatatagcagtgttgtagtactgtgtttagtgtgtagtgatgcacacatgaatatgcttttggaggtggcaagcgctagcgtgcggcagtcaacaagccgagctcgagcgagtttggttacgtaggtttgagcttgatatgaacttgagctaagctcgagccgagcctggatactgatcgagcttgggagtgagctcgagttcgagctcgatcgagcttcgaacctactcgagcttgacagcttgatttgttgaaactctaaagaacttacactcttgtataagagatattaatgtaaattatcagtagtcaaaattaatgggtgctacttgtcttgaatgaaacctctgcagcttttctcatgaattcatggctttgaaacgttgcaattaacaaaagctagccactatatctaatagaaatagtagtactattactagcagccgaataattgctttattgagaagcattgatgaggtcttgagacttgaacaagtcaagcacggtgacaagtatacattgacccatcaaaaatatctttctacatgtaatacatcttatgctaatcaagccatgccgagctattcgagctcgagcttgcgacttgcgagcctcagcctaggcttgagcttggcttgtctagtattcgagccgagcttgaatcaaacctgtaacgaatcaagctggagcagcttgcgagctccgagcttttttgacagccctagtatatatacacaactacacacactcccggtcctgaagatattgggcctgggcctgttttctggtccgcgacggtggcacaactggcaccagcagtaccacgcgcacgcagcgcagccgcctccgtcgcatcaggcttgtcgaactagcccattagctaatattattaggccactgtataagtatattttagtaaaagcaattttacagtatttgaagagataaggtaagatgcaatattttttaatgtaaaatttgttaactttcaatatcttaagtaccatggcgtatgagaagcatggcgaaggatcctctcctctcatttactcctcttggtatctcttaatggctgttggaataaaatccaacaagcatggcaataactctccctctatgggagggaactagcttgaacatatggagaaccaaatgagataagttgaggagtggatgagagtgagatagcagtgaagatggagataaatgaatggaattgaacgagatcgccatctttgccctttaagaatccttttaatttatatggaatgggaaattacaatactatctttccttttaacacaggagtagcattccaggtgtggggtctattccccaacaatgaccgtgaaatttcttacaataatgtgtgtgaatttcatcactcatatatgcatgcttgcagcttgaggattgctgcatcaatgacgagtgccacaaataaaacagcagagaaaattagcatgttacgctgaacgtaatctatatgcatcacataggccacaaataaatgggccttagaatatgagggctaaagactagtgcatgtctctgtgggcaacaaagatttgctaaccagcttgcatctccgttctaaaagcgttttggacttgctttcagaggcaagtgctaaaaccccaatgtcatacatgtgtttcgttgtatgtggaagttcacaagcaaaagaggctaagtgatgttgacaaaagaatgggaagaaaaggatcgaaaaataaaagtagaatgaacttggaatggtcgaccttggattagataagcaggggaaaagcctacctggtgccaaaaggaaattaaagaaaggggaaaactttgcatgggttgtaatcacacatagtacttttgagatgcttctctgaaaacgaactacaccctgttctgcgttgttttttccccagcttttcaaacttcagaaaccatacaaggtacttcctccgtcccataatatttgtctttctaggattcaaaagttatcttaaaatagttgtcactttagagtactatttatcacatcaaccactttcaattcaaatttcttcccattctacccctaaccaccatcttatatccaaccatacattatttttaaggggtattatagtatttttctcctgaccttaatatacatgcttaatatacatgctaaataacctggaacgacaagtttgatgagacggaggaagtagaaacaaaacagatcacacaatcagtacatcattgtacgtgatcaacggccgcacataatgtactaagtacaaatccatgaattgaatctaaggaattattttatgattagacagccacgatgcaatcgatcggatgcaagcacaatctatctagctcagctaaaataatttcttcgcgtgattgtgcgcgtacaaccgacgcttcctcttctttttttttcagaaaatctttcacgtagcacaatccaaaaagaatgcactgatgctcatcggaaagatatatataataacgtgcaggagagcgaggagggggggggggggggggcagtgcaacctccctatctgtcactctgcacttgtatgaaacatagcgcgccgggcgcctctctcgatcaactcctgtcacactcgcctcatgtggtcctcttgcaatcagttgtttatttgtagccaagtgcagcagtattgactagaaattagcgcaggtagaaaagctagtaggagaattttgtatcagtgagatgtataaactaaaggatgccccgtacgttgctgcgggacttgattaacattaatttgttagatagtaggtacaatcattaatttgttagataggaggtacaacctcaagaagaaacaaatatgtttcttggagaaattctttttagcagccctatctaaaatttgtagataatttaggtagcaaattctttttagcagccctatccagaatttgtagataatttaggtagcacatatcaactgaaggtcctatccaaaatttgtagataatttatatagcacatatcaactgaatgggcgttcagccataaagcgctggatacatgtagatgtgtgtggagatcacagtagaaaaaatcggaccggaccggcggttcaactcaactgaaggggcgttcagccataaagcgctggatacatgtagatgtgtgtggagatcacagggaccggaccggcggttcaactcaactaaaggggcgttcagccataaagcgttggatacatgtagatgtgtgtggagatcacagtagaaaaaaccagaccggaccggcggttcaaccggaaaaaacctaaactagggacctcgccggttcggtgtgtttcaaggactgttcatgcagtgacccagtgtgaaccgactgaaccggacggttttcaggaaaaaccactgaagcggggactcctaaaaccggctggcccagttttcaggaaaaaccactaaagcggggactcctaaaaccgaccggctcatacgagctgggccaccgtacagcatcttccttaatgggaagcccaagtcctaaggcccagttttattttattgttcaaaaatcgggtgaagcatgggaatcgaacccaggtttgctagatggagcgttaagttccccaccactacaccacactgaccattgtggtgtgcaataaacaataaattttaacaccgcggttgaaccggtgaaccgaggcctcaccaattcgacgtccggtccgagtttttatactatggtgcagatgggtcaatatattcatgtgggctacatttgacactgagaaggcgaagagactgactcggtgactaatgggttgggctctatgctgtattccatccaacgtctgaaaagcgatctaatgcattcatccaacggttaacaatttgatgatgatgtggaagcacgaggtttgagcttttggccttaactttatagaaagaatggataacacatcttagtgtcgatttcaccgcgtacacgcataaagaagatatctgctatatatatacacacacatacacacacagacacaagtaaaatatactgttatagtagagcgaggctccaagaaactaacgtactgaaaataagcgtttagtatatactgcataaataataaacgagtcaaccttggcctaacgtttataatgtaatggcaaattattcaattaagcactatctctacttcacagaagcagctttcatgcatggcgcttttgcttgcgatggctactactgttgttctgcttgtgccacaatcaaccggtccgagtcatgcatgtacatgtcttacctttcttcaggtcaaaacaatgaaacaatgcatgcaatgcacaccgctcagccctcaattcggccagctcaaaatcagtcataaatcgtcgagaaaccatggacatctacagcgactcccacgtgcgtggacttgctgcgtcgtcttcagttaataatctgttgctagggctcattgcccttgtgatccgtgcttagccgctcatccttttcggtgccttgcatccatcgatcgattttgctctcgccatcgatggatcgatcgatctcagcttttgccatgggcggtttggattacgtatgggataagggcgtctgcaagtggcgcggcttgctagctatacctgccgcgtcttgagatctgtggagccacgtaagtcttcagttagccacgacttggagatgagatgaggatcgaggagctgatgatgaaggagcgtgatggcgagagacagggagctcagggccccttaattaatttggatgtatagcactatacgatgtagtactagattaatctttaagagtggcttgatttcttcccatgtttagtcatcgtctcatcgatcatccagtgcaaacgaagacgatgtagagtactaagttacaaatatacatatgtgcatgcaggggccactgaggctgtagacggtagttatctgttactacaatcctactatactaccttagtacgggcgttcatgttcttatacgggagtagcaatcagcaataatctgcgtggcaacaaaacgaaggtttgctggatagaagttgaacctgcttcttatcaacaatgcagatgcatgttggcagttttgtttgcatccgtggtggcagtgaagacataagactgctaaatttgcagtccctattcaaactgcataggatcccaattcatttctaggactagcagggcgaattgagatccagtgcaatttctaacaatctcagccctctatttattgatccaatggttcaaattgtgagctacaataaaactagagctgtactttttccaagtaaaaaacgctaccgtactttgctacagtactgaggcatctgggccatccgttttaaatccaatgatagctcttgtgactgcttaacttacagtcacagtggccactgcactggaaccgaatcctagcagggcacgcgctcccaatgcttttgctctgcaaggctgcaactgcgaaagctataatccgagttgtttggacaagtagcagcggcaggtcggtaggcacgcccctgcagcgacgactagctgatgtgtgtccctgtgtggcagcctggcaatggcagggcgaggccgacggccgacctgcatctgcatggccggcaccgttttcggcccatctcagtctttccctctgccggccggcgagccctgatctgtttaaagggagaaaaatactgaagtttttgtttggaaaaacaaaattcaggacctcgtgcattgcaatagtgaattgcattcagaatgattagccatagacaaaatagtttcagggtagcttcagaaacgtcgtcagagattaggcaaaccgacaggcgacagagaaactacacactggtcatcatgtacagaaaacgggaggccgtttcgagcactggcaccggaaaacgcagcctatttctgaacactgaacaattaacgtagtattaccaacacgcgcgacagctaatctcgatcggtagctttcgctggcattaagataagattcacgcgaaccgcaaccggtggtcaagggaagaggagatcaaatagcacgccaacacgcagaaaagatgatacgctaatgcgtatccagctagattataacgtgctttgccgatggcaaatcaggaggggaagggatcggattcttgcatccttcattaacaaggctgctggtttgtcttggcttccaaaaaaaaaaaaatctccgagtccaacaagacgccaaggtcgattccttgtttgggctagataaacaatatgggcttacttgtgaccaaagtattaggcccactatatgcttgaatgcggcagaacggcccacttaaaactccaaagcccagagcacctatgggcctcagccgacgtgatcacggtgcatctctcagaaggttcccatttccacgttggtttatcaggtgattttagatctatcctacggaaatttgatgttttcccatcgaaacctgattctagtggaccgtctagtaccacgtgtgcttcaaattgcaggtcaaaaggagattgtcccctcttcgaattacacctccagtctcctctccagctgtttcaccggtgaatcagcaagattacattagcatctgataggaaccaacacttctgctgcattctcgcacaagctttaagagcccgattataactcgctatacagaaatccggaaaacctcccgcattccacacgcgcgcctttgtcaacagctagagttgacaatcatcacttcatacggtaggagttccatatacacatcacaagcaacagaaatcgctcatagccaagatgcaatcctggggctggagagagcaccttgctcctcaggtgtaaaaaaaaaagggaatttgtgaggggtttgctcttcctgccacacctctcaagtctccattttcaggctttttcgcttgtaaaatttctcagcatttcaccagggacacaatttccaaagtgtctaatggagcctaagattgttccatggaggacactggcagatcactagcagcagcgtcaggcctccgggactccatcttcgcggagatctccgccatgaccagcctcgacaggagcagccccgcgacgaaagcggacgccatgagcatcgtgaacacgccgctccagctcttggcagagatgtaccccgtcagcagcgggccgaccgcggcgccgatcgaccccgtcccgtcgatgatcgccgtgacggtggcgagcgccctggagttgccgttcagggagctgtgcgtgccgaggtcggcggagacggcggtggtgatgagggcgtacggcccgttgacgagcatcccggtgacgaacatgagggcgatgttcgagtacagcgagaagctgccgtatatgcggtagaagaagagcgccgggatcgccgagaacgtgaagctcgccgccgtcagcgcccgtgcgtcgaggcggtcggagatgtggccggcaaggatgccgccgacaacgccacccacgtcgaacagagttgacagtacaccggctgcggtgtctgacaagtacactccaccgattgctgaaaaatggaaacatattggcattgtcaggtacattatcattcttagtgctaatacacatcagattacaccaaaaacaaagtgcagttcatactagtacatgacagaatggtttggttcaaaatcatgaggtaaaagattaatttggtatgaggaaaaaaaatcagtatgatattgaaattgcacacaagactaggggaaccttttctcggaaaaaggagggacgaacctgtgtggctgatataaaacggaagccaatacaggaatgtgtaagccacaagcttgcagaagaaaaggcagagagcaaatggcgctacaccaggaattctccaagcctgaatgaacccgactgccttttcttttgatgccgatcgttcttccaacagaggtgcactcatgtcatccttctcagcatccttctcatggatatcctcctcgattccaatcatctccggaccgacaggcaagaacagaaacactgcaagcccaacgactgcgatcatcactccagggactgcaaacgaccatgaccatccaaacttcaacattgcagctgcaattaaggaaccagatatgtttcccacagatgtatgagcattccagattcccattatcagccctcttttgctctttccaaaccaattaccaacaactgcaaccacagatggccagccggatgactgaaacaggccagccatcatctgaacacccagaaagtagtagaagttgtgtatgttgagccagttgccggcaccaaaggcagcagtgaaaaatccagtgcctatcattccgatggtcagaagtatcctgagatccacccgatcacccaaatggccagcgaagaacatgccgattgcatatactccgagaaatgccaagtcgatctccccgagcaatgcagtaccatcgtcggcattaaacggagcccagccgctatagagagccgtcatgttgccctgtgcatctcttaaatcctgaagatacagatggctcggccaatgcaacatacctaggttttctgtcttaggatcaagaacactcttgacaatgcttgtagtcttcctagtggcatgatagctagcataggataagaacgtcagtatcaatacaagagcctggcatgatctgaaggagataggactcccccgggcacactcatatagctgaatccccaatggcttcatccgacgtgttttgcttggggaacccatgaatgaagctgaatttggtttttccgctgaggcggctgcaaccaggaagaagtattatactgtctgcaaaaggccaaaagagaaatcatcaggagttgtccacaggaccacaaaatttaacagcttgacacaaatggaatagggaacttctggttcacaattgttcggcagcaaatggacacggtgaaagctatagagcttattctgcaaggaacacgcaagcatctgacgaaatgaacaatattttgccaaattattggggcgacgactgcacgtagtttaatgtggacgataagttaagttggtcataatttaaaaattgtataaagacgaattgcataaactaccttgcacttcgctattcgtgcgattaggtaggatgttacgatattcagaaccgacactttcttttcttgcccaagtgggatttcccgtttcatcacgagcaaaaggaaaatacaggagttgacgaccagttccgattagttgatatgcgttgaacgagcaaaaggccctatgaattgacaatacacagcgacctgaagtttaactgtgaaggccctatgttttaatgctacaaaatcaagaaccgccgtttggtcaggttcctatcttggcaagaagttctgaaggcatcattccattgtctaaatcttttttactacccattgtctaaaattacaaataatcaagttcaaggaccaagaggaaaacggaagaagagaactataattcaatcaactcaacaattggagggacaagaaacaaaaatctccttcaaccatagcatcatcttacttccgattcagaaaccgaaagaagaatcgattcagaaacgggaagaacagaaggcaactggagagaaaacaaatactccacactaatacctgtgccctatggatcccttgttaactcaacagcaagaatgcaaggagaaagcaagacgggtcctgctcttgcaagcaagcgaataaaacagacgcaaccagaggatcgcactctctggaagcaagcagaagaacaggggtccatagaaagagagttaaatcaggcccctcaaatttgcaaggcaaataaataaggcagacgaggcgatcccgtttggccgaccagaatctagtttttttctagacggatggaagatcaataaaaagagaggagatttatcctagaaaatgggaaatttaagccaggagaggaggcgaagagatttgatcagatggagcatgcaaattacctgcagtcttgcagatagaggttcagaagttggctgttccaggaatcgtcctagaaacagcgtggttcttcttcttcctggctgctttggcgccgtgaggaggcgagcggaccgcggaggggaagctttctggagtcgcctcgaccgtggcttccgaggaattactggtcttatagatgtttacgcgagtctttttggcttttgtcgtggtgaccgttccacgggccacgggcgctgttgggtcaggtctttctccggtgaggttacactaccccgtggttttcctgtggcgttcaagtcgcaacgattacagccttacagaatattacagggtcatagtagctgctgtttaacaacttcgatattcgctgcttctattccttttctcatctctgaactttcctctcgttttgaacctgaaatttacaagttagcctataaacagatttctatatgatatgatggcatacttggactaaagagttcaaaacttcaaatcatgtaataccgatctattaattagaagtacacacgcatatacatacggtaaatgtgcatgtttctgcacttctagaccgtttatttctccaatattatcaagtgtttggaaacctatacacgtgtagtgtataagtatgataaatgctcattcaaacgtactcagttaaaagtaacagaagaatttcgctggttgatgatcaaattagaatgctgcttgttcataccgggaggtgaaggcatacacctacctttgccggttaggtggattttgctaatggccagttcaaatgccagggacagagaatggggagatatagatataggatattcttctgaacaaggatattccctgtgctctaatattatgctctctaccggatcttcttttgagccccacaactgtagggccatggcaaagactacaatcttgtggctcatgttctgcccattattttcttaatatgcaaattcgctgttgagtgcgacaagtgataaagctaaacatatgacccaattagcctaagttgtatactgttttttatggtgtaggtaagccaattaacgtcaggcgatcactaacaagcaaggacctagaagcagtcaagcagacacacctaggaatcactggatcaatgagcaaagaagagagagaacggaccttcaacctccgatcgattctccccggtctgcgatggtggttgaataagtgatgcgtgaaagtcaggtgatccggcgaggcgtggctgcacgtacggcacatgagacgaacataatctatcttggtgaaagacacagagcattatgattgcaagcttccaaaagggtgtcggtgtatatgatgcacctcgatccgtcgagggagtccaggacgtgcaggttcgccatagccatagccctagcaattccgcttagttgaattaggatgtctaaatatttacgttgtgtgttactattatccaaaactaactctatttctatccccgaaaatcgagaaatacgaggaactgccacgtcagggcttcatattttatggacttgttcactttgatgtcattttcaatcttaccaaattttagtaaagttgccaaaaatttctatatttagtttgctgtcaaattttagtaactatataaattaccaaaattttgttaactatgccaaaattttggccgatcgaatg

SEQ ID NO: 9983 - DNA, 1646 bp, Oryza sativa
gcgaattcgagctcggtacccacatttttggaattagtttttttgtgacttattatccaaagtactttaagcacaacttttcgttttttatatttgcacaaatttttttgaataagatgagtggtcaaacagtgcaagcaaaatgtcaaaatcccttatattatgggacggagggagtatttaagtagcaaatgattatcactatggaaaaaccttttgatctggtcatctttgtggtccattgctcttgtggcaattgtttaagataatgctgcttggttgcaaaaactgcacttttcagattatgtaataagttataagttatttatgttaatgagcttgatatgcattttaacgatggccgctcctattcttttccatagttgcctatcaggttaactataaaccttctcttttcagatggtacttgtgcacccatagagagggacactcttagaagtcttgtggaatctggtgcaactgaaagttcaggttgtttgcctggttgccacttgggaagtgatgcccctccattacatctatccacagctaatgctcttggggatatcttttttccatcaagtgatcttttgcaagcaaatgaggagtgtgctttggctgctctcactaaattaccagaaaatggttcgtcttctagttcatatattctgttaactagtactcccttcgacccataaaaaaccaacctagttttggatgtgacatatcctagtacaacgaatttggacatatctctgtctagatttgttgtactagaatgtgtcacatccagtctagattcgttttttgttggacggagagagtatagctttcagttgtactaatacaaaagaagtactaatttcatccatgttctgtagaccgcagtaagcaactacagagtactagtagcaacctgttgtccagcctcaataatgtcgtacaagcattaagtaatcttcagttgaagcacaagcagttagcagaggattatcaaaatcaaagagattccagtgcccgaaaaagagctgaacatagacgtctaaaaggtatcttgtttagagattgtgctgatgtttctttacagttgttttaactttcaaataagcatccatgccatttaaaggaacatgtttcgcaacatttgagacctgctatacatcttgaattatcaaacatgttgccatcaactcctatctatcctccctacgcattaaccagcaatcttctggagagcattcttgcgataataggctgtactgttgcagtactcttatatttactgcgccagcgcttcagacttgtaccatattttccctatacatttttttacctagatacgttgtcctaatacattgggtaaaactaaccagatgttttggtttactttgtcaagaggagttggccagtgctgcttctgagttggaagaaactaactacaaactggcagcacttaaagctcaaagagataatacacaaggagctcgaatcccatatcctacattaggaaacaaaaatatgcctgaagataaggtcagagataaacaaagagagatgcaggatcttgaagctactcacaaggaattatcggtaactgccatcgttcatttttaaagttccaaattactacttcctccgtttcacaa

SEQ ID NO: 9984 - DNA, 1355 bp, Oryza sativa
cgataagcatttttgcgtgcttccatatcctagatcaagtgcaagacacaagtataataaaattatccggttgcatcatctgtatctcagactacagagagtagagtttcataaagagtgtaccccaaaatcaaaaaagaaatttgacctatctaccataaacaattccaaagcacttcgccgcaacaaatatctgcaagaagtcattgaaaataaccaagtaagtgaatagaaataaaaattatgtggttaatgtcattgatgctgcatgcatttgcttcacaagtattgaatgcctatttttaatctcagcagacaagaatatccgcattgcgacttgataagagtacatcagaaaacaaattctaaacatggcatctgatcagaaaataatctttaccgtctgctatatatctgatgcagagaggagatcaaccaactcctatctttatcctgttgatcacattggccgctagtggacgcatgatcatccatgttactctcgcttgcactctcatcaattataaagttaatcctcttagatgttacctacaaaaaaaaaaaaacagggcgaaatgatatcaattaacagctaaagtgggagttgaagaagcagaataggatcatgagtagcaactaaatctttgtaattccaactgtgtagctttatatagcagaaaaatatagtaaagtgcatatagaattgaaataatacagattttgaacagatccaggactataacataatataaacacgatagaaggatagatgattctttaaagaaaatatattggatcaaagaaataggatgcatagtcattactaactaaattaggtaacacggtttttttagtattatccatctcaaacaaggtgtcaatggtttagccacaaggaaaaataactgtctatgtatttgcagcaaattggacgccctatgttttacttaggggtttagccagaaaacaaattatagtgctaatcttagcatcccctagaatttgatgaacataaggtacttcattgcaatagtttagatcaaacctttcagtatataagcaaataaaataaaatgctgcagtacagatagcatattatgacaaaaaaaaaactaacactgcatatatccgagtacgtacttgacttattttgcattttcagctaaaagaaatgtttttagttaatttggaaccatcagaacattctgttcgatctacgcagcaccccattaataataattaacatgtgcacactgaaatataacgcaagttgtagtggctaaaatccaattccaccatagtaactgagaagtgttataactaatacaccacacatcggtccacaattgcaactt

SEQ ID NO: 9985 - DNA, 5372 bp, Oryza sativa
tcttctgtaaaccataagtacatgaactccacatcttcaggtccaacagcaaagtactgaaaagctgcactttaagctcatggttgtttctttgagattggcacaaggatacaattgcatcaactagctcctcatcagtcactgcctccccctctccaccttccatctttggaaatgcttgtaattggtaatgtaaaacacgtgacaaaatctccggtgaacatgtccgacataattcttcattatttccaggatgctgaatagccagggaaataatcctgaaaattggggcagaaagagaagcagtggcaatcgacaattcaccaagcataggttcaagactatccatctgcacattgcttatagtcaacggaagtaaagccattggacccccataggctaaggcccataaagactccgcaggccgcacacgagatgaaacatgaaccaacccaagaacttctgcaggccttcggtgagtgcctacagttcaaaagaagatactatcaataaaatcatgtacatgaccgaacgtgtcaaagtgccactatgaggaagcttgggaattttttgacattcggttagcccagtacatatcaaaaatcaataatctgacatcatttcagcaacaaggaacatgatatatcaattactttgcacactgaaaagggtatagatgactcaagagagtgtcatcacaaagatttatcaacaattgacagaaactactggcattgaagatatgattcacctgtgagtaaatacaatttcttggtagaaactacagttagcagcttgctctcaagagctcccacctcatttttgagaactcttatgttttgctatgggaaaagccctattttggtcattcgactttaggatacagtttgtgttcagactgaattttttttcaaggatgctattatggaaacaaattgagaaaattgctggacaaccaaaactttttaaagatactatttacagaccattaaatgaaagtttctgaaccaaagcgggccattgaaaagttaaaggtcctaagagaaatcagagccctttttttattggtcaaaggcacattagttatatgactttgagcataacaatttgttttgtccagagcaagaatttaaataatgtgttcaggagtttgagtaacataacatttctgtatctatacctatttcactaaaactggaaccaacaaggatgtgtaaattggacctaaaacatataagttgatgttaatgtgggaaaaggggtaaactactccgtcaacaaaaggggggggggacaaacctgctgagccagaaggggaagcatctggacataatcgtccattcagaagactaggatgataaagaagatgtaagcatcctcctatctgttggttcaatgtaaaactctcttcggccatgttcttaacatggtcattggttgctctccaaggcaaacctgcaccatttccaaaactagggagtacatctcctccacgggatgccagacgacccatcctttctggcccaattggctccctaaaaatgtatataggtcccatttctgcaaacaatggacattgtcgcctccgcctctgcaggcctgcaatagttggtggaggattcgttccaatgcagcaaaatgctagtggttttgagatgcgtgggaactcaaaaggacgactctcatgcaagcttccatcaacgtacaaccgcaattcactgtcgccctttccaagcaaaccatgcttgtttgtgtgctccaacccaacgaagtaccatcgctgaggtttaaacgcataagtgaagtgcagagaagccttcttacccctcccacccccactttccaccaccaagaactgtccatggaagtaagcctccacaccctgattatctgaagagagaaagctaaaaagtctaggcatgtgtgttgttccttctcctgcaagagcgctggctgcagcagctgctgacattgctgatgattttccagatgttgctgcggctgcagcagcaatggcagctgcagctgttgctgtactaagtgtatctgagaatgattctatgtaaatccaagtagcaaacccgtagccattagagaagggccacctgctgtcaccagggccaagcaagccagagctctccccgtcaaactcaaatgtcgcagcaggacctcttgcttcctcactccccatggctttctcaagtgccagcatcagtggtgttgcccagcttgtaccaagcgccttcttaaccaaaccaagccacgaatgcaagtccttcacgctaagcgagtgcccacccaatagctggatgcaatggagcagtggtgttccgtcccagctacttgcccgacccattccaatgagtagcttctcagcagaatcgaggaggacgggtagaaggcccgatgaagagcacatggcacgattgcgtgtgcaggcgcagagcgtggcgtgaatgcccacggccatacgagtgcgcggagatggctcatcgccgcaggggaggtaaggcaggagctccgcggcaacaacggcggctctcgagttgaacatgatgcttgggggagcgccggtgccggtcttgtcttctacctcgtcgaggccatcggcgccgcccatggtgccaagcagcacgtccacgacggtgtgcggcaactcgccctgttcctcggagaccatctcgtggaggcggttcaccccggccgccgccgcggccccgcctccgaccatgatcgcgtcgtcgaccgcccgcacaacctcctgcggggcgtccggcggcacgcccagcggccgaggccttctcctcctcggcggcggcggcgacggctccgaccgcgccggcgtgaccgccaccgacgtgcccgcgctcgtatccggatccagctcgctcccctctgcacgcacctcgtcggcgagcgggaccgccgagaactgctcgtcggagtcctgccccgggggcggcggctccggcgaggaatccaacgactcgcggggttcctccgccattgctagggctttacgacatcaacaccaaacaccgaacaaggtctcgggaataaaaatgcgggcggaatcggtcaacgacagtgaaaaccgcgagcgattcgagagagagagcgggggtggagtggaagggggcaggtgagcagcgcgcaatgcggaggcgcgcagatctggtggcgttcgggggtgggattggccttgcggcgcaccggcggagaggttggggatcagcggcggtgcatggcgagatccgcgaggcggagaggatgggtggggatatcagatggacgaactggacgagaagaagagcaggaagggggagaggtagtagacgacgtggcgcggccggcgggttcacggtcacgggtcgcggccgctttccagtgtcgcagcctcgcacccagtcgcaggcgtttggactttggtgccgcggtttgggccttcgcggcgcattgcgcccgttaaggaagctgactaacaagttgggcctggtggcccatgtgacagagacagacaacgaacaccaattcaacgagcaggaatatacacttgttgtacgtgatgaaatttttttatgaatctggcaaatacagttttggagttttgatctaagcacaaccctagatggaagttgaatccaacatgatttcatttcaagagaagttcaactcattcaagatcaacagcacatgcagggccaggcatgatggaggagctgctgagctgcatcgatgcaggaccaacaataaaaaggagcaacgtactactcctattgcttcaatgcttgcagacaaaggaaaggtatggcacaaccgatggtcgttcacacgattgcgatttgcaaactgaatgttacggagtacttacgatcgaagtaggatgcggcctactcccatggacgtaaacacgtttaagacagtatacatgcatgaactgaatagcagaaaggggcattttctcgtccatgtactattactgctagttattccaatctcgcaatgctcgattagtgacctatatgtgcaagtgattacaatttaattacaaagaactttgacgagtaccacatggactgattaaaaaatctcagttaattctctccgcgaactactgtgacgttcaaaaagtgattagtaggtgagctcgcctgacagtctgacacgactcagaaagattgattagtccagatcttcgcgaggtcatgtgcaaagttgaaagcagcagtgcagcattatactcgttgagtcggtgcaactttgaagacacgctacacagccaagcatctagttagtgttttagactttcagtcacgcagtgctgcagaagccggacgcgatgaacttgtatcccttctggcttgaggcaatgccatacacagctaaatgcttgcctgaattgtgcaggctgacttttgcaatcttgctggaactgtggttattgtcttttcttattctggattttgaatttccatttgcatgctttccaagctctccgtgcatttcgtgcaaagaaaacaaatattatacaaaattcctgaaacatttttaaagaaactttccaacttcatattagtttaactcattcatttatatcctcagacaactacataaaaaccagattatgcataatttaatcaatttcaattatcttaaacgggatgtgtgtgttagttttgcagggtgtaggagcactgctatgcatacaactcatgcatatgactagcgtgcgactcaccttatgagactaatcagtttgctcggattcttttcatgctcaagtctttcacagcttagtcatagtcgtacatgggtcgtatgcaaagtgattcggagggcgtagtacgagtacaagtacaagtaccccaagggaaatctttttcggatttccgtagactacctaaatcgctaccatgacttatgaccaaaatgtactgagggagttcacagtggacttgtgtagcgttcagcatcgtcctcccatgtctgcaaaggagaaagtcacatgccacgttttcttccagacccaccaaaataaagttcttgtgtccaaagtttaccaccgggttcttggagagaaactactcgtttgggtggataaaagctaagagtactagtactcatttggatgggaagaaaaaggagagagatgaaaagtaaaaagtttgtcactggtgggaccccctactagtacttgcactgtggagtatgaagcttataaggttcttcgtctacgtggcatacgaggaacagcaaaaatcggcgatgcactgtgaacgccctgaagatgcctcacttcaggcggagcctctccgcttggatgatagaccgattatttgagcctctccacttggatgatagaccgactattt

SEQ ID NO: 9986 - DNA, 2503 bp, Oryza sativa
aagcctaagttcaaaacagctcaaaatcctaagagcatgtttggatcacttgtcaatctctccatggcctatgtgcaaaacaaattgtgcccaatatttatggatggaatactagatcatttgtcaatctctcattggtctatgtgcaaaacaaaatgtgcccaatatttatggatgaagtactagtacttaacaaataacaaatcactttataaggatttttcactgaaaataaatgcatgccatattcataccctattgaccaaaagaaatattgtgtggatttatcttcaattcttcataatcttcacaaaaccacaaaacaacaaggcaaagattggtgttttttctgtaacaaatactactccacaattatcacaaggtaaaaaaagccaaaccacgcatagcatataccataagaaactaccatcgacatgacagcacaaatcctggaaagtttatggcaagaagatgaaaaccaacctgtatagcacgagattggaatgaccttgatgcatatggaagcgaacggagcaagactagcaacagttgaatatgttcaaaacggtggccacaatcatataggtttagattttcatcaactgaagaaacattgatctgcattcaagatcataacaacatcaaaagtagaaacttcgaattgtaaacagttgggtaataattaaatggaagaaacagtaatctgcattcaagataatattagagtctagagcctataatactaatcaaacttgaaacactgtggtgcttatgccattccaaatggaatggacaaaaaaaaactaagtaaaggatataactgcaaagtccgccaaaactgacatggactcggacactcgactgggcagagaaaatctagcgttcatgcttatttttacttgaaataccataaagcacaatccaagagattttgttgatagaaacttagatatcagtttttcatgtggcctgagttgagaaaaaggtcaggtgataaggtaaccaacaggcaactaagtaatttactcttaagttaattaatcataggaaatcgatttcgtggaagtcaaaaacatatacaattatctagacagcacataaacaacataccgcagcagaaattaaagccatatagacatttacagtcataagcctccttggggctgcttgaaatgctttctgcagagcaaacagtaacagtgacactctatcttctgacatggtatttccttcttcatgaactgtcgtcagaaggccaccaggtaaatttggatttgcagcccttgaggcaaactttaggtgacctgatgcaactagagcacccaaaatgtgaatgattccaacaacaatgccatcacctttgtcaacattgtaaacattattccggacattgtcagcagtaattgagaagttgatgccacccaaattctttagcagctgattttcagaactggacaacttccttcctatacttgatcccaaaatctcacaaggcacatcatttgtgcttgtagatcccagctcagtatgttcttcatgaaggatggattcgtgctgttcaagttcaactgattgaatttgatcatcctggctctttgcttcaccactagcagcttttgtgtctgaatcatcattccttaaaaaatcattttcacttaaaagtgcatcagaattgtccaaaatactgttgttaccagctttagcttccctctgtaaaagaacgagaagtgcatccacaccaccacaagatatgaatgactgagcaaacatgttggctctagaaatgttaggctgcacaatcaacctatagatgaggtgcaacacccttgcaacctgttaacaaggacattgttaagatcacaagaaacagcttagactatattgtcagatgagctatatagataagatggccctagactgctacacatttgtattgtctttcaaatgatcaaggcaagtataaatatatcccaacagaaaaatagcacgtactccctccagttccataattcttgtcgttttggacaacaacatgatctccaaaatctttggctatgattttctattataatatatacaaaaaataagtaaatatttagcttttaaaaaatatttttaaactaatatatgcatcatgttctagtgtcttcaaattaaatattttaaaagttagtgatagtcaaggttctaattgtttgacctcaacctcatccaaaacgtcaagaattatggaactggaaggagtaaccacagacaagctttaagagcaaagagctgatgcaccatcaaatttgttgtgactcacggttaaaataatacccacttatccttatgatatgatgtatggaaataaatacatcaaattgtaactttacagttttcagtgtatatgctcactagatattaggtagtagtagtaccattatgatctttagttcaagaacatctgcgtataaaatatgtagaaggttgggtatttccattcaaacaatggctcaggagg

SEQ ID NO: 9987 - DNA, 1892 bp, Oryza sativa
taaaacgaaacggagggagtactgatttgatcatattcagatcaacccatcaaaatgggccaacaaagcgcaacaatgatcccagacaaaacagatgtttatgaaaaaaaaaaaaaggttctctatacattgttcagtgtttctagtggttcacttaaccaagaaaatgtaccacagaacagaagaataccaggcaaccctcatgataacggcagattgactatcataacaacaaagaagagggggaaaaacagccacaatatcaacaaggcaatgtagagctttaaccagacaaacccaattagagcaaacaatttcataaacaaagttgctttagtgcaaaatatctgatacctgcattgcaatagtcgaaggatcacaaaattcaacagactaccacaggcgagagtgggcttgccacaatttgtaaagaaatcaggggttatctgttttttttttaactgccgagtacatacagtactgtagttttattgcagttcattaattaactgcataacaaggaaatcaacaaacaaatgataaaatggaagtacacattgccatctccctgcttccaatttttccgaaacagagtttagaatttgctgtgtgaccggaactaattcacatctttgtcgtggaaagcaaaagtgcaaaactaaataactgactgaagaaaatgtttaagtcaacaacgctaacagtcttacaaccttatcccaccatcgactggaagtttggaagcaagataacctcaaaatatttcagaccagagaactctgaggccagtgcgaaggtcacaaactgaacatgttaatcgcactaaagcataaaacacactacaggattccaattcagtgacaattagcataattccattcatcacatactccacaacgttcagacttcagactagtgatttagactaagactaacttcagacaaatcaatcaaaatgggcaaacaaaagctgcaacaaactggttatctgaaaaaacagggggtcttctgttctctttatatacattgttcggttcattattcctaagggcacatagatgcaatcctcgtgataagggcagaaacatgtcaatccaatgctaaaagaattatcatagcacaaaattggataaaacattcacagcatcaacaaagcaatgtagatttctaaatataagattcctgcattgcagtagttgaaggatcacaaaattcaacaaattgccacatattttgggcaagacaaatgcagcaattgttcgacaattcatctccatcagtggaaaatttatgggatccaataataccatgaagtgataataagatctaaaaggtaatgcaactgactaaagggaaagatgatgattcattcaccgagcgccgctgagaccaagcagcatctggctgctgtcgccggccgggatgtacgagacattgggggagcgcgcaagctccccggcgatctccttggcggcctcgatcctcctgagctcgatcaggccggtgcccgcggcggcggtggcctcggagatgaggcgcgcggcctcgctctccccctcggcgcggacgatggcggcgcgcctctcctgctcggcgcgcgcgacgaggaacctggaccgctcggcctcctgctgcgccacctgcttcttctcgacggcctgggagaactccgggccgtaggcgaggtgcgtgatggcgacgtcgtcgaggacgatgttgaactcggcggcgcggcggatgagggagtcgcggacaagcgcggagacgtgggggcgctcggagaggagctggtcggcgttgaactgcgcgacgacggccttgagcacctcgttgccgatggaggggagcaccttctcgtcgtactcgaggcccagcgaggtgaagatgtccgg

SEQ ID NO: 9988 - DNA, 30978 bp, Oryza sativa
ctcccggagtccacggagctcggcgacgacgcgttgagcgagctgcaggcggccgagctcgcgtcgttgctgctgctgctgcaggtgcagctattgctctcctgggacatcacttgctcttgctccattcgtgtgtgacgagctagcacgcgacgaaaaccaagattgcttgctagtgatcagtgatcactcgagctactggcgtttcttgctgcaacttgtcactgtaagttggagtgatcaacaagttggctgactagctagctgtcgtctgtggagatgaaggcaatgtgatgcaccatccatgtatatatattgtggctctaagtcaatgtgtggaagacacaacaattaaagtggcactatttcttttcttctcccaaagaaatgtgaatgacatgcaaacggagagagagaaaaaaggtgtaaaatcacgccatgatatgtagcttaaggacgcgtttcttctctgatctgaagatctcaatatactgaagttctgcacaaactatagatttcattattcattgttcccgagctcggcgcatcgattggcttcgtgcaaaatgtgtttctttggacgatcgagcaatgattaaagtagccagaaaatgccaagccacatggcaactccgtacttaggtgttagcctcgtgcaaaatattaaaatgcaaacatatgggaatcgtctatatttcacagatccaaatctttggatctgcgtgcttatattgtgtttcaataattaagtacaaatcaataatgcaaacgggcgaaactaatggaaagggtgtcaaccagcagatgggacagaaaaagcagtgtttgttgggataagaagatgagaagactaaagaacataatgcaaagcaaagctggcaataacccattatttttgtgaagaaaatgcagccatgcagcccatagtaccctttctttccccataattttcaacttaactattgatgaccccgtgtataatgttatctgacagaataatcaaatatatacgaccagagattccagcgcgggaacataaaaaaaacctacggggaggaactcgtggcgttgctttggagaattggggatacaggtgtttcctaagatcacacttaaaactttattaaggattgctaagttgcgaccaaacaccaaaattcgtctggagaaaaagctgggataaaactaatcttcgctatttgagctcacctttcatttggccccatgctagaatatagtgacaagcaatgagtgctttaatttctagtggttcgtaactactggaatggaccagaatgagagtattttatagacttgaggataacttttttttttttggctgagaaggcatgcatcaattcgagaaaacagaaaaattaaggtcaaagcagaacagataactaaacagagatgatgagtgaaaacagcgtgaggatcttcagacttcagtgaaacctgatgatatgaagaattcttctctctctttacctttacgttcaaagcaaatctctattcgttcaaaaaaaaaagcaaatctctgaatcttagttaaatataagtagctagcatcaaccgtagtaggaattcatcgtgttaatttggtcaattaaaagcagatgccacagacggcaactttgcacgaaagcccagatgatcggtttagatgttacctaatgcacaacgcgagtacgactgttgaacaaagaacgaaataagacgagaaagtgcattcaagacgattcatttctttggacggcaatttgaaaccgaaaacacgctatgtttttatacatctaaaaacgagtaaaagccttttcttatactccatatatctatcatcaaacactttagtgaacaagggcgatacgtagctaaatacgggccttgcttcagttctgacttgaccttcctgccctgtcccaaacatttttttcttaagctatgacgacgactagccgtacgtagccatggatgcagagacaataggagacatgacagaaattacataacaaatcaaggaattctagaacacgtatcacaaagtgccagagcaaatgagtatgatgtgcccatatgtagccaagtaaagagtggttagtacgtccatgagctccacggccgaaataaaagagtggttaaaacgtccatttgcttcataacttccatataagtggtctttttcctgaaagaacagcatgatgcttatgtagacggctggaagaaataatactagatggtgctcagttcacgaaagctacacttctactgatcgaagcgtcatattgttagacgaaataatgcgaataattaattagctgagaccacatgcgttagtttcagtgaaactaacacgctgatggggatctgcagggcattattgtcacatgaagaacggtacgtacgctggtcaatcgtattccctactgtataattagttacaaactacaaactttttgtgtgtttgattctaatagaaaaggacttttgaccaattatggtggtctcaatcgatcgttctcctcacatacggttcaattacatctctcttttaagtgtgatctggctagcttttgttttaagttttactaattcaaagccagagcttttctctttaaagtgttcaaagcaacagtcgattgattgctactattgtctggcaacaatattcagaatgaattcttcagataaagagaacgattgttatattgcccatcttttcttattccaaaagaaaatattgtccatcttttcaatatatttgtatgcaaggattatatactataactaaacattcacaaatacatatgaatgtgagctgttttgcttcagatatttctgcacagcctcttataactactggttaaaattaaacttgaccaaaacctccatttcatcgtactattgtgccctattgattttgaggtgttattcgatggtctctagactagtagaatagttatttctaagtagtaatggaactcataaatcaataatttagatcacttttactgatgataattatagtagaatatatattaccgtaaagtcctaattgattttagagttcttttatggtcttttatgacccttgtgggcacttaaaacacaaaagcccacaaattttttaactatagtccttgcgaaccaacctccagggtttaacttcactgtatcccccaaccacaaggacatcccgatcgtgtctgattccgttggcacttccacgacaaaatcaggtgacatctatcggaaaagtggtatatatatactcagcaaatctcaatcaagggcatgcttgattaaggcacgtacgcgtcataaaatcaatcattaaacagatcgatcgatcggctggtcgcaccaacattctgttgagtgcttgctaaccgattagctgcttagctcacactgtcacacgcattggcacgtccaaatccccgcaaaaaattgcgaaatccccagcgaatcgcccgctcccctctccgcgcccgcctgcaatctcaaccagcagcaaatagaggtacattgtgaatatgttcacgggttagccacttacacccttaaaataagaaaagcgaacgactgaagtcgtgcggcaccacagcctcacataccgtaacgttcccttctccgatcggcacgccggccggcccggccggcacggctcgcttccggtcgggccggcggcgacgacgacaagacccctttctgtcataggatcctctcctagaggcatcatttcacgcattatgtaaccgtacatgcgtgtggtttagccggttttgattattatcagcgctgcgtcgctaattcgacagctcgctcgcgtttgctgctgctgctgctgcagcttgcaaacgcatttgctcctctggccatgtgttgtgcatgtgacacggtcgcctctgctcgtcccgcgctcgacgcgagctcgcacttgggctagctagctaacgtgtactagtacctaagatcctcaatttgcgactaattggatgattaattagggaaaggtatagatggcgagccaggagaggttaactggttcgctgcgccactggcgttggacttggactcttgtgggaaccggtaactggcgtgcgagtgctctgtacctaaccttctagtcattggcttgtggttttatttatttttcataacttacattggcaagtcccttgttattttctaattaagatatagattttttatcttaatttttaaattgctaaacggcgtattttgtgtggaaacttcttatgtagaagttgctttgaaatatcatataaatctatttcttaaatttaaaataaataaaacttagttaattatatgttaatagttttcttattttgtatatctgtatttaaattttcattagtgaactcaaacggaccaacagagacaagtgaacattgtgtgcacactgtatggaaccttctttgctacttcctctccttttcttttcactcttctagtactgttgagatattgagttcagtaccactagtaccagcacagtacgtgtagtaaagaaaggctggaagtagaagagcttgaaggcacagttggcatttttatagtttattatttaactcccggtacttgttcgaaggagctgtactccctccgtcaaaaaaaaaagacaaatcctggtttccgtgtctaacgtttgaccgtccgtcttatttgaaaaaattataaaaaaaattaaaaagacaagtcacacataaaatattaattatattttatcatctaacaacaatgaaaatatgaattataaaaaaatttcatataaaatggacagtcaaagttggatacgaaaattcagggtttgacttttttttttttttgggacggagggattacgtaataatgacgtggcagcagcaagatccggacttgttatgagcaagggctaatctggtgagaatttgtgtgagaacgcactctggtggtgagtgatgtacacaagaatccatgcacttactgccaaactcattgtgaaatcattgaggcaagcaggcaacacatacatctcaattctgatttttgctgattgtccgctgtttcaccgcaccattaaaacgacctccaaacggccggccagcagcccaccacacccacatgtccataaaaaaaaataaattatgcacatcaataattcaatcagctgaaaaaaaatctgcttcgaattaattaacttctattagtagagagatctttttgattgttggtacacaaagcacacaggcttcatggcctaatcaagcacaacatagactaaactttgtcaatagcagtaactactaaatatagcggtaataacatttttcccttttttttctttctttcttgagagttgtcgttgtagcctattcatgagcccagaaaggtaaaatggctactcggcccacaagagtggctcattgagcacgacggcgtcgccgccgtcgtactcctcggccgccagtgccgccggccacaccggcgaccaccagagcccgtcccgtaggtcgagaagaaggtcgggtaggtcgaagagagcattgtcctggccgccgtcggcgtgcaccgtgtcagggcaggcggcttcctcctcgggttgctcggcggtgggcgacgacgacggcgacgactcctcctcgcaccgcacctcggcggcagccttggcggcggcggcctggatgtctgccggggaggtggactccgggcggggcagctcgtgggcgctgtccgggaagttgaggtgcgcgttccggcccttgatggcgagcgcggccacgtcgtgggcgcgcgccgccatctccgcggtggggaaggtacccagccagatgcgcgacttcttgcggggctcccggatctccgacacccacttcccccagctccggcggcgcacgccgcggtacgacgggtgcttgaagccgctcctcggcgccgaggcggcggtgcaggtgctgctgctgtcgacgccgccgccgccgccgcccgcctgcgccttgccgctcgccgccgcgttgtcgtcggtgctgcagctgctggtatcctcccctgcgccgtgggcggcattggcaggttcctccgcggccgctctcttgcgcttcttggcggcgtgtttgggcttggagctcttgggccggtcttgcgcgccattgtcgacgagggaggaggtggaggaggaagtggacagcgacgaggaggagaaggagacggagacggaggaggaggtggtgggtgtatggctcgcgtctgcttccatggctcccgttaggagaaggccgtggcccgtggcgaggagagagatcgatggaagtgcggtctgcggcgagtgagcgagtgagtgcctctggctataaatagtcgcgcggccttgctttcttgaggtggggcagggtatgttaaaaagccttttgtttccctttctacgcaaggtttttcattgattaatgtagatgattaattaatttcatagtttcattatagaactcaggaccattggatgataaaaaccaggaccatcggatgataaaaccatcattttccaaccatttgtacgtatagcacttcttggaaacataggattaaaaaaataataataaagaatatatgatttcagcgtaaaaaaatataggattttaacaataatacttgtgtaaaatagataattgaaaaacattaagaaaaaacatgtttgtttagttagatggtgggaaaataccgaaatttaagaagaaataaagactcaaataaaacttttcatgagattggatatcatgttaaatttcttatataatatgcacggaatgaggaatttgtaggattcaatattatccaatattttatttcaaatggctatttaaggaagaacattttttagaataaaattctataaattccttactatgttttttcttcaaatcgaaacggcctaaaatgctatttcctccgtttcatattataagtcgctaggattttttttctagtcaaaactttttaagtttaaacaagtttagagaaaaatttagcaatatctaaaacaccgaatcagtctcattgaatctaatattgaatatattttgataatatgtttcttttatgttgaaaattctactatatttttctataaattaatttaatcaaacccaatcaaaatttaactaaaaagtcaaaaggacataaatttaactagataaaagtcaaaaaattgttttgcctcttctgatctaaagctttagaacatagggaaccccaaacctaaactaagatttgttcaagaggtgggttcttttgcattttaaacaggtggagctagtgaaatcgatccctgaaacaacaacaaaaatatcatcccaataagtcaaattttgaccaaagatagtttgactctcatagtttgattcaaaaataatgtatggtcaaggtttgttacgagaataatcattatattacaattatatatgagttttcttaaatttgtatagaagagttgacattttattcacttgagcaaccggccggcatgaggcagttgaaactaaagcaacaaaagtttgtttgtttttaatctggacatttcagaaaagtttagaatgcaagaaaaaaaatacaaaatatattatgataaagcaaatacagcgactctcactgcttttactgtttcatcacatgagtcaaaatcaaacattcagattttttttaacgaaccaatataaggtgtaccaatttcattaactatagcaggggaaaaaattaactaaacaaggtaaaaggagaactatgttacgactacggaacagtcttcgaaaaacgttttgctcttgctaaggcttaagtcttgaactcttccttttttttttcaatcaacgaagacgccgatggctcaaatattttgattttggtactatattgaactactaatttgcttgagaaggttctgggctttggcatttacttttagcgttgaaacttaaaagggattaagcagagtatatatataactacaacctactaacagtactctagacctggtcccccaaaaaaaacccgtttctctgccgaactagtttaaagctaaatatacagtgaccgtacatactgaccacgttgatcgcaattctagctaattctggtcacgtttaacacttttaactattactacttgatgcaagtcaatcgatctgtacgtagcacagggcatatagattaactcatcccaaataaactatctcagagccggttacttaacaagatcttcagtagcattatttaggcctaatggtggagccgcggagagcaagtggtgtttgcttgggtacaaaatggttcggcgcaacgataagatatggcgcgtcgtgtcgctggagttcgacacgagcaaatcccaacgaacgtttggtcgtctcgatcgggtccgattcgatccagagccaaactttggcttcgttttctcatcagttttcctttttttttcccctccttttttgccgtttctgcgcttgacttccccgtgagtttttgctactactctcctcggtcggccgaaagaaagggatgcatgttaggccgtggcacaccaccctcgcgagatttcagctgtgattgatggggagcgtgtcgatcatggcgcgtatgcttgcacgtagcatccggattgaattgcgatccgttgtctgcatgcctcgctctctttctctcttccgaggatttgtcatttatcaacgtactgctccaagccagaaagttggattgtaagggtcaataactccgtggaacccctagtgtgcggatcgcaagagataccccaggaagtatgagaaacttattagtttacggactagctagctagaggccggccgtcttccgagtagaacggaggggaattgaatgccgttgtgaactgagaggatcagtggattgaagaacctgggcaccggagagggagcagattaatattccttccacgcatatctagccgtacgtgctggcatccaagtactagtacccaggtaacccaacacgatgatgcccctctgtactcgctcgtgcgcacgaacgacagcacgattaatatggggttcagaaagcttcagaaaacgagtatactttactctcagtaaaaacgcaatcacgattcgatcaggacgtacaccggagctgatcgagacaggcagaggtaaaactaagggagaaggcctggctgtcagctgattaatactagtagtaattcagaggatcaaggcacggaaatactaagctccccgagacgtgtagtgtggttaacgcgacgcgattaaatgcttgctgcagggcttgctctttcgggcaagctacagctacagctacagcacagccgcgcccttcgccgatcgtgcaacacgttctctctctctctctctcgcgcgcgcgcgcgcgggagatgcgagatttgaccctttgaccctgtgggggcacaagacagaagagaaaagaaaaggaaagaaaaaacaaacgatcgcgcggttcccgcgggtcgcgagccgcgcgaggagccacgtgatctgagctaccgctgcctgcggcgcccgcgccgaaaaatccaccgagtctctcatcaagcaaaatcgcggtggtttggcacgcaaaacctctcacgtcgtcgtcctcgacaccaaacgcgatcccatcttaccagtagtcccagtacacgagtactaagggggtgtttagatggggctaaaactttttagcccatgtcacattggatgtttggacgctaatttggagtattaaacatagactagtaaaaaaattaatttttataaatgagagctaatccgcgagacgaattttttaagcctaattaatccataattatcaaaagtttactgtagcatcacattgtcaaaatcatgacgtaattagactcaaaagattcgtctcgcgaattagtccaaggttatggaatgggttttgtaattagtgtatgtttaatactctaaattagtgtctaaacatccgatgtgacagggacttgaagtaagtccctagaaaccaaacaggccctaatcctgtactatgagctaaccttagccagtgaactaacgagacctccattgatcatcctagtagtactagacggtagccctggtacaaaagtcccggcaccaagggcattacttctaagttacagagcgtgtctacctgtccaacgcatttatatatactctctctacgacgaacccgggcggtgtacgtgcacgtacatatacgttgcatactgctgcccactaaggccagtagacggtcgactctctccaagcgtcgtcttatatatacaggcagcagtacacccctagctagctactgcttgcaagtaacaattcaccgtcaagcgtcaaagttgtatccaacctcttccgtatagcagcgaccggaggagtcctcctcgcagagagtcgcagtcttcaattcgtacgtgctttagcattgtaagatttgggtagtattagtagtaccagttcttaatgcacggcgacgaaactacactcgcattggttatcctagcgccgagacacagtacagcttaaatgcgatagcccaagaacagatgaatggtagtagtaccaagagcttgagttattgctcctcgttaaggcaagcttaacaattgcagcgtttagtctgaactttttctttcttttttgcagtactgcagatatatgcagtgtgctgctacagtgtagagtagcaggtacgagctgccctagatgccaacggcaggtaattaatgctaagtaccaagctggcaagctgccctaacggaaaattactgtattggttaattctccatcacgtcaatgagtacagtaaccgcatgctaccggccatgcatagatatgctcctgcagagtcctaatctactcctcccgatgatatctccccgcatattaatcatctccaatgtccagctgagcgtgcaacgcaacaggctgtagttaacgaccgtaatttaagacgccgggcggtgtcaatgccgtacaaccagcagtaattttgtcataaccaatgaagcatttaaccagtgatgatgcagtgtgcgtagtttgacataaccaattaatgatgaggcgtttcaaccttgaccactcagcttactatattgtaccatcgccaactcctagttacgttgatcaatgaaataagcaatgaaccaatgagtaactgcaagcccccaagttaccatgtccacacgcaaagaatggtgtttacattgtgatccatgctaccatgtgtctagtagaagcctcaactctaaacactcaagttggactggacacctgaactctcggtggaacttggaagtagtagtacatgtacggggcaatggcagattacggcttttacttggcggctttcctttgtattcatatgatgcggtcaacagcaagttggccgcaacggtttggcgaaaaccggacacaatccatccgtatcaaagagttcggcacacaggcacagaccatggcgagctaaatcctgaaccgcgccgccaccatgagccggaaattatggcagattggctgtgaaacttggagaattttcagtttcaggcatatctacctgaaaaaaaagggggctaatggcggcgacaggaagatgcgttagcattagcagctaccacaaagagcagggattgtgaattactagagcctctgctcttggtaacggagaagataattaagacaggtgggtcacagctggaatttcagctagtaagagaaagtttaaagaaaagacaattatcgtcactaatttggagtagccggggataatacatcacaactgcactaactctagcacactaatcttaatatttttattttatttgtttgtccaatacattctttattttttttccttttttagagtttgtgtggaggggtcccttgcacatggatgactccatctatgtttttcttcgagtaaagtgcataggcagtctttaaacttgtaaggttatgtcatataggtccccaaactcttaaaatgcacatctaggtcccaaaacttgtcaaagtgtatcatttaggtcccaaatcgacataacccctatagaatcctatatggcgctgatttggcatgccatatggtcgtgatatgcccttttcttctttttcccttcttttttcttcgttttcttctcattcttctttttttttcctttcttctactcgggaaaagaaaaaaaaaaggagaagaaagaacaaaaagaggaggaggaaaatataagaaaagaagaaaaagataaatgggtttcatttgttagtcaaaatgatgccacgtcttgtccgtgtggcatgccacattagtgccacgtaggatcctataggggctggggcgatgtgggacctaaatgacacactatgacaagttcttgtacttggatatgtattttgagagtttaggacctagatgacacacccctacaagtttaaggaccgcccgtgcactttactctttttcttctctcttttatctcacatactagcttatgtgatgtcctgagacaatgctctaattcaggctgtgtttagttcacaccaaaattgaaagtttggttgaaattggaacgatgtgacgaaaaagttggaagtttatgtgtaggaaagttttgatctgatgaaaaagttgaagtttgaagaaaaagtttggatccaaacaaggacttgatgtgatgaaaaagttcttaacccaatgacgcgttgatctagtttccatcggagccacaagggactgtctaaacagatttgtttctgtctataagctcccagtgcatcataggaactagaaaaaagagattctttatctttcgtatacttaggattattattattgtaatttactttttggtttggatagtttccgcaactattatatctatttgcacaaatacctcgacggtttccaatcgttaatacataaagtccgataagcatgtcttgggttggtacgcaaataggatccccaatagcgggagataggagattcatatgagaaaacataagtaaacgagcttccgcctgagcttccaaggataaaggtagatgaacagccatttgatccccatcaaagaaaatttgaagaacaaaacacggcctcaagattcaggataatggagtattttcgtcaatgtttttctggccctttgcatgattcacattacttattacattggcagacaatgatcacagttgccgaaatacggtttactttatgatccgctgacctgcagacttagaactctgtactgttagcttttagtagtaagaaattactgtgaatcctgcaacgtggttttactttagagagaccaactagtttctggaattctggccagtccttgcctctttggacttctcagctctaaatcacaaattagcttttaggagtatcgcataaaggcttgtcgcttcctagctacttttgctgactgcttcatactgtactcagcatcccaaacagagacgcatcgaagacccttcagcataccattttcagtcaatacaacatgtaaatatgttcattaccaataaaaacagaaacgaatgctcatccaccactttctcctaggtaggagtatatcttatgaaggccaagaaagccttatgttgttagcacaagcttatatatcaaacgacacaacttagacattcactatttaatttaactagtacaaaatacactaaaatgaacagtctcaccaaaaactacttagtttacatggagtatcatcacttgcgccagaaagtgacacttcttactgttgagcacactgtactcttggagcatcctcctcctcatcttcgtcgtacgcttcctgcttcctttgatactgcttgcgcctcatctcctcttctatgttcacatcatgcatggtagtttcctcacattgatccaggtccatatctgataattggtgcccaggtttaggtggtaggatcatctcaagtgcccggcattggtcacgggagagtacaccagattcagggaactcaacattgaattccacaaagagacggcccttcatgaaaggccggccatggtgtggcattccctcatcatttatggccttgtgttgacctgtttggaaaatatttgagttaattctttaaaaaagtctgcaactgattagaatctgaatagaaaaaacagaattacgaagtggcaaacaaaaaggctagcattttaaggggatgagataccaggtttaataatttcgccaggatttgccttgattaggagctgcctactgtccagatgagtgaggatgaattggaacccacacaatgcctcagttaaagagattgtgcgctcaatgaacaggtcatcatatttcctcttaaatcttggatgtaccttaacttgcaagataaatactatatctcctgtcactgtatcaggctgcaacagcatgaaacacacagtgcaaaatattagataaagaaagtagtgcatgcacagatattcattagcacaaggatggatgaatatgtggctgcaagtatgtatactagtataaatggacaaaataaacttacagcttcatcagcttcaccttggaatacaattttttggccatgttgcattcccttctcaatatgaacctcaagcacctttttctcctgaataactttgctagctctgcagtttgtgcatttatccctgtcacttatgatctcacctgatcaagtatagaacattacaaacataaagcaggctcctaagaaatcacaattttgcagcaagatatagcataaaaattggagcaactgttgcatacctgatcctctgcattcaggacagacagtctgcatatgttgaatcatgcctagtcctatctgtcgcattatattcctcattcctacaccatgacaaccatagcatgttgctggagcctcagatttggtcccttttctgaaagcagagagtaagatggaaaaggtgaaacactacagtcaacactcaaaacagataaaaaaaacatgataaactaattatttttttgaatgaagggcaaaacctttgcctcttctatatttatagaaggaattttacagggcccctcagaatggtgaataaacctggattgaaatgggccacaaaaaaaacatgaattttgcctcgtatatattttgaatgataaactaaactaattatggtgatagagctagctacgcctcagaatggtgaataaacctgggttgaaatcggccatatagatgtatttgatctgtgtaatgtgttttaactgggctggacttatttttaaagctttactgggatgaagcatttcaataggcactgtctatttgattgggtgcactgtctatttctttataaaatgggaggttagctttcattgcacattagatgtcgtatttacagaggcagtcaaaattagactaggtattcggtagtcggtattgcaagcttggcattatataggccaattcacagccatcttaatcaggatttacatactacatatgttattctataattatactatctgaatgcccctgcattgcaacatgaagagaactcctccatacactttacagcctcaaaaattaataaaattattctcattgtaaaatcttctagtcatattatttgtcatcatttttacctcacttcaaaagaaaaattttctgtttgatggcttgaggttggggaaggggcaaaagtccacctacctcactatttgggggacccacatgcagtggtggtgggtggtggcaaattcaatactcaccaccaccattggggtcttttagaggagtatagatatgtaggactataataaacattggctttagcatggagtccaacatattccccaaatgtgcaagatacccttattaaactagttttggacttttggggatggttcaggttctataaaattacgtttgcacctttttttaattcaataaaagattcaagaatagaagcagtgtggataaatgtaaggatatcttctaacattgttggctgacacaagcatgtatccgttagcattaggtctctcattaatgattttttttatggataggttgaaacagaacataaatggaatgggataatgttaagggattatccagtaaccgaaacatttaactgggtttccctgcatctcaagtacatgcaaaaataatagaaataagtgcgcacgaaaatacaaaacaaatacaatcaccagttgatggatttaaactagcaatatagagaaattacagtgaacacttcgggataactatttacaccttattttcaactagatggaatcatatgtatcgataatgctaaagtgaaagagcatgataagtaataattttgccaaataatgagtacatcatttcctccagttagcaaattgaagtgcagcaataacatacaaaggcttaccctttgcactttgggcacagaatatttcgtgataatgatagtttcttcatagatccattatacacatcttctaaagacaccttcaaagtatgcgccacatcttcaccacgtctctgtctgcgtactcttgagctactccctgttaaccataaaagttagcatgaataattctgtttttttttaaaaaaaaagttcaaacaaaaaaatgttgagggtgctggaaaatttcagggtacatatgttgcttacccccaaaggcaccacccccgaaaaactgctcaaatatgtcaaatggattatggaagtcactgcctcctcccattccatccttaagagcatcctccccatattggtcatatatgtctctcttctcaggatcagtgagaacctcatacgcttgtgataattctttaaactgtaaaacacataaaaatgtaaaaacaaaatagagattctgaattcaaacaattgcatgtcacactggcacatcctcaccttttctggatcccctcccttgtcaggatggttttttatggcagccttccggtatgccttctttagctcatccttgcttgcagttttaggaactccaagaacctcatagtacttggtgttgttactcctcggtacacgcccaaacatgtttacagatcacaagataatctccctgtaaatctgtagaactaagggtcagtctgcagtggttgagtcggtgacatattgtgcattggagtctactcaaaataggggaattttactaatcctagtatgactttgtttccctgttacaactataattaaaatgcttatagtaacaatttttaatcaaacatcgaaataaactatggcttttgaacagccaccgaaatgccaaacagagagtaaaaaggccaaggatcactgtaattttaatatatatactccgtactcaacgatcagtaatatgctagtaatataaaatgtaatcagttctgttaaacaaactaaaatgggagctaattttacgcatttacaacaaatataaaaccaacaaaaaatcgtagaaggacgactccaccacatgcgcaagtgcctgaccacattgaacttttaacatatttggcacccaactcaaaaacatccggaaaatcgaaggaaaatctagtctcatccccaccgaactctgtgtttcgagcggagcagacaactaaggtaaaaaaaaaaatcccctaaggagagctgatcacgaatatttctccagccaccgcgaacccccacgaggtgtcctacacaaccctggaaaacttcgcctcccctccaaatcaggacaaggctccacctctcctccgaagaatccaaccaacaagatcggtagaacagccaagaaaacggcgcagaacaagcaaaaaatacactcggtttcccccctccagaaaaatcacggggggctcatacgcgatccaaccggtccttaggagagtctcggccatgaaagattggggcgtagtgaagcgatcgtacctgaatcggcggcagagagaacctctcggtggaggcgaggcggacggaggcgagcggtgtcaccaccgctcaagccacgcgaccgagagagggcttgctaagcttgtggtcgtgggcctttatccttgccggcttgccggttggtgtgctccccctgtgaggatgaggtaatctgggccgttggtggaagtgattgtgtggcttagattggttttctggtctttaggataaaccggtgcagatgaaaggcaaggatgtctgctgcctgcctgccttggtttcatgatcttccatttggtttgttaattaaaacatggtagtagaaaaaactggtaacgtctacatttgtcaatagtttttgcattctttatatcttttaggccaaaactgctcttcgccaatacaatttatagcaattttttaacaaaatatttttataaaaaataaaataagttcgacaatattccacgtgtaacttgttacatgtgaaatagcagtgatgatcgctaagtagttcactgaattagtgtcctataatctatagtagtacgtactgcataacaattagcaagcggtcacgcgccatcgttgttaacttggtagtacgacttatatatacaccttacattctgcatccacacttagaaacattgtcacattaatccgacacgttagaaggttcagtataagtaggctatgctgtaagctgtcacaggcacaaagatatccaaattggcaaccagaaaagaatcacgcaaactgcgtcactctccatcgagcaaaccaacccgcaaagttcacaacacgtcgtcgcgcgacggcgatggcgatggcgatggcggcggcggcggcggcggcggcggtgggggctgatcaacagcgtcgtcgaacatgttcggcgggaggtcgtcaaaggccccgtgcttgacggcgtcatgcgcgcactccatgccaaagaacggcatgatcatcggaaccgactgcaccatcggaagcagctcctggtaggcgaggccatccatggcgccggcgtccacgaacccgtggccgacgtcgacgtatctctccggccatccagggaagttgatcagagggtacggaggctggtcgaacagcagcggtggtggcgccgactgagctgcattggacgagctcgcctcgccgtcggcgggtggtagtagctgcagcggcagtggcccctcgaaagcgaagaacccggagcatgcctgatcatatcccatgaacggtgcagcctcgcggcattgccagccgagggagttgccctccaatgaagcttgatccagggaggccgagctctggtggaactgcaagaaattaagtacagtgtcatcagtgcaagtttccatcaagaaactcaaattcacagtggagcgagcgcagtaaattcgtaacgttgatgatgattcatcagcggttcagtgaaaggcatgcattaccgtggctgtttgggagtcgagagaagatgacgagggcgctttgcccttgccgctgttgtgcttgttgggccgtgcagcagggagaggcccgcggaggagcctggcgagccgcttctgccgagtgctccagaaattcttcacgtcgttgtccgtcctgccctgcaagtaggtcgcgatcctcgcccacttgttcccgaactgcgcctgcaactcgatcaccaccctctcttcctcggcagtaaacttgcaaccgctttttaaaggagggaaaaagaactcgaaaaggtgggttatacatgaacatttccatcgactagtttgatcaaagataagcagataggaacattacagagacacaattcagtgcaagtgcgatcaaagattgcacagaccgcagatatagagtttactaacacattatcatggagtagtgggtttacaagcaaaaattcatctggccagttcaatttaagcatgtaaggacgaaacatttacttcctatacttaatttgtttcgaaacccacacaaatatccagagtagtgaagcagtaacaaagaaaattaaacacgagtcgcatggctggacgctaggttagaggaagcaaacacttctaaagttttaacagaactaatgttactctctatccgtaaaaccagtggtgccattgccggtgagaagtgagaacaaccaggaacactgcaattgccgtgccgctctaacttgcaaatgcacgaagaacttgaccagaaaaaaaaatcaaggaggcgagagaactgatcgaaccggggaagggagaagatcgaaaaaagagagggggggattcgcgcttacctcttgaggtttggcctgagcttgttcacccagcggaggcggcaggacttgccggtgcgcggcaagaggcctttggatcgaatggagctccagtccatggggccgtgggtgcggacgtgctccagcagaacctcgtcctcctccgccatccacgggcccttccgcagcgcctcgcctccgcctccggcgccgccgccgcccgcgcccctcctcccgctccttcggcgaacgccaccaggtgctctcgccattgccctcacaaccgccgccccacgcgcgctcgcgaacgcaaaagcccagccacaggggagggagggagggagggagtggtgggagggagtggtgttcttatgcgagagcggggacgacgacgacaatgcttcgtgcttcaactctcagtgtggggttcctgcaaccggcgtagtggcgcgactgagagccgtcgtggagggatcggacggtcgggtttgattcgcggcggcacgactaaccgcctcgccaccaccagcccccacgaacgccgggtccggttccaccgagaattctagcgcgtacgctccgggagtccaggcagcgcgcgtttctgggctataccctcgcgcgcggctcgaacgtgctttcttttttttttctttttttttaggtgaaactgccgcacgcgcgcggggaaaaaattgtgattaagtaatttgtttccaaagaacatgacctactaagataaccttcctttttttttcacaaaacacaatttcctgtttttctaaaagtttgaagatatattttataaattggatcttttgcctccaatttcaattgaaagttttttaaattgaagctgaatgttttcaaattttgagacaaaagtattcaaatttgaataatttgaattttgaggtgacagtttttaatttgagttgaaagttttcaaacccgagttaagttttcaaatctcggcttgaaattttttaattttgagttgaaagtttcaaatcttcaattgaatttttttaatccgagctgaaagtttttaaatctaagttgaaaagtttttaaatctgagttaaaatttttcaatctttacttgaaaattttcaaatctaagttaaaagttttcaaatataaatttatactttcaaatctgtacttgaaagttttcgaatctaagtttaaaaaaattcaaaccttagtttaaaacagaaaaaaagaaaaaaaaacgtgcatagagaacttttttgccggaaaaaaggaaatatgcacgggagttttttttgtcatgtggaacgagaaacgcgtaacagaagattgaacccatagctgccttgcacctcgtgcgcgagacttggtgaaatggcttatacgcgccaattagtcatccccaagatccacggccctgtccgctggacgcggttttttttttgcacctagctaggccgcgtgccatctatcgttttcacgctttgtgttgtatttctatcgttttcgcacctccgtaagtatggttgttatagacgctggacataatcccttctcggctgctcgatacccctcctccaccgtcccgaccacacaatctgcaccttgtccacacaagcattcaccgctgcgcgcccggcggtgatggcgtcaacgtcgcacgcggagtggaccgcggcaggtcatccccgtgcagtcggccaagagtgtacggtagcacccgcggatggaatggggatgtccaatgatatagccgcgccgccccgtccgacaggctctttgtcctacacagatctcattcttagttgatgctcgggggtgggacctcctgacgaggccggcatgtgagtaccctcgacgccccacaacccctcgctgcggatcttgacctcactcttatttaaaatggcaagtattatcagcccaaagggagtacttgtgcacgcatcacaaagcaatcctaagtctagtagcttgggtgatgcggcactgaggtgtagaaaagactttcccctatggactcaaatagagggcccacatataagtggcgttccactatccgcttggaaaaagggcccacatatcagtgacttccctctgtccgctcgccaattcggatccgtgccttcgtgcggtgggtctaccccacgaatgttcaccaggagggaatctcacgaaccgatatagcattccatcattcttcagacctaattatacgtctataattatgcctttagtaattgttagcactgattttcagttaaagaaaatccacgtatactttatgctttttatgttacgaggtttgtttggatattggattctattcatttccaaaaatatgcgtagttgataaacaattttttatttatatagaaatttataaactaaacgtttagttgcatatatataaattctaatctataaagtttatatgtagaaaattttttatattaaatattttcgtggaaactttttagatatagactttatgtatataaattatttacatttagactttttatatagaaagtttatatatataaagtctatatgtagaaagtttatatacacaaaatctatgtgtagaaagtttccacataaataatttatataaaaagtttcctttaataaaactatagaaaagactaacgaagaaaaggaaattaataaaaattggaaaagaaagaaaaaagcttcatgcgtaccatgagaatcacgttaaaaaagggaaaaaaagttagtgaagaacggacacgtttgttacgtatccatatctaataaaaaaatacataaggtttcctcatattttttcgtccatcatcctgatcccgttactaaaatatattttaatccgcttaatagtccgatcagacattttccaatctagtaaaaaatcgcagctgatatagaatatgtgttctttcatgtaacctccaagcaaaagtaacagcttgcccacatggttaggaaaggaaatctgccaccagggttcaattcccaccgtcccctcctttacgcctattattatttgcacgctgtatggttaaaaaatcaaaaaagttttgccacgctgtatggttaaaaaataaactattattatttgcacgctctatgagcctctcctaggccagattaccatatcaaaaatttttgtacttattattactcagaataagtctactttacgtcccacatctcaaatcctattttcgcgtaattttttttctctccgccactagcacggaccatgcacatccgatggttaaaaaatcaaaaaagttttgcctctcctaagccagattacccactcggaataagtctactttgcgtcccacatctcaaatcctatttccgcgcaatctttttctctccgccactagcacagaccatgcacatcccatggttaaaaaatcaaaaaagttttgcctctcctaggccagattaccctatcaaaaaacttttgtacttattattactcggaataagtctactttgtgtcccatgtctcaaatcctatttgcgcgtatttttttctctccgccactcgcacggaccatatatatccgatggttaaaaaaacaaaaaagttttgcacctctttcttcaacatatatttattttttctctccgccactagcacagaccatacacatccgatggttaaaaatcaaaaaagttttacacctctttcttcaacagatattaagtgccactagcacggaccatgcacatccgatggttaaaaaatcaaaagttttacacctctttcttcaactgatttttagtgattctgaaatcttgtaatgaaccagtttttaattcgaaaattaaacataattaatgaaccagtttttaattcaaaaattaaacataattattattttcttttcgtcatctgcaaaagacgatatattagagttcgcaccatctatcgttcacgcatgagccgtgaaacgatctgtctccacgcgagtccgtgttcgattttagaaattatatcagacgcttgccatgcaaaagttgagagcgtgtgttatgacaatataaatatatcaatatgcaatagttgtttcttatcagtcctgattatcattaacaatgcattaaacaatttatctatgttggaatattataacatatatgttaactgtgtatttatagcatttaactttcattatacccgtagcgaagcacgaagcacgggcattttgctagtacaagaagaatcacgtaaaaataaaaaacagataattagaaaggaaataacggataccgaatcgcgtaaaagaaaagaaaaagggataataagaaagaaaataacggatatctccggttctccgtcgcgcgcgccctctaatccgagccattcgcgggatcactagtggagtagtgggcgaatttcctgtcgtgcacaagggaggggaggcgctctctccttgaaaccgtcgtttcgctcgctgccgctgccaccgtcagatcagtaatgctccaaaagtccaaagacaaggagtattcaaatttttgacaggcaagttcacaagagcaaacaaagctttcgctgtgagcatttgcaacgaagtatcgaggcgattattgcttttttcttttccaattccagttcaaacagacgaacatttcacatttgggccttagacgatgtgaagcaaaaaactgaggatttctagagcacatacaatgcctgggatctatcgatacaattgaacacgcactagcgttgtgctggtcatgggtctcctcctccctccactcggcgtcgtggaggagctcccatccacctccggatgctcgcgcccacgcccttcatctcgtccacctgcgtttacgcggagtcacggaacacattagtgcaaaaccagtagtcacatggtgcgatctgtgagattttttttttttttggaggattcgtcttaccgatccgacgcccgccgcgagaactccggcggtgacggcggtggcgccggcgccgacgaagagggtggcgatggcgaacgccttgaacggcatcgcgaacgccgcgccgcccctgccccgccggaaccacgccacgcccgccgccacctgcgccgcgctcgcccccgcccaccacggccacctctccgcctcctccccgccgccgccttcctccatctccgccgccgctagggtatttggggggggagcgcctcggagccagagcgagtgaaacaacaacctaaacaaccacgaaacctcaccgacatgtgggacccatgtggaagaggaggaccaagccaggccactgacatgtgggtgagctcgaagggactcacgccaccgtagaacaaccaaaccccgccgcgaaatcgcagctttccatgggaaggtcacggaggagctacgcgcggcttcttctcctagggttcctactgctacggttcagctggtgcttggtgagtgttgattcgatttaggttggttccgtgatgtttggattggggatgtgatggatttaatggggggtttggggggagggggggatttgactaggcggtggctgatgacggcggaggcgcggaggaagggggagggatttttccggtggtggtgagcacctggcctttccgggaggcggtcagggcggcctgggaggtggtgtcagccagtggcggcgcaggttgttcggccgtggatgccgtcgtcgccggctgctccgcctgcgaggtgctccgctgtgatggcacaggtcagttgtattcaacctggggtgtgggattgattgtagtagttcactgagtttaattgggaacagtggtgatgcaatgtgctcagtgctgatacactaatctggttggttgggtcaaaaactgcgataacaaacttcaagaagagtttcgtttccacttggaggaatttcacccctggcttccattagataagtgatgtttgacgagagtaataaaaaaaaacaattctgatgaacaactattttcaggcagcaggcagaatatgtgtagttttgattgaaacacgatataacatatttgcatcgcgcttaccgaactacaaaagcaccttttacaatctttttcctgtctttcatcatgaactcgtgaagatgacattatcagcagttcctattatgttgcacataattatttgcactgaaatataatacacagaaaatacattgtatttcttgtttcacttttgaataagaatatcgaattggggtttgcctcctctgtttctaataataatttctagtttgtcttactgtgcagtgctttaaacccaataatatagatcttgcaaaacctattttggttgaatcccttggaccttattcagttcaaaaacttgactactttcagttagcttcatgaagcaactatagtactggttttaaatggtttacatttcatgcagttggcccaggtggaagcccagatgagaatggtgaaactacattagatgctctcatcatggatggggtaacagcttttttacatactcatgccacagcccactgagcattctgcagtttctgttgcagcattcttggtgtataatgtgttgcatttgttttgcttaagaaaattggcagaccacaatggaaatcggagctgtcgctgccatgagatatgtaaaggatggaatcagagcggcaaagttggttatggaccatactgaacatactcttcttgttggagagaaggcaacatcctttgcgatttcaatgggacttgtggggccagctgatctgagctcaccggagtctatcggaaaatggacaatttggagacagaaccattgtcaacctaacttctggaaaaatgttgttcctgctggtagctgtggcccgtacaatgctattgatgtaccatcaggggagtctaaggcctctgccaaacgtgtgctagagcggactcagggggacatttgtcaaggattatttgaacctaataatttactggagccaatgaactcccgtctaaaaatcgttaatcgccacaaccatgatacaatctctatggctgtgattgacaaggtatataggcatatagcccatccaaaataaattgactttcttttcatcggaaactaacaacagtgactttgtcaagatgggtcgcatagcggctggcacatcgaccaatggtgctacattcaaaattccaggaaggtgagcatttttgcgcttttggtgttttcatgttaccatctatcatggagccttttatttttatttaaggttatatttttctcacgtttgagtggtttcatgtcactttaatttgtgtactctggcataatctattttcatcatctaattcaattttccatggttaatgacaagactcacaattccgaccgtgaaatatatttttcttagtatttttatgctgtatttgtatatgtaaagtcactggtgaatgttgttgttaatcttctgcatgtctgcataaaaaactaataaaatgctaatgtatggtcagaaatttcattgccttgttaatgatggggtttatatatgtgattaacaggtctactttttttttcgtgacatcttgactctcaaaatggatttgatagctagacatggtttttaatcattatggaattgctgtttcatctcttggtaggtatcactgagcattgtctgatcatttggttccagggtaggtgatggaccaataccaggatcttctgcatatgctgatgatgaagttggtgcatgtggagcaactggtgatggtgatattatgatgcgcttccttccgtggtaatggaaaaataaattagtatttttgacttttttcttagaaggataaaagtccattttactcctccagtatttcccgggagcacttaactccccaagggtatttctcttttttgtttctccctgtaaaagttgtatttcgcactggaatttagtactgtaggatgatgggagatgcatcacaacttacatctcaatattttttttttagatttttttatcattgcttacctaggttggaatgatccaatgaaatagtttgagggagtaaaatagactttttttccttacaagtttataagcacctctataagtttcttcctagcaagttttttttctttttaaatgtaagagagatacccaaccatcttttgttctctatattattatattgatatttgcatcctaggggatgatgatatcattgacattcaactataacaatattccccatccattctaaagattagcccttgcatcatgtagtctggcgttagtatttttattgataggctgagtttactgatggcctcatgctccatgtaatcttcttatatttgctatagttatcaggtagtagagagcatgcgacgagggatggagcctcgggatgctgccatggatgctatattaagaattgcccgcaagtacccggactttgttggtgctgtatttgcaattaacaagaaaggagtgcatgctggggcatgccacggatggacattccagtattctgtcaggaattctagcatgcaggatgtggaggtcatcactgtatcaccttaacatgggcagatcgtaacagcatatggtgcgtcaccaatatggcatttttcgaactggggataccccatttccattcaccagcaggtcatgtttctcatgatctagaattttcatcattcagtcccctgtcaatgcagcaatgttatttggggattgtactggcttattattggattgcactcctcctggaagttcagacggccttgtaagcagattggatgcactcaattcattcttaataacctcgtctgagtgttgtctaaaagatagtaatagaactacatgtgatcaactttttttgcaattatctgttcagtaatacctagctaggttcactcctctaaaaaagctaggttcactcgagcatcttcaaagttgggaagcccatctatccgttttgcaggcatgtggctttcaagattctcaatagcttgccacctccttttttgcttttgctttggtctgtttctctcgttttttagaactcatgacttttatttagttcaaacagttagaaacaaagtacattagttatgattgcctcttccagagagagagaggttttgcaaagcaaatatgttagggcatctcggtggtaacaaacatgagtgttgttatgacaagtatatttttatttttttagccctcagatcatatcttgttgcactagcttatcagctactatttcatttgccttcatcggaatccacctgacctgtaaatgttaaccatgtaaaagatgaagaaatttggacagcatgtattctcttttcatcatataagttgtcttcgtactcagaatatcaaatattagtgactgaagaagggagagaattgtgaaatcacacgcttacaatattctatggctagttggatagattacgtaatctgtgtatcttattagcaataatcatcatatatttcttgcatttttaaagcctattataaggggataattgcaaagcttccgtattgtcgccgattaagaaagccagttgggtatcttggtgaaggtcgtgctctcatgtcctcgttgggatgttttgcccttgttttccgcttgagaaaaactagcggcctgctggtggaatgacacttatccagttatcagctatatcgaccgctgtccagtactgacctactaaattttctccttttccttttggaaaattgacttaaatctatttagcggtacctgcctgtacaatggcccctgaattctcgaaggggtacttgtgcgctgcagtgctggagattcgaaagcaagccaaaactgtcaattttcttcctaatacaaaaattatgatcacctatttattatggttagaagaagcttaaggaaaaagaagtcgttatctttatctagaaattgctcccaccgtgctgaatacaagagatactagatttacactctctttgtcaaaaaatataagagattctagatttatcctaagtcaactattgtaagtttgaaaacaataacaacatatttcaaagtgaatctaatctaatgaggctcatttaatacttaaaacaatcatatgatctcttatattttgggatatttttggatggaaggagtaccatattcaattgtagaatgtccagatcaagatgttcatgattgatcaacacaattgtataattgtatacaagctgcaattgtatttataggaatatacgtaatgctgttcactaaaatcaacttttgttcttttttatattttaaaaaaaacctactcctgataaggattgtccaaattgtcgacaaggagagctcccatccaagttaacgttggacaggaattgccatggaaaattagtaaatgcaaaaaaaaaatcataaactcaactagtatccaataataacgagaaaaatacgcaagcaactctacaactcgtttttcttcaggaaaaactgggatgtaaataataacgagtaaattaataccgagtatccaataaactcaactagtatccaataataacgagtaaattaataactgggatgtttttctacaggaaaagttgatatatacgcaagcaactctacaactcgttgcaacgcaagcagcaacacttgaactaattacaagaaagggcgccgtgtggaggaggggcagaggacggaggagcttgagatggaaccttaatccgtcggaagaaaaggggattcgtgaagcagataggcaccaccatgctggtactcgagctgggg

SEQ ID NO: 9989 - DNA, 20938 bp, Oryza sativa
cccttatatgaggagacagagggagtagatggcactcccatatttcaaaacctgtctaggaaaatgtagttgggatgtttttagaaaataaaggaagtcatacccttttgtacattgttgtgccctgaaccagggctggaattaggagatccacttttgcaaaaagatcttgacttcaggtctgccacaagctgatcaaataaagggattcaggaagaaacattataaagtctgtcttttttggtaaaacatgcacaaaataatagcttacttgttcccaagaactgttgaccaaggaaagtgtctcattatgagtcctctgcttctcttttagcccagcgaatttattttcaagagcacgatactcaaacttgtgggcttctagttgctctgagagcttttggtttttgtatttgagtacagtaaaatcgagctgccaaacaagacaatataagtaggcagtgtgcgaaatcaaaactaaagatatgtgtttggcaacaaagagaaatcactaattcaagcataaaaagaaaagctgaaccaacattcaagtatcttttatttacaacttgaagaagagcagagccaaaacagaacataaacacaaaaggagccgtactgatgatatcaccaacatgataaataggttcatttcatgctacaggacaaaagaaaaaaaaggttttgtgcatggatattccatattggaccaaatacggtaacacatgagtaaacgcataaaaggtatcatccaacatgccattatacccttgacctatccctcccaaaatttaaccaatcttttcccatatttccctcttgtaaaattaaataacaaagtaggcgaataattgccagttgtcaccggtagtaacagcgattaattgtcagttgtcaccagtagtaacttggtgacaaatttcattaatattaatttaacgacccaatttagacctttatctatatcaaaaaacaatagcatatgctatggaaaaataaaaggcgctatgattgtaaataagcattggcacattatggtatcattgccagcaagaaaattaaatttgtccaaagcagcagcggagctagggcccggccaccacgggcaggtgcccgggctccaccgtattagccagtggattaccacttaatgcccctgcttaatctgcttcttttaatagaggctaaatcagctatgcaagcaacaaaggagtcaagacacagcctcacaccaatgtttgctgccatcagcctaaggccaaagctacacagttctccaacagccattatctacttttgacaaaaaaataatacttattaatcctataatctagcccattcgtttaggtttgcccaagctcaagagaacttctagatccgctactagtccaaagttaaccatttcaatatccataaatgtagccacaaaaaactaagatcatttaaaaaactcaaaatacgaaggtttaccaaggaattgccactttctgctatcatgaacacgggaaaacaagaatgcaatgtaagtcaagtaacaatttcacaagtcagcctcccatctatcaccgagtaataattatagaatacatcaattgctctaaagaaccataaacaatcgtgcaatagttgcagaatccgaaacggataatgcatagctcattcctactagtatttttgttttcactctgacaggaggcaatatacatagggcttcttccactaacgaccacaacacagcaagacttgcaattgcatagagctcagcataagtacaaaagcatcaaacacttgtcaagaataaactcatcgatctatactcaaacagtccacaatagatcttttagcggatgtatggattccatgacataacaaaacagctaaaaatcagtcaccatgccaccatctagctatcatacaacaacatatcaaacagtactaccaccataaacatgaactcaaacaaacagtactaacacggtaccaccataaacattaactcaaaacgatacagagctggctcgagatgcgcaaataccttcttatcttcggaggtgggtgcaaccgccagccgcttggcaggagaaacaggggccccgccgccgggcgcgacggagctactgagccgccgcttccggtcgggctcccccgtgctccccataaccctaaccctaacctctcccaggtcctccgattctccacatgcggcgggtgaaaccaaaccccgaaaccacaagggccaaccctcccggccacctaccggtccaatccaccacccaaacccccgccccggcgactcccgaaccctaacacgcggatcaccaaaccaatcgcacccaaaaaaacaatcgcaaaaaaaacaaagagcggatgaaggacggaattggagcgcgggacgagcggatcgcggcggaggcggaattcggctagggttgtaggggggaagggatcggatcagggaggtgtgggcgagaggtgggagttagcggtggttttggcgtgtgcactgtcaaggggggaggaggtgagaaccgtgaggagaaagaagagaagggggggaggagagctaggcgaacggcgcagagaggagagagaatatgcgtgtggggaggcggagtgagttatctcgggcggaggcggctgttcgccccgctgcacggactccgtgcttctgtggacagtggacaccagcgggcatagggttggacctccgtcagtcggccttttaacagccagcccagaatggtgagaacgacaatgttcaatatagattactgtcacaaattatttattttgttatatatatgataaaatattgtttttaaaattaacaggtactccctccgtcccataatataagggattttgacttttttgcttgtactgtttgaccactcgtcttattcaaaaaatttgtgcaaatatagaaaacgaaaagttgtgcttaaagtactttggataataaagtaagtcataaacaaaataaataaattccaaaaatttttgaataagacgaatggttaaacactgcaagtaaaaagtcaaaatctcttatattataggacggagggagtagcgtataagcaagtactggcacctgaacctaggacatgcattatttgatcttcatgataagtctttcatatgaagttctttttatacggtgtgaatccagtgtattacaattttcaatgtaaagctttgattatcagtgccatacaaggtcatattactaagcaatagtaagttgttggttcatgtggttgcaactcttgttaattaactcagatagcttgtttttaagaaaaggttaatatggttattttgaagtagtcttggtctttttcattttaaattttgttttaccatagttgaattggtcatgaatatagagaggttagccaataatctattgcttaatactattagttaaggtttcagtgtttaccacatgacggacatgagcaatactctggtttctacatgtgataatatcggtcgatcataacattaatgtggtaggttggtaacggaaggttaaagcatgataactgtcgagaggcaagatgaaaactaagatgttcagaaatacaaagatacatatatatgaaccatttggtcgaggaaaagtagtcctagagaagcataccacgtggggaacaggggatgaaacatgatggtatgaaaaaaaaaacatgtcctctatgcacacacatgatgtatgtgattgtcgtattggggataaagttggttcaaatgcacaatgcttgttagtaccatattttctacttatttttactcaattacaagtaaaggcggatggtgtatggatacattgagagtatctttttgttcttctaatattgcatgaagggatgttaacgtttagatatattagatcatatgcatggattcaataaaaaaaatacatagtacatattcaagcaagataatactacactatgttatcatgtagtgcacaaaatgaccgatttctcgcatctaaaacatgacaaacatgtaaaaaaaacaaaggttagccaaactaattgcattagatatttagatgggtcttgagcccttgacccattttccgtgtcattgaagtgcaatctatttatgcgttcgcgaaaaaaaacattttccatgtcacaaggtaattgaataatctaaacaatacgttatctaacagtagctgctaaaaagttcaaataatctagttagattttgaaataccttaaccgcatttgtcagctatattaaggccctctttgtttaggcttataaaccaacttataagtcgaaaagtctaagcctaaacaaacaaacagcttttccgtttggcttttttgaagccataagccactctagcactattaagccaaaagctaggttggagaagtttttttggcttatgtgaggtagatatatgactcaactactaaacttaggacattaaatccaccggcttataaatcatataagccaataagctgacttaaaagtctagaccaataagcctaagcctaaacaaagagggcctaacatgcggaaaaggctctatgcacataatttttcgtataaaattgttacaaacattgacatggcatgatgcaaggaaatctggatttccaattactcctatctagtaaatcaagaggttgagaatttcgattgtaataaaaaaattaattatgtccagcaaatgctcttaaaaaataatgaaagttattgacttgtcctaatcaaactaaatttggatttgctaatatctatattgtttttagcatcgaagccgcttttacccaacaaaaagggactatattgcgaagtcaatctaggagtaaagaatttatatgctaatccatcgaaacaaatgttgggattccactaggattgatttgagggatggcaggattttgtgcagcgctagcaggaaaattgtttactatgacccgatggagcataatatttaacatgtgtattcaacagatgaaattttgaatctgttagataaaaggaaaatgcatccatctttagttaaaatgaatacgttccaatggtttgcaatgccaagaggagtaaaaagaaataaatactatagttattcctttctactcctacgtcttatacggagatagtctagtttattatgaacagatgaccaaaatgagaaagttacataagtcttttaaagtccacttcccaataatttttccttatgtaacttactcattatagcttcggtcatttacttcttattaaaaaaaacatggagctacttggttccttattatgatgaatttaaagcatctacgatggctattgttattgatgattgatgaataatgttactcgagtgagagatgctagatggctgacggaaaccactatgctctaggcaagattaaggatttgttcgtctaaccctcatctaaagggattgagatatgaagttattcccctcaaattctcctataatcattttcttgtgaggattaaccgaacaatttatgcggaaattggtttcgagctcaaacatgttttcattgaagtatttttgttatcttttcggtataactctattatatttttcttcttgtgttgtgtcaaaaacatttctgcttgtgtagtggttcttgtggatagatcatgtatgatctttctccggttttgtgtttcttttgtttcggagagctgatctggatagttcactctttcgtttgaatcaagtagtccagtatgagatgtgtgacaatcgtcagactttgaatccggagacagtgtcagacaaaaaaatcgtgttcactggccagcctcttctacccttcttctgatcctctcccgtatagccatttcgtcgaacaccttcccgagccgactgccgccgccgccgccatgctcctcgcgaagccccacctctcctcctcctctttcctcccatccacgcgggtgtctagccccgctccgggtcccaaccacgcaaagcccatcgccgcctctcccgcccctcgacgctgcctccgtctcgccgtcacatccgccgcggcgccggctgcttcgtcggcggaggcggcggcggcgctgagccgcgtggatgtgctctcagaggcgctccccttcatccagcgcttcaaggggaagaccgtggtggtgaagtacggcggcgcggcgatgaagtcgccggagctccaggcttcagtgatccgcgacctggtcctcctctcgtgcgtcggcctccaccccgtgctcgtccacggcggcggccccgagatcaactcctggctgctccgcgtcggcgtcgagccgcagttccggaacggcctccgcgtcactgacgcgctcaccatggaggtcgtcgagatggtgctcgtcggcaaggtcaacaagcacctcgtctccctcatcaacctcgcgggcggaaccgccgtaggtctctgtggcaaggacgctcgcctcctcaccgcgcgcccctccccgaacgcagcggccctcggcttcgtcggcgaggtctcgcgcgtggacgccaccgtcctccacccaatcatcgcctccggtcacatcccggtcatcgccactgtggccgccgacgagaccgggcaggcctacaacatcaacgctgacacggcggccggcgagatcgccgccgcggtcggcgcggagaagctgttgctgctcacagatgtgtctggaattctgcccgaccgtaatgaccccgggagtctggtgaaagagatcgacattgctggggtgcggcagatggtggccgacgggcaggtagctggtgggatgataccgaaggtggaatgctgcgtgcgtgccctcgcacagggcgtgcacactgcaagcatcatcgatgggcgtgtcccgcactcgttgctgctcgagattctcacagatgagggcactggcactatgatcactggctgaggtgattcatcccgtcgtggtattctccggtgcctctcttctcatactgtaatgtaatttgcatttgatatgcctcatgattgcaataagaattgtattcctcacacctgtagctggttgagataggttctgccatccgtttgttctgtgactttgttcgcaatggtgacatttttgtagtttgtgctataaatcgaatcaattcaggttaaactgtactcaagtaaagttgttcttttactgttgtttgggaataacatgggcatgattcaccagcttcaaacctgagtgctgaaagagtatgggtgtagtagtgttaggttcataaatatggaatgtgtgagctgtgagcttgtgactgagataaccaattcaactttagctaacactgtcttttgacccactgatcgtagaaggtttatattaatcaggaataccaacttcaacaaattatgtaccttatccagttgtttgctattagccaatgagagtattttcctccatgcctctactgccctttatcatcttatcccattgttgagatatctgctacatctatcatggaatttttgtgagtcatacagcacttctgatcttagtcaagaaagctccaatgatgaaagaagcaaatgaaaattctttagttttgttcagcctcatcatgtttgtatttaaaatgcacctagtatgcagtgcactatcttaaaaaaataacagattcaaacattcactttcatttgacactatgccagtacttcctctgtctcacaaaaaacaaattagtataggatgtgacacatcctacctgttcctattcgtagtactagaatgtgtcacatcccatactagttttttttatggggtggagggagtataacttccctgtcccgtcgcttcgtctttagatttgaatgtcagcagctcgttaacggtatgacaatcgattgacatttatattttcacttattgttctatttattgtattttgcattattttttattattcatgacttctatgaaatcaacctgcatatgtatatctattgtagcttacatatattttttaagtattgaatattgacatcaaggtcttagtttcctctttttgtcttgatctgttttaatcatatcataaatgcaaaggtaccagcatggtgtggtcaagagtattatagtttgcaaacaagctgtctatttcttatggccaacatagcacactggctatttatatacaatacaatttgctttggtattgcttggagttcggatcattgttcaatcccagtgtccagtcggttactgatggtacacataaaactttgtccaaaacatgcatcgcaatggacaaaatagattctgagttactgtggcattccgcctatggttatttatgtctgaacttggaataatatatcacattcactgttccaaatactttacatgttcatacgtctaaaaattttcgtatcttgattggaatcatggatgctgcatccatactgcttgaacatctttatgtgaagttccaggttcacactcaacttattttgttccaggtttttgtcattctttttggagttggcctggtgtgatatgatagattgaactgtgaaccacaagtgaatggagaaaatgacttgatttggcaccactataccaaggttctagctgtgactcatgaggtttggagaaactgatggcatggagggctggactggtagagctctgggtccttgcagacatcattcctctgttctttccaccaccatggcatggtcagagcaaattccacttgcatctaatggaacggtgccttcttttccgtatttaagtactgtattagtggaaactttcagtctttcattgtgccattcgtcatttctgatctgttgtgtgagagaaattttgagaaaagggaggaaaagctctaccccttcacttggcgttacagaatctattcctcattatgttgtctatttactttttgtgcgatactgatacggtaagcatatcgtagtgctgtttagtgtctgttgagcacttcagccccttagaactgttgtgcttagcactacaatgcttgcggctatataataataagacataccttcagatttaaggggccatttctgtttagcttgatttttttccccaacatgttgttctgttcattcctttcggtcagtgtttgtggtagccatttgtcgttgcaatcagtgtttgtagtaaccattccattagcgaaacactttgctgtcccttaggtgctacagtgtcgagacttgccagtgttcagcatgtatcacgtttttaggactttcagagttcatttagaaatcatactacaaaacgaaaggacgtcctatctgctgcggatgagttgattccgttgtcgaatttgtctgaatcattggctagggatgggctaatattgtctgaatcattcgacaacagccgatggctcttggggactggattgtgacttgggagaagtttcaaactttccatccttttccaagattattatagctacaggttctcagataaaaaaaaaggattactgttactgcaactagccttgtattgttctaacaggcccgtttatatatcttttaaattacgtagagacactgcctcactattattattgtttgtcactgttcgatataaacagtgtagacgcattaccgattattccaatactgcaaacagtccttggattccattccttaaatgccaacgattcctggtccaaaacactccaaaacgaaaccgaaagaaattcagatttaagcaggtcatctccactgcacatactactcaaagagatgcttaattatcaaaagagagtaaccatttccttcttgttaaatagattaatctgatattttagaacaactttcatattgaaaattttcgcacaaaacacaccgtttagcagtttgaaaaatgtgccatcaaaatccaaaacgaacggggcctataactgcatattctccggggaaaaatattgaactggaattagccattgttcaaacaggcccatttatacatctctttcaaattacgtgggcacactgtctcactttgttttgtcattgttcgatataaacagtgacgtattaacgattattccaacactgcacacgatccttggattccactcctaaaatgccaatgattccatttccaaaaccatccaaaacgaaaccaaaagaaacacacacaaccaaatctgtaccactaggcaggtcatctccactgcacatactactcaaataaatgcttaattatcaaaagagaggaccattttttttcttgttaaacaccaatagtactagtaggtttatatttgtagagtactaggtaactcccttcaactatatacttgatttaaagcacgagaaacgagccaacgaccgaaggaggccaagtccaaagatggcaacacaagcgattgcaccgatgcacgccgccgtcgtgcaccgccaccacgttctaccaccccgccgctgcgtgcgccgccgtggcgtcttcgtccgcgcctcggccgccgccgccgccgccgccgccgagacggacacgctgtccgcggccttctgggactacaacctcctcttccggtcgcagcgcgacgagtgcctcgactccatcccgctccgcgtcaccgagggcgcgatcccgcccgacttcccggccggcacctactacctcgccgggccgggcatcttctccgacgaccacggctccaccgtccaccccctcgacggccacggctacctccgctccttccgcttccggcccggcgaccgcaccatccactactccgcgcggtaagtcgcgccgcgcgcatgcagcagcagcaggtttgtcagtgagagcgacagactgacagtgcacgcgtgagtgacgcatgcaggttcgtggagacggcggcgaagagggaggagagccgggacggcgcgtcgtggcggttcacgcaccgggggcccttctccgtgctgcagggcgggaagaaggtgggcaatgtgaaggtgatgaagaacgtggccaacaccagcgtgctgcggtggggcggccggctgctctgcctctgggagggcggccagccgtacgaggttgacccccggacgctcgagaccgtcggcccgttcgacctgctcggcctcgccgccgccgacgacaacaaggcaacgaacgcgtctgcagcacgacggccgtggctgcaggaggccggcctcgacgccgccgcgcgcctgctgcgccctgttcttagcggtgcgtgacactgtaccggagcagcggcctccacttcgatcgattcggaccgaactgatatgacgctggtgcgcgcgtgcgtgcgtgcggtgcaggggtgttcgacatgccgggcaagaggctgctggcgcactacaagatcgacccgcggcgggggcgtctgctgatggtcgcctgcaacgccgaggacatgctcctcccgcgatcccacttcactttctacggtcagctcgccatcgcctcgaccaaccacgcattttccattcgctcctccaaaaaaaaaaatcacattgaacggcgtttccatggcagagttcgacgcccacttcgacctcgtccagaagcgtgagttcgtcgtgccggaccacctcatgatccacgactgggccttcaccgacacccactacatcctcctcggcaacaggatcaagctcgacatccccggtaaggaagagaaaacaaaagaaaacttgtccatggaatgatggaatcgtgcgcgcactggcgtctgatgctgacgtttggtatgcttggttggtgccgtgttcgggcgtaggatcgctgctggcattgacgggcactcacccgatgatcgcggcgctggccgtggacccgagaaggcagtcgacgccggtgtacctgcttccgcgctccccggagaccgaggcgggcggccgcgactggagcgtgccgatcgaggcgccgtcgcagatgtggtccgtgcacgtcggcaacgcgttcgaggaggcgaaccgccggggcggcctcgacgtccggctgcacatgtcaagctgctcctaccagtggttccatttccacaggatgtttggtaaatttcaacgccacaaaaaaaaaaacagtaatccatatttgctcgttcttgcatttgcacattgctggaacacaacgatcatcgagtgatctgcatcacaggttacaattggcaccacaagaagctggacccgtcgttcatgaacgcggcgaagggaaaggagtggctgcctcgcctcgttcaggtggccatcgagctcgacaggacgggagagtgccggaggtgctcagtcaggaggctgtccgatcagcacgccaggccggcggacttcccggcgataaacccaagctacgccaaccagaggaaccggttcgtctacgccggcgccgcgtccggctcccgcagattcctcccgtacttcccgttcgacagcgtggtgaaggtcgacgtctccgatggatcggcgcggtggtggtctaccgacgggcgcaagttcgtcggcgagccggtcttcgtcccgaccggcggcggagaggatggtggctatgttcttcttgtagaggtaagacggagtgcccgttccatcaacatgaagtacgagtgttttgttttttcttaagatttagtacaaatgtttactactgaattaacatcaagacatgtgatgtctctttgcttcttgacagtatgcagtctccaagcacagatgccatctagtggtgctggatgcaaagaagatagggacagagaatgcacttgtggcaaaactagaggtgccaaagaacctcacttttccaatgggattccatggtttctggggagatgaatgagcatagagcaagcatcagatccagtctaactctggagagaaattgtcttgaaaaggcaagaattttgcctcgtgtattgataaaagagagttttgtgataatctgtacatggtggagaggaattatcaggggaaccaaataactactgtacatccagtctcggaatgaaaattcgtctcaccaattcattaaaatcctgaaatactaatgttttaaggcaataattcatagtattcccatagggtaaacatataagacctccactgagaatcttgatgtcttggcaattttaaaatgaaagttcttgaactgacaactaagaatgataccatccatgatcttaacccattcgacaagaatttaaaaggctagaacatatcctgtacacagctaacagaccaccaaatgtgaagtcgacgaatttttggcatcacttaatgcgagccacagtcaccacaatgaagacgaacactgcgagcatgaaggacattctcactgtatcgtcatacaaatcatagtcctcactctgagcttgaaagagcatgttcacaagcttaagtatgctctcaaggaattccttgatctttgcttgggtggtttccatgacccacttcatcactccaggagaagcagaagaacttccattgggatcagcctccttagctgaacgaaagtaccaaccagattaatatcgcttatccaggcccaaattgatcttttattttattattaaaagatgtacttaaaatgctaaagctaaaagccacataccatcctgaaaggacttcctgaattcttgcaccacctcatttttcatcacggcatcccatacagacttatcagttgacaaggccataaccattttctgcatgttgggagatgaatgttaggcaaagaccgaaagaataataggtcatctctggaaaataatatttggtgctaccaaacaaacaagttcatcattgctatacataaataggaactgaatcaaacccacattcacctggacagaagaatctacttgcaataggtggaatgcatccagcacattccgatgttcccttgtcaaaagagcagttgagttaaggacaagcatagcaggttcaatacattcctctgatgcagtgtctggtgtagagtgttctaagctggctaattggtcaatcttaacatcagatggagtagaatcctcaatcttaatatcagatggtgtagaaccttcagaaaaataattaacaaacattccagatggaggaagtcctgagatgggggacaatgcaagtgcttgggcaggtgcatcagaatccaatccaggatggttttcaaataccctgcatgcaacagaaaacagtgtgtgtttttttatataaaatatgtaaaaccagattgcataaaattaatcaactgaagagctgataaggtctatcaataacagaggggataacaaagcaatgacgagcatgtgtatgcagttggagaagtactacaaaaattgcttcttttagcaggataagttgaaaattggagatccaaccgcattgtacggcattccacatctagacggtgcatacacaacgatttcaggaacatacaaacatagcttgaccgtggctataggcataataacttccacgcaacaaatttgtaattaaaggacgattatcaccgataacaaaacatggaaaacctccccccccccctttttatattattatagaagaaaatcaattagcaagtaattaaacaaggcagttccgatcttttctagataatcaaagatcaaaacttgtaaacctaagagcatcaagtagaatcttactcttggatgctagcaacggcggcgcggacttcctggtcggtgggcggggccccgaacgcctccgcgtgctcatccgccgcctcctggacagcgtcgaacgccccagaatccgccccgacggcgtcatcgccctgggcgacgaccacctcccagtcctcatcgccatcaaggcggagcgcgcgggactcccagcacccgacggaggcgatggagcaggccgggggaggcgaggcggcgcgcagggcacgggccccggctcgcgtggcagggcggctcccgctggagatggagacggcgggagacagggcggcgccaccgcggagcgaggaggagccggcgaggcggacgaggtgcttgccgccggccgggttgctcatggcggcggcgccctggtggagcctcgcggacgtctcgccccctctccaagagctctccctcctcctgtacaccacgtggacaaccatggcaggggcctcgccgtcgccggctcgcagctgatgctcctctgcctcccccgccgcggtttgttcctcttcgccttccggcgaggcggcgtacgaagtgggagaaccggcagatttgtttgggttccggaaccaaatcagtattcggtttattattaagatgggtggggtggtttgttaactgatgatatatttccgcaggggaagtgtttgaaagtacaactagtaagttattatctctatctctttctaaatgtaacttgtagcatatagataaataaaagaattaatttttatagggtgtagctatatttatagcgccatatttttcatcaaaaaatagtcggcatgtatttacattgtaagtccctaaattacatatgtaattttagtgtatttacaatgtaagtctcaaaattacatatgtaagtactaaaattacatatgtaaattcaaaaattacatgctaattgcatatgtaagtggggtgtaaatgaggtgtaactactgtgtaagtggctaaaaaaaatcgactgtagcatatggcgccatatttctagcaactccatttttatatctatctttgtgaatgtttaactattaaatgaaataatggacttttcatatctactttgttaattgtacatacgctagtttttattttttttagcaacatatgtagtgacatactaatttttaatatatcacattgtgtttatttttttagcaatatatgtagtgacatagtaatttttaattgtaaatgtgcttttaatatatcacatttgttgattttttgtgtaatatttgaagttctacatttgacacatgcacttgtatttaggctaattattctttaaatggtgacaacgtactcgtagacaagggggtgcccgcgatgtctatgtcaatatcaagatttactagccaaatatttatgagttgcttttatggtaaggtgtgcgtgtgaatgttcacgagggtgaatatgcgcgcattataagtgtctgtgtttatattatattttttaaaaaatatattatttaaatattagttcttatttattttatcattaaatatacttaacattgacttatattttttatattagcaccaaatttttaatgacaccaatgagcaaatgaaaaatcaacggtatcatatatgagagtatatgaataattttatggcttgcctctccacataatatattatcagtaattttttatcttaatgtattgtagaaaaaagtttatatatttctgcaagaattcaactagagaaacttccgcccatcataattgccaaaatattttaaaatataaaaaacgaatctaaagctttttaaaaatgaagggatgtcctctttatttttccttctctcacaaggcatcgtgcaatacagttcgttgtttagatgtctattcggtcttatttactactagtagcgagtatctacgtcattttcgcttttagattagagaatgaagcttatccacgttgcgtttagcattaggttctgcaacaacgcatttacaatgcgtctatgcgctcgtatatattagtctcgatgctttctcactgacacgtggacacaaagaatatagggacgaatatatcatccccgacgtacctgtctaactgatcgtaagaaattaactcatttttgataaataaaaacaactgcgtgccgcccaaggctttggtgttgcttactctaatacttctactttattcgatttaggagtagaaaattttatcctttggtttgacacggttggcatgactgtaatgtatgccgcatttgctacacagcatattgctgcgacttcaggatgtcgagatcgaacatcatatgttaaaggggatttggtcgtatacatctctgtagtccctaaaaaaaaattgaacatctctgttacagaaaacgggttgggttccacgatcactgcgggcggggtgcgtacgcgattttgtggtataccatcacatcattgcaagaagcagtatggataaatagttttgctctgctccactaggattaacgagcctccactcttgatcatcgtattgattttgcgtgtaaccagcagcgtccgccatgagcagtgcttcgccctagatcgtccaagctgtatgctactacctgttggtgctcccagcgtaacgagagctcggagttgacgaattcagagaccaaaaaaagagacgtggggatcacagtatatcagacggcctcacgtcgctttccagatggccgggtctccgaaccgtaacgcgagaggagacatggtgcgcagcgccagatgagagagacggcgaagcaaaccaacccaaaggatgagatttatgttgagcacgagaccatcaagcaacaagcatacgccgatacgcggattgtgcggcgagatctcctaaccaatatgcgcatcgattcgacgggagctcacttgggttttcgttttgttctccccgcgacgtttagttagtttttcaccgtttagtgtcgtggattacgtggtgagaaataccagcgcgtttaaaaacgtgtgcgtcgatataaaagattacatgcgaagtttatgaaaacacttgtttttctttttcttttttcccttttattatgggcttccatcagcagcgtatcgcaagttgcaatttgcaaccggatacttatccatgacgctcgggctggtgaagaccgcggtttttgcgctgcttgtgcttattgttacagaaaaaaaatccaacattgattagattatcaaatggttcgtgagacacacagtagctacgagaaaacagaagaacggtaagacgtcgtttctccaaacaatttgacgatttgataatatgtttcaattatgcgtagcattctcccttgatcaaattccggtgttgctctgctgccagttttttttttcgccggtctgctgctaaattttgcagttctacagtatgcacttctccggttctgcactagtactatcaggtactagtactatctacaaggccattgttgacttctggaccgtctatatgattagcaggagcccatttgacacaaaagtattcggccgattttgttgggcccttctatattttagatcaaaggaagcccattaacaaaagtactacccaaaccatccattagtccatcacaattcactaggatcaaactgcctactatactagattacattgctttctttccttcaaacatccacaaatccacaacctaataaagacacagatcttacacacatactacatgtaactacacgaaaccaaatgcaacaaagattctaacacgacaaacaaagatttttcgtcagggtgacagactgccagaatgatttcatcacacgaccaccgtttgcacgctcccatggcgcgccgactcgttcgtcgccggcgccggcgccggctccggcacggtcgggaagaccagggcttgatgcaccagcgccgccaccgccgcgccgaccatcgggccggcccagtacacggcctggttgctgtagtgcccgctgacaaccgccggcccgaacgagcgcgccgggttcatcgacgcgcccgtgagcgaccccgccgccagcacgcacgcgcccgtcacggccccgaccaccagcgcgcccagcgccgtcgccgcgggccccttcctgccgccgaagcctccaccccgcgggtcgccggcgacgtgcaccgtgtacaccaccatgaacgtgagcaccccctccaggatccccgccccgaacccggtcatctccaccgcgatcctcgtcgtcggcacggcctgtgtgtgcaaacgcgcgttagtctacgcaaagttaaggacatttcgatcggaagtgatcttgcctggccggcggagatgtagtggaggacgaggcaggcgaacgtggagccgagcatctgagacgcccagtagaagatggcgctcgggacggtgatgtggccgccgatggcgtaggcgaacgtcacggcggggttgacgtggccgccggagacgtcggcggcgatgaacaccgcggcgaagagcccgaacgcctgcgcaacggcggtcgccatcagggacgaggcatcggatgtttcatccggcgtgagcatccctggcaacagcgcgcggcaagttcacagagcgaaatcacgtatgagaccaacaaagcagagcaattcgcacgacatgcggaacgtaggttgcagtgaaacgcatgacttacgggcggagatggtggagccgacggcgatgaacacaaagaggaaggtggagaagaactcggcgaagtacgcccggagcgccggcggcgagaagcagcgcttcatgttggcacagatgttcgccattgcaagtttaccctgtgtgtgtgtgtgacactgtgtttacagagcagtgaagaacacgattacacgaattcgcacagttcttcactactcggggtgtcacagactttatatagaagggccatgggtcgcgaccgtagggtgaaacgttgctatacttcgcagcggttgccgccgcgcccgctcccaaactgaaccgtctccacgcgggcacgcccgttgcgcgcgttcgcacaccgcatgttagagaacgtgtacgtgcaaacttcacaacttacaatgaaccgtgcatatatggtacagatcaatcgagcagttttgctacatattcttttgtaggattgaatcacaataactaagccaaccagggaggtgaatgtttggtatacccaaaaaccaaaaacttttagtggaaataaaagttaccctcgaaatcgacggagatcggtttgaccgagattgatctatcggtctgactgagtggatgccgccggtctgaccgatgtagaacgatcggtcaaaccgccgaagtcgcctgccgctcgctgtcgccgccgccggtctgactgccgtgctcccgtcggtctgaccgccgcaatgccgtcggtctgaccaccggtgagttgccggttagaccgccgaaacccggtgaaacacaaatcgaagaactattaaagtagatgacaactttattgcttctctctgtgtttacaaagtgcaccaacagcactccttacaaaaatttcgactaaactcgaaaccctaactaaactatcaactcaattgctctcaaaagcgataccggaaagcctcacgctccccctctatttatacatgaggtaggcagcctaaagccacgaaccaaactcatactaagagtcctaaacaccttaggaaaccatacagtacaagacacaaactttacataaccaattgtaccaaatttggactccttccaaattcgactccgcatcccatacgtacacaatacctccatcgtatgccatatggaatcttcaccaaccacgtgcatcaactctagccttagtatcccgcatgatatctgaccaccacggacatcgtcttaccaccaagccgactcccggtccatcaccgcaaatattctcccgaggcatcgagtcacctacacatgaaacaaataaagaaaccatattctgagaccaagttatcaccaacttgactcattgttagcaaacaacagtattacatacgtatagtatccatctagaagccataaccatgaaacaatcacggatatccaaagaaacaacccgaaaccgaaaccgacacagcgtcggccggtcagaccgcgggccggccggtctgaccgctcgatcaccgctggtctgaccggcatacacagcccggtcagaccggtcacataaaatagcagtgaatccgatcatcacctgaaaattgattatctccaaaaccacttcgatgataatctccaaatatcaaaaccaataatcacagatgccag

SEQ ID NO: 9990 - DNA, 13209 bp, Oryza sativa
taacttggacttttattttttgctgcacggttttcttttttacaaagtttgagtaggactcttatttatatttgtccaatcaatctcaatggttaaattatagatctatcataattcaatggtatagatttttctctttttttttcgattaatgtggtaatatgtagccttcatagcaaatatggtgcctcctttcaaagatgcttcgggttatcattgagattttaaaatcgagcatgattatcattgttttttttactttttagaagttccgaacctttaaaaataagaccttgtagtttatagagtttattgccttgttgggttttattttttataatttttagaagtcccataaaacgatgcctctatcctcctctacggcacatccgccgcctactctttattatcattgtgattctagaaatcgaacataactatcgttagaattttttttttattttctagaagtcccatcaaccgttggcggctctgcaactatactcctatacaccccgctcattgcttctccttagtcattgagattttaaaaatcaaatatgatattcaacgggttttttttactttctagaagtcctggcaaccgccttgctcgtttgcttcacggcccgccgatcgtccctccttttaatcatcattaggatctatttggtgttttattaacagttttttatatgtcgtatcaaccgccaccactctactcctttataggcatgttacttaatttatctcgtcatgtgttttagatggtattttctttcaatagtttttatttttatcacaaattttagttatttataaattatattcctaattgaaatcttatttttctttctctaatttcagaatttatttttttcaaattttaattaatatcgtattgtgttctttttttttcaatttcagttgtttcaaaattgtattcctacttgaactctcttttaatttttctaattttgaatattattttattttttactttgaattttaattaatcttgtattgggttctgttgacagaaaacacgaggcctgggagatctgcttaactccagtgcaggtccaaagctcgccttcggatgtatgagcgtgctagttgatttgatcttgaaatcaacaagaaatagaacaaagaaaccgcaattaatcctataaatgatagccgatcggctaagtgccgatgacacatcatttatttcaagccggtgtcatgtgtacatcgatcgacaaatatcaataagcaaaccagaactaaatctactcgatcggctgtagatattaatgatatataatccttatatcgatatatacttaaatcaaatgattgagatagatcggtcgccttgccgagacagtataaatcacttagatcgaaatatatattaatagtaggattatatacattcatgtaacatcccggtctagggcttaataggattaatagaatactcatatcaacaagttgcaacttcttttccggaagccaatctccaaagaactccagctccagggttaagcgtgcttggcgtggagcaatttgggatgggtgaccgacccggaaattcttcccgggtgcacacgagtgaggacaaagtgtgcagaaaagacatgtgttggtctgtgagggtagtctatgacctatgaaagctatcagacgtaagcgggcttggcctgggggaaggcgggacgttacaaaatggtatcagagccgactctcgcggtttcacgggcgcgtgtgtcgcagttgcgcaggcatggtgcgcatggctggtgtagaccgggagtggttacacagcatggcacatgcgctggcactagacacatggacgtggccaagagaggacgttcctggcctagggttgatcgacaggggcgtcgatctctcttaagggggtgagggtgtaacatcccggcctagggcttaataggattaatagaatactcatatcaacaagttgcaacttcttttccggaagccaatctccaaagaactccagggttaagcgtgcttggcatggagcaatttgggatgggtgaccgaccgggaaattcttcccgggtgcacacgagtgaggacaaagtgtgcagaaaagacatgtgttggtctgtgagggtagtctatgacctatgaaagccaattcatagcatagccgatcaggtagatctagcatgtatcggctaatactccgatactactctatactaagattttaaagcaagtaaataaaagtagttaaatcagataagatcggctgaaactccgatactaccctaatcagcaaccagaaagcaggctagagattgcaattctaagcacgactactctatactaagattttaaagcaagtaaaatatactaaacataagcttaatatacttatatgcgacaagatcttaacataaagggcagatttaacatgtcaatcaagcatatagaataaaagtagttaaatcagataagatcggctgaaactccgatactaccctaatcagcaaccagatttaacatgtcaatcaagcatatagaataaaagtagttaaatcagataagatcggctgaaactccgatactaccctaatcagcaaccagaaagcaggctagagattgcaattctaagcacgacttaatatatcaaacttaactgatgcagcattaagtatgaaaagaaaaacaatatctagacaatcaagccgctggaagtttcatagagtggtagatatatcacatagtctaagttaacatcattatctaacctaatcgactaccttccattaacagatgttagccgattataggttagatgaagatattatcaaagattatgtgagatatatgataactcgacgaattatatagacaagattagagtgtcataaagatggaagcactaatcttgagaacataagtcctcatgacaagttttacctcttgttgaagatcgaaaccgatgcagctcaacccgagagcacgaactcatcgaaataaaagtaaagcataaagggtggcgatgcgccgagattgtattggatgtctcctttttacatagggctcgggtctattatacccgagaaaagatacgtccataacagacatgactattatctctaacaaactctaagataccataagtctttacggcagacttttgcccaaacatatctctaaggaaattacatagaatatcctaattaatagatataattgccttcccatgactctatccatgcatggcaatcatcttgaagcacatcaacttgaacccgatgacgtacaccgagtcaaattatcggaatcggctgtatcggctaaccccgtccgactcgaactctgccaacctgaccttagccgatttggactgcagtcgattcttactctgtttccgcaacgatcttcatcttggattccactttgatctgatcttcacctccgatgccaatagtgatagaatttaccaaatttggttgttaacaggttcttgtatggattcttctttcaatattgcttatttttaattccgaatttcagctaattttaaattttattcctacttgaactcttcttttattttcttttgctaatttcgggttttatttttatttttatttttaattttaattaatctcgtattgggtttttatatggactcttcttttaatatttcttatttttaattctgaatttcagctattttaaaattgtattaactatccttttcttttctaattttggattttattttatttttattttgaattttaattaatctcgtattgggttctcatatggaaacttctattgcttggactcttctttttttttctaattttagattttatttattttaattcgaattttgattaatctcgtattgggttcttatatggaaacttctttcaatattgcttgttttaatttcgaattttagctatttttagattgtatttctacttggactcttctattcttttcttttctttttcttctattaatgtgggaatttctagtccccacagcgaatatggtgtctcttttcaaagctgttttaataatataatagatagatagataacctccgggccaattcaagcgagattgatgggggcagccgccgatcctgtgcggtgtgaagagtgaacgagctctaatggccaatggacgagcttagcgcggtggagtgcgaaggcgcgagagctcgtgcggcggccggcgggagggtagtattgctggcaacgcaaactcgagccacgttgggcacttgggcgtttgctagctgctaccgctagtgtagccggcgaccacagagagagcgtgcgaaagataatcgattgcggaagccccaccccctctgttctccttggcctataaacggaatatttctcgtgagtcccacatgtcattgtctggacgagcaccctggtgctctgggccctcaacaccgaggacgaggagatgagatcgatcgcgtgtgggccggcgagccgcacctcctttaggaatttgtttctttctcagagtcctccgtttcttcgacccgtcgttctctcgccgcctgcctcgccgcccgcccgacactttccaacgtttaaaacccgtcttttttctccaggttttcgcaaggggacgacgacgccctgtgccactacggtacaaggccgcgccgagccatcggcccatcgctgcgtaaaggtgacagctagcgccgggcgatgcagccgcccaacctcgcgcgcgtaaagtgaccgttgcgtttacccacccggccgaccgatccgcgaacgccaccgtatgtactggactagctagtctctctgttccgctctactccaagaattcctcggttccatctgcatcgacggttctgtgagtctgacacgaagaacgtaacgttcttctctgtaactaacgcacttgttcggttgttccagaacgaccaggctgcagagctagtgcaactgcagacaacgatgccctgccgccgatgcgtttggcgttcagaaatggacgtagtactagcttggagcgtgaatggcaggatgggtgtacacgatacggatttgtcaaagccgagctgccgatccgatggtgcgtaccttctcgtctctgaatttgcactgcgaaaaaggtataaaggagggatgaatcccaacccaaaagccaaggtttattctcactttctcagagtacatactaccagtacacgctacacctccacctccgctgctttaggccccctttgaattagaggaaaaatggaggaaaaacaaagaaattgaaatcatacactatttatgcctttgattcataggaataaaaaaaggaaaaacgtaggaaactttcctattcctacaattctagagcaaaaacgtaggaaaattaacatccactctaacctcttagaaaactttccttgagtctatctctcttatctgattcctatatttttcctgcggtctaatcaaacagtcatttctatatttttcatgtgtttttgtaatcctctgttttacacttgcattcttaccaaaatcctgtgttttttctgttccttcgttttttctatacgatttaaaggggcccttaatttttagcaacaccatgtggtcctcaaactcatcagcagcagacaacaactaaagagccgtgtaaatatatcagacaatgcaattagtagggagaggcgcccataacacacagaagagaacaaggatcagagacgaaaaggtttagccttttaacgctgtgatctactcgccgctacaaagagaatggacggattgatccaaagtgcctcgactttactacttgcggcggggtacaccgtgccgcccggcgtgccgcgcgcctcccaacgcgagagggggtttcgacctacctgcacggcacgcacgcacatatgctctgcatgtgctgtgcaacgcatgggcgcagccgcgagagcaagcgcggcatgatgcgcctgtacgctaattcttggatcattcctccctgcgttagtttaacttaatcctaccggtacactgcagacacccagctaatcaattaggcttcttgcattagtatatatagtgatatatactatatactccgtaccttgtatatgtcgttggagtatcatgcatgctgtgactgtaaaagcctgcagctaaccgataggaaggtagcagagggatcgtactgttctatctcgtgcgtagtggtggcatctctcggtgtccccagtttgtaatctagccaagtttcacggcatattaatttgcagcgaagggagacttatggttggccatgcatgctctgatcacagttacgctcctatccatgtacacgccgtgtctctatccggtgttggcccacggtatatcaggaccatcgctctctcgcgtctagggattcggaaaagctggtgtatatgtccaacacatattttgatgcaatgttgatacgcgatgtgactcgggttttggtacgcagatatactcagatgctacggactgaaaattgtacttggggtatacacaaaagctagctgggcgacgacattttggagagatcggtaagtctattgtgtgtttagagctccgtcgatgacgttgcaattgttctatgacaagaaaaatgttaaaatatcagctaagtgcaggaactcaacctggtatctcagtgaataaacatatggacgaggtatccgtacattgtatgattttgatatatcagtcatcactcatcagtgtccgtaaatatctctctttttctgaaacattaacgcagaattattatacgttagctacggtagctaaactaccaggtgaaagctagcgatcgaaagcatgctagctagctgcatgcatgaccgttggcgtccgaccaaagcagaaattccaaaccggggccgcagcgccagcagctagcttagctcttggagtgttcccgtcgggcggctatagcttagctctctcctccattatttgcatggccgtttcctcccccctcacagccctataaattccgaacccctgcctcacagtctcggtctctctcaccacatattccgcgtgcatgtgaagagagagatatagagaggagagctagcgaaagtttgagtgacaaagacgcacgtacgcgcgaaaacgttgtcacgcttttgagtgatcgatacacgggggggatacacacgcaaaccgatcgatatggttcgtgagcgggtggtggtggtgatggcgttcgcggtggcgacgctcgcgacgagcctcctgccgccgctggcgtgccaggcggcgccggcgccgtgcgagcgcccgacgcgcgggcaccaccagtacaggcagccggtgggcgtgcggcggatcgtggtggacgcgagcggcggcggcgacttcctctccatccagcaggccgtcaactccgtgccggagaacaacaccgtgcgcgtcatcatgcagatcaacgcagggtcctacatgtaagctatacccagttagctcatgctcatgctcatgcatgcgtgtgcagagtttgcgtttctgacgtgatatatgtgtgcgtgcagagagaaggtggtggtgccggcgacgaagccgtacatcacgttccagggagcagggcgcgacgtgacggtggtggagtggcacgacagggcgagcgaccgcggccccgacgggcagcagctccgaacctacaacaccgcctccgtaaccgttctctctaactatttcactgctaagaacatcagcttcaaggtgagctagcaaacaccgttcgcgcgccatgccatgcattagccagtggtccgtctccatggacccggccgccaacgtacgcgactcacaagacgcacagggagatgcggtgcagtacagtgccgactgccgaggcagagaggcagacaaagtgacaaaacccttcagtgtcacgagccacatcttgcaaatttgcaaatgctgcatgccgggcgtctcttcttctctgtgtatcccttgttcttttgatattttgaatccgtttgtacagggatgtattttcgggttcttggagcagccaaagcagatggcttcttccggctacggcggagagaggctacagcctgatcgacgcggccggccaactttttttttccagtgaattgcatgcatgtaagtagcaaacaacagctgacgctgggttcctgaatcctatggcttggcagaacacggctccggcaccaatgcccggcatgcaagggtggcaggcggtggcgttccgcatctccggcgacaaggccttcttcttcggctgcgggttctacggcgcccaggacacgctctgcgacgacgccggccggcactacttccgcgactgctacatcgagggctccatcgacttcgtcttcggcaacggccgctccctctacaaggactgcgagctgcactcgacggcgcagcggttcggctcggtggcggcgcaggggcggcacgacccgtgcgagcgcaccggcttcgccttcgtcaactgccgggtcaccggcactggccgcctctacgtcggccgtgccatgggccagtactcgcggatcgtctacgcctacacctacttcgacagcgtcatcgcccccggcggctgggacgactgggaccacgccagcaacaagagcatgtacgtactgcttcagctagctagctagcctgatcaacttgataaaaaaatgaaactatattattcaattcccagccagctaacgcctgtgcaaatgttgtcgacggcgtgcatgcgtgcaggacggcgttcttcgggatgtacaggaactgggggcccggcgccgacgcggtgcacggcgtgccgtgggcgcgggagctcgactacttcgccgcgcgccccttcctcggcaagagcttcgtcaacggattccactggcttacacctgacgtctgaaagccgtttttcggcaccacaattaatttactggagacaagaacgtacatttgttagtacagcaaaagcgaagaatagaacattacgataaatataaagtattgaagtgactagtgcagtatatagcggtagattcattcgttcattcgttttgtctgatccggcttataatgatagctgctatagaattcaagcacagctctttacaagatctatagtagctatgtagtactgttttaaaagctttgtcatgtagacatgtacccatgcatgtgaggtgaatagtgaatatataattgattttgttgttactttaaggaaaaatccaaatttgatcccttaactatgaccttagtagattttgatccctcgactataagatcggtctccattatcaacttttgaaattgaccatatttcatctatgggcgccaatcacttctaagagttccgatttggatcagggatgaaatatagacagttataagagttgggggatgaatagtgaacattttaatgttcttctaattgaaggacaaagtcaaaccaaggccagataaaatacagacttttctctcttcataaagataaagattttatcttattttccgttagcacgcttttcaaattacaaaacggcgcgttttgtgcgaaaactttctatataaaagttgttttaaaataacaaatatatctatttttcaagtgttataaaacttgttagattttgtatatctcatatttatttattttttttacatattttccgctatctctctcaatactgttgctataaatcggttgtggagataacggaacgtacgagcctatatgtacaccgctctattggtattacaatcgattgcgctgagtcctatcacactcttatgatatcatattaggtttcttattttcgcatctcaaaccctaacctggcaggccgacatctctcgccgccctggtctcctcctcccaactccctatagactctgtcctcgacgacacaatcaagatcatcgccaacgcagtccgctcctccttatgactatgatataaaacgcattccgctcctccttccagacggccctaggtttgcaggttgatgacaccgtcattgctaccatcatcggcgatactgttgattgtgtcacaacaccggtaccctcttcactactcacagctccaccgacaataccccctctcatattattgttggcagtggctgtcttctccctattacttccgttggacgtgcttacttacactatcctacactactatagatccgggcttcagtgacgggtcatctgtgacgggccaacgcaactcgtcaaagataagtaatctctgacgggccaaaaaaatatcctcttcaatatatggctaccagggaggacccgtcacagatgtgaagtcatctgtgacggcttgcacttgtaacccgtcacagatcgtctgtgacgggtcacaaccatggctcgtcatagatgacatgtcatctgtgacgggtgtagtattatgaaccatcacaaaagagaccactcatctctgacgggtctttaactaacacacgtcacagataatgttatctctgacgggtggtagttatgacccgtcagtgatgagtgaaaattcaaatttttaaattttgcaaaaaacctcgaattgaaacatgtcctatataaaagttgtagctctcaatgatatccacaactttataactaacaacatttctattagagatcgtttacatccccgaacatgcattacaagtgatcagatctacttttaaaaacaaaattttgagttttttttcaaatgacatggatggatacatgccccgtatcaaagtcatagaactcaaccagatctacaacattataattgaaaatattttcatttcacaaaatttacatgttataaagtgagatatattttgaaaaatgaaattttgaattcttcaaacaacatcggatgaagatattttctatgtaaaagttataaaacacgataagatctataactacttagttgataatattttcatttgaagtcatttagggtgttaaatatatgttaaatgattcagacaagcatagacaaaataataacattggatgagtaatcaatatgtgttgagtaggtgagttggtaagggagctctatatggaggttgaggtcttgagttcgaatctcacgtgtagcatacaagttatattgcgtgaaaaattgtgaatttgtaggtagtgatgtgtaaccatgtataggatggctagtaaaattcaaaatattttttttaggttttttgatacgtttaaaattcaaaaattgtatttcttgctttgtcatcagtgacgggtcgtaagttacaacccgtcagagatgagtcatcagtgacggttaggtagttacgacacgtcactgatgactcatctgtgacgggtgacaagttttaacccgtcagagatgacttatataccggtcagagatgggttatctgtgacgggtgtttcatccgtcacaggtgattttgtcatcagtgaccactaatcactgaccaagaccaaacccgtcaaaggtgagggtttgggcccgttagagatgacctggtccggcgtagtgctaattgctgctttgttcttaacaatgttctaatctctcttgacattattaagagctttatttctgcacaccatttttcttatgataattggtgttccattgaacttgacccgtttggcctctttgtgaagttctcaaaattatatatatatatatatatatatatatatatatatatatatatatatatatatatatatatatatatatatatatataagcaatacacgtcctatggaattaaaacttttctatagaaaataattaaaatgcccttagcttagaagcgagacgtcaagaacaattatagttcaaaaatatctaatcactacagatatcttaatatcaagctaacactacagaaaattctcacccatcatgccatcatgggaaacaccttagttttgaaaaagaaaacaaaaacctatggttggaccttcaagggggtaaaatggaaaaacaatctattattgatagtgtggcgccaatattttctacaaaaaatatattccctattgtcaagtatagaaaattaatcctatcccttatgagattatttttttatcccccttccttatagttatgtctttgagaataagataaaacccatatgaaaagaaaaattgtattcaccctagatgttcaaaatatactattgttatacaatggcttagagaccaatgatgcatagtagcactcagcactatgtacctcagtacatggcaaatactacctctgtccctaaagccctaaattacacacgctgtgttcgttagtgtagtttgaaaactaataggttgtttggtttggtgccacacattaaaatagagtaatggattagcacataagtataaatttattagtttaaaatttttaaaaataaattaatatatttttaaagcaacttttctatagatattttaaaaaatatattatttagcagtttaaaagcatgtgtgaaaaaggagaaaatagttgagaaggagcaaaaaggccacaccagagagtactctcgttatatatttactcccttcgtcccataaaaaccgaatctaaaaccggatatgatatatcttagtagtatgaatctgaatatatatatatattcagatatttagattcatatgtattatattcggttttagattcgttttttataggatggagggagtacactagtactactactacatccacgagttccccaatgccaaaaatactgcagaaattggatttcaccttagtgaattatcaccgtattgattctcctcatctttgctccaaagagaaaccgcggggctgcagaggatgcaacagctaggatcatgcggcgaagcagagcgcagagcggagggtagagtgcgtcattgcgaacctttggggattaacctcgccgacgatgaagccttcgaccgtgctgcccgagaccgagagcatatgccctcacggccgcctgaggtagagacgaggccatggaaggcggccggcggccgctgcgtcggacgcgttgaggggctcggggatttggaaatttgcgtttggttttcgcggcggagagccggagataacacagagaaactaaccaatagtgttgccaaatcggcatcaatgcggatctgagtggtggtggtggtggacttggtggttgcccccacccccacccgt

SEQ ID NO: 9991 - DNA, 10626 bp, Oryza sativa
tatagggcgaattcgagctcggtacccgtgaataagcggacttgcatgcggtacaacgaagggacgatgagtctcttcgctcgtacattcagcggttctgtcaagtccgcaacaccataccatgcatccccgcacacgcggtaatctacgcgttcagggggggcgtgcggcacaaccgcatgctcgaaaagatcgcctccaaggagccccagaccaccgcggagctttttcagctcgcggaccgtgtggctcgcaaggaggaggcctggacctggaactccaccggttccggtgtggcagcttcggccgcccccggatccgccgctcggtcagggcggcgggacaggaggaggaagaagaggtcggcccattccgacgacaagggtcacgtcctcgccgtcgagggcgcttcgcgggccacccgaaaggggaggcctgcgagcgacaaaaagaaggaggccggcgcttccagcagggagcgcccgaccggcaagtggtgcaccgtgcacaacacctccctccacgacctcgcggactgccgcgcggtcaaaagtttggctgagcggatgaggaagtgggaggaggagaggaggcaggagcgccgtgagggcaaggccccggcggctccctccggcaaccggcgaagtgaggccaagcagaaggcccccgccgaggacatcgacgatggcgacgatgacctagggttccaggagcctggggccaccatcgccaccgtcgatgggggagcatgcgctcacgcttctcgtcggagcctcaaggccatgaagcgagagcttctggccgcggcccctacccatgaggcgacgcggcgggcgcggtggtcggaggttgccctcaccttcgaccagaccgaccacccgccgtgcattgcccggggaggacagatcgcgatggtggtttcccccaccgtttgcaacgtgaagttggggcgtgtcctcatagacgggggtgcagccctcaacatcctttcccccgcagcctttgacgccatcaaggccctggggatggtgcttcggtcgtcccagccgattataggtgtgacgccggggcacacttggccgctaggtcatatcgacctcccggtcaccttcggtggatccgccaacttccgcacggagcgggtgaacttcgatgtggcggacctcagtctgccctacaacgcggtcctggggaggcccgcgttggtgaagttcatggcggcggtccactacgcctacctccagatgaagatgccaggccccggtggccccatctctgtccatggcgacctcaaagtcgcgcttgcttgtatggagcagcgcgcggaccacctcgccgccgcgtccaagcccgagggtggcaacgagaggctcagcacctccgtcccagccgccccgaggcagcggatgatcacgtgcgacgaggtcccggtcaaggaggttgccctgggcgacggcccgtctaagaccacacgaatcggtggtcttctggacggcaaataggaagacgcgctcgtctccttcctgcgggcaaacgccaacgttttcgcctggagaccggcggacatgcccggggtccccagggaggtgattgagcaccgtcttgccgtgcagccgggcgcaaggccggtccggcagaaagtgcggcggtaggccccggaacatcaagccttcatccgcgaggaggtggcgcgacttctggaggccggattcatccgtgaggtcatccatccggagtggctggcgaacccggtcatcgttcccaaggcgaacggcaagcttcggatgtgcatcgactacaccgaccttaacaaggcatgtcctaaggacccttaccccctgccacgcatagatcagattgtcgactccaccgcggggtgcgaccttttgtgttttctagatgcatactctggttatcatcagattcgcatggctagggaggatgaggaaaaaactgcattcattacccccataggaacttattgttatacgacaatgcctttcgggttaaagaatacaggtcctacttttcaacgtactactcgaatttctttgggtagccaaataggacgtaatgttgaggcctatgttgatgacttggttgtgaagacgcgcaaccaagagaccttactctcggatctagcggaaactttcgaaagtctccgctccgcccgcataaagctgaaccccgataagtgcgtgttcggcgtgcctgcgggcaagcttctcgggttcttggtctctgcccgaggcatcgaggccaaccccgagaagatacgagctatagagcggatgcgccccccagcaagcttagggatgtgcaatgcgtcaccggctgcatggccgccctaagtcggttcatatcgaggctgggagagaaggcgctacccctatttaagctcctcaaacgctccgggccgtttatctggacggaggaggctgagcgggccttcactcagttgaaggcgtacctcagttctcccccagtcctggtcgccccggagccagatgagccgctgctactttacctggcggcaaccccgcaggtggtcagcgcggcgttggttgtggagcacgacgaggacaaccctcaccccgcgcatccccaccctgtgtcgactcgacccgggagagagcagggaggagaggcccccgagccgaacggcggcccgaggcccccgacggccggagctggccctccgcctgcttgtcagacggtgccaggcgcccccgacccccaggatggccccggggccactgcgggaaggccgcgcctgtcgccctccgaccccgaggtcgtcggcacagaagccgagtgcgccccgcacgacctctcggacgaagagcgccctggagatgcggcccctagcgaagaggatcggccccgccgaaaggtgcagcggcccgtctacttcgttagcgaggccctccgggacgctaagacccgataccctcaggcccagaagatgctttacgctattctgatggcttcgaggaagttgcgccattattttcaggcgcatcgggtcacggtggttacgtcttatcccctcggccaaatcttgcataaccgagagggtactggacgggtggtgaaatgggcaatcgaactctctgagtttgatttgcactttgaaccacgccacgcgatcaagagccaggccctcgccaactttgtggcagagtggaccccggcccctgagcccatctccgtccccgagaccagctcgggcccctcgcagctgcctcccaccgcctactgggtgatgcagttcgacggctccctatctcttcagggcgccggtgcgggggtcacgttaacctcgccaaacggagacgtcctcagatacctggttcgcctcgacttccgggcgaccaataatatggcggagtacgagggactccttgcgggactcagggtggcagctggactggggatccgccgcctcctggtgttaggcgactcccagctggtcgttaaccaggtctgtaaggagtaccggtgctctgacccgcagatagacgcttacgtgcgccaagtgcggcgtatggagcgccaatttgacggaatagagcttcggcacgtgcccagacgggataacgcggtcgccgacgaactctcgaggctcgcttcctcgcgagcccagaccccaccgggcgcctttgaagaaaggcttgcccagccatcggcgcggcccgaccccctagaggagacggacgcgcctgaacggcccccgaggcccgtcggagtccaggcctcgggacccgaggggagcgctcccagctcccttagattgattgcttggatcactgagatctaggcgtacctcacagataagactctacccgaggaccgcgaagggagtgaacgcgtccagcgcatctccaagcgctacgtgctggtggaagggaccctctatcggcgcgcggctaacggagtcctcctgaagtgcattcctcaggaacaaggcgtcgagcttcttgccgatatccatgaaggcgagtgcggagcccactccgcctcacgcaccttggctggcaaggcctttcgccagggtttctattggccgacggctctcaacgatgcggttgacctggtccggcggtgcagggcgtgccagttccacgccaagcaaacccatcagccggcccaggccctgcagaccatacctctttcatggccgtttgctgtctgggggctcgatatcctgggtccgtttaggcgggccccgggcggtttcgagtatctgtatgtcgctgtcgacaagttcactaagtggcccgaggcttacccggtcatcaagatcgataagcacaccgcgcttaaattcatcaggggcattactgctcggtttggggtgcctaatcgtatcattacggataacggcacccagttcactagtgaactcttcggtgactactgcgaagatatgggcatcaagctctgcttcgcctctcccgcccaccccagaagcaatggccaagtggagcgcgccaacgcagaaatcctcaagggcctcaaaaccaaaaccttcaatatcctcaagaagcacggcgactcgtggatcgaggagttaccagcggtgctctgggcgaaccgaaccacgccaagccgagcaaccggggaaacgcctttcttcctcgtctacggcgcggaggcagttctcccattcgagctcaccctgaggtcccctcgggccaccatgtactgcgaggccgatcaagatcagctttgcagagatgacctcgactacttggaagagcgaaggcggcgcgcggccctccgagccgcgcgctaccagcagagcctgcggcgctaccatcagcgccacgtccgggcccgatcactctgcgtcgacgacctcgtactacgccgcgtccaaacgcgtgctggactgagcaaactctcaccaatgtgggagggtccgtatcgagtgatcggcgtcccccggccgggctccgttcggctggccacggccgacggcacagagctgcctaatccgtggaacatcgaacaccttcgtcgcttctacccctagtaggggtcaggtgtcaggtctcgggctcgggccaaccccgcgccctcccaggcgtgcagagttggccgggggctaccacatgcatatccttatcttttttctcttccgtatttcaataaaagcattttcgatttcctaaggactgtgtctgtgccattgtttcctttcgaagaatcttggcttgaattagcacgctcgtgctcgatcctgccctcggtggcccgggccggctaaaatcgccaaacggggcccagaaccgagccgtgccccggggcgtggtgaactccgggggggaatcggcaaaggcccacaatcgggtcatccataatcctcggtcaccacgttcccggcctggccagtctcgacacacggatctccccaggcactagccccgacccgcgccatttgaggctgggacctgggcacgagccctcgttcaagccaagacacagaaggaccgcggcacagaccatcctcatctcatacacacaacaaacagagctgacacaaaaatttcctctttatttgattgcagattgaattagtttatacaagaagggggcccgaaggcctcagaagaagaaagaaaaagctatttaagattggcgggggcctgggggctcacgccgacgcgcccgggtcgccggcctcgtcatcgctgtcgtccgcaccaccgtcaccgccctcctcgtcggagtctggcctcttcccaagcggcttcctcagcctggcgagcccggacagcctcctgggcagcttcctcggcttcccggaggcggtttgcggcttctcgccggtcagcttcccgcctccgggcctccgtggtcgccgtctcctcggcctcagaccggccagacttggaatggcgggaagggcgcgacgggatctcgctgaggcagaagaaaaaccagaagacgaaaaacgggtgagtgaaaacttgccttgggagatgggagaatgaatacggccgcagtgggcgcggggatgaacctgcgaggaggtcggctaaacgaccaccttggggggagatgagctttccccggcatggttcggtcccccctatcttgcggagccgcttcttttttcgctccccctcgggctacgacgtcggcacagcaccctccgggcgcctgctgctggcacgcaccaccccgccccctcggggaggagatggggagggggtatcctcctgtttcctcttcccccgggcgtcggcagggcggctgccccccgggcccccgtcacggggcccagaagcacgactccctcccggggtagattgttcccccctgcggctcccgcccgcgccatcgtggcctcgaggagcccgctcccctgacgccccgaccgcctgcatgatggtcaggatgttggcgcgctctggatcgctgcagagggggaggacaccttgggggatgagggatgcctccacggagctgagattcagcacccgttggatcaccaccttgaagtcttcagggacccagtcccatttgaccccctggtgggtcctcatgtagtcctcggacccggtgtactcccaggcgccccgggcgcgccgctggagcggcgcgatccggcgacgaaggtaatcgccgtacaccatggcccccgtgagcccctgggatcgcagaccagccaggcggtcaagaacggcgtcgtagccgtctcccagatctaccggcgcccgccagctggaggcctgcgccgggggctggctcggaagtcggaggcgcgcttcgtcggcgagaggggtgtagaaccagtcgctcttccagtcgtcccacttcttgcgaaggacgcagggaatgtagcggttcagcaccggcccccgcggctggaagtagcagccaccgactaccgacggtggcgacaccggctgtacggtgaagaaccaccggaacagccggagagatgggcgcaccccgatgaacatctcgcacaggtgcgcgaagatggccaacgtcattaccgcgttgggggtgaggtgcgccatctggagatcataaagctccagaacatccatgaagaaagaagagaatggcgggaccagccctgccattgcgaaggaaaggaagaatacggaccgccccgggtagtgtggcgccgggcgtccctcacccagcgcaaccacctcctggccggtggcagattccggcatgaatcggcgcggcagcccggcttgcctctcgctcacgatgcgagaaggcggcagcacgctaccgtcgagcggtgcggagccccgtgccatgacaccggcggaggaggggtttgagagcgagtgagtgcggcgagggtagggcacaggaaacgagaagttagagcgcaagcggcgaaggcaaggggaataatggcgaagaggaaggaaacgaatctcttcctcggcgtctttatacccttgccaacgctatgcccggctcctcgcttcccgcgcccactatctcgccccctcgtttctcgcgcccactcctccactaatcccgttcgcccgtttgcggcgcacgaggcggatgtgcggccgtggcagtcgagatgggacatatcgtgcgcgcgttaactacgctcgccgaccgatgcaccatcatcacatctctaggcgaaacgaaccggttcgtcccgattcgcgcgctactcaagtaatgtagcggtcttgaagaggccgctcattattgtcgatcggtttctcccttgccgatgcgcgcgatttgcgaccgttgggtttctgcccgcctgtggggaccggccccacctgtcaccgggcctaaggagtggcatctcgcccgatcgcctccctcgaggggggcggtcgccctagcgtgacgccggcggctactgtcggtgacatggggccaggggtatcgtgactagaggcttgggtagccgcgatcactcacgtggcccgaccccctcgggggggtcgggcccaacggtgacatggccacccctccctctgtctccccgaggggtcgggccgctcccgtttcggccccgagggctggggcgccccgaccccctgtggcgtcggcgccacgtgtgtgggttaggtgagcaaagcggccctcacctaaccacatttatagcgggttagacgagcgcgtcacgccgcattcaatgcggcgcagcgcatgcttatccggtctgtgaccagtcgcggtatgtgaccggtcacagaccggtcagatcgcgggttaggtggcaacaggcggcctgtcgcacgcctcgctccgtcccgtcggaatgatgagagcctctaggcactcgtccctagacggagccggcgtgggaactcctggagttagcacatcggtctcggctagattcataccaggcttcatcgcaaccattacaaggaagtcattttatgaagaagggctgacgtgtggcatgctaaactgacgcgtggtagacaagaatgaccggtttgtgactggtctgacgccggtcacgtcatcagcaaataaccgtgctcccacgttgcacctgcttccggcggagtggaggttggtatgacccatcccatcggagggtcattcggacagcagccattgcaaatctccgcccattaatgaaggaaggacagggttatcccggtgtcaggcgaaggtacgagccaagttttggtcaaagtaggatgggtccccacccaaaagaagggtaggtagaaatggtgtatgtggtatccccttgagatataaaaggaggaccatgcctaccaagagaggggactggaggaaaaagagagaagaaagggagaagaaaagaaggagagctcgtaaaaggaagagcggagctcgtagaggagagaaagagtgagagggtctctctagagtttgaactctcttgctctccagctctttgtaactccttcatacacagatccaccagaacacaggagtagggtattacgcttctcagcggcccgaacctgtctacatcgcccgtgtcttgcgcatttgctctctcgcgaaacattccacaaatcgagggcttagaatctcacctagcgcccccggccgaaccggcaaaggggggcccgcgcggtctcccggtgaggagccccacgctccgtcatctggcgcgccaggtagggggcatgtgtgtttttctaagctctcgtcctctttcgtgtgcgccaagcttttcccgctcagcccaatggccgaacgggcagtggcgcacaacctctctccgagcgctagcggtgacgacggggagcagaacccacgccgtcgagctcgtactccaccgcccccctctcgccgaagtcttaggcgggaggaggcgctcgagggggtcgaaagatccgcgacttcgccgcccacgagcgatggagaaggacggcgagacggggagcgtcgccttctcgtctacggcgatggtagcacgccccagggcgcgctccaagctgcgggcgtgctcttgtgtcacccgcccgtcgtccccgatccagagactccagcccaacgttggctggatgacgtggccgacttggtcatgacggcgtagcatcgcctaggcaccggtgggcggtcctccgccaccaaggcctctggcgctgctaccgccggctccgtgtcgtcgaggcggagggcgcggcgagcggcggccgttacccgccgttcgtcagccattccctcgtcaacgcctccgacccaagaagatgtgcgtagggggccggatgcccgcctcagtatcgagcgccggcgcaatggtcgtcgtgctgcccacgcaacggaaggcgcttcctcgtccggagcgccacttcggttcgggcgcgggggccagcctcctgtgcccccggttggtggtgtcggctgtcgagcctttgtggcgagccttcggaacgtccgttggcccccaaggttccggcccaccatcaccgagaaatatgacggaagcgtcaaccccgccgagtttctccaggtctacacgaccgggatcgaggccgctgggggtgacgacagggtcatggcgaacttcttccccatggccctgaagggacaggcgcggggttggctaatgaacttgccgcccgcgtcggtccactcttgggagaatttgtgccagcagttcaccatgaacttccaaggcacatatccgcgcccaggtgaataagcggacttgcatgcggtacaacgaagggacgatgagtctcttcgctcgtacattcagcggttctgtcaagtccgcaacaccataccatgcatccccgcacacgcggtaatctacgcgttcagggggggcgtgcggcacaaccgcatgctcgaaaagatcgcctccaaggagccccagaccaccgcggagctttttcagctcgcggaccgtgtggctcgcaaggaggaggcctggacctggaactccaccggttccggtgtggcagcttcggccgcccccggatccgccgctcggtcagggcggcgggacaggaggaggaagaagaggtcggcccattccgacgacaagggtcacgttctcgccgtcgagggcgcttcgcgggccaaccgaaaggggaagcctgcgagcgacaaaaagaagaggccggcgcttccagcagggagcgcccgaccggcaagtggtgcaccgtgcac

SEQ ID NO: 9992 - DNA, 31851 bp, Oryza sativa
atgacttacattgtgaaacggagggagtacctgtgatatgtatgatctgacccaattatcaaccaggaattgatttcaaagcggttggtggaaattaagagattacatgaagagagaattgaaattttgaacaaaatagcaacttttcaggtttgttgattggtcaagcacagaatgcatccttgcttagccttgaaggcccatgcttaatatttattgcatgggagaattttttagtatcagaacctgtatgactaactttgtgtgtgtgtttttaatctcctccagaatatcttgatggatttcaagagcattcgttcttcaaaagcttttcagcttgttaatgatcgacttcagaagtcacaagcagaattggatcactaccagacattattagagaaattacaggtggttactggtcagtggatttgttggattccagagttgtatagcaaaaatgtctcgctagagcatttgatcttttgttgaattcctatttgatatgtttcaggttgataaggataagtttgtgtggcaagaaaggcaatttaatttgaaagttgatctggctgagattcctgagagggtttctacatattgtgagtctagcattgctgatctcaagaaggatattcagaaactatgtgatgaaaaaaacatgcttattctcaaacttgaagaggcttcaagagaacctggtgcggtagttactattcactttaccaagagtaactttcaaacttgtcttgctaaagcaggtaataaggaattgtttgcacttgtcaggtcggaatcaagttattacaaaatttaaagctttagtgtcatcgataccaagggaaatgggcgcgatgcagagtgaaatgaccaaacacaaggaggcttccttggagttgaattctttgcgagcagaagtccattcactttctcgcattctgtccagaaaggtaaattgcttgttattggcttgcacatatgactcgcaagtgttatggcattgattcgccaatgtgtcaggctgtttattttgttttataggaacgtgataatgaagaagcatcatgcagatctgcccgtgcgggatctgatataacacaacttcaatcagtggtatcttgtttgtttagactcagcttattttttctcttcattaaggtgttttgtttagctattgcaggaatttgtcctcccatgataatttgacatattgaaaccaaaaccctgtagatttctgatctgaagcaaactaataaggagcttaagttgttcgcggatatgtataagcgtgaatccactgattccaggtatttcaattttatatcatatataattctcaacacaacttttttttttggctaagacttgtgatattttgtagagatagatgcatctcacttcttaggacagagtgcagtgtaatgccgtgtttaattgtttacctatcatgtatttaattcattgcacggtcactctactatggccatgacatttcatcactcatcaccagtaacttaagtttatttattttgtgatggaaataacctttttttgtgtgtgtggcagggaaataatggaatccagagatagggaattccttgaatgggctcatgttcatgccctgaaatcatctcttgatgaaagtaagctagagcagcgtgttaaggctgccaatgaagctgaagcaatcacacagcagaggctagcaactgcagaagctgagattgctgaatcagggcagaagcttgggacttctagaaagtacagaattatgcttctgaacattgtttctcttagaactgttgaagtaggggtcacttctcttttagggttactaaaggaaattgatgcttactgctgaatgttcactgtgttcagggatctagtcagtttatcccatatgctgaagtctaaacaggaagaatgtgaagcttacagagtggaggtcgaggtgtgtgccatcttttatgcatgcagttcaagtatggctttaaacatatattaaacattgtcatcctgagtttgaaacttttactaacctattccagtgtatcgggcaagcatatgaggacatacaggcacaaaaccaacaattgctacagcagattattgaaagagatgatgataataccaaggtagtgactcaatgatttctttaaagctattatctcagataatcctctcccaagcttatagttttataagagttcccatttaccactgtaccaaatctggttgcacaaatagctttcatgtttctgatatattcataggatgttagatttggttatattgttaatttgattgttccggagactcagtacttcattgaaaagctgtttacttgcgttaagttggtgatgcggaatttcataaaataggccaaagttccaaacccttgtggacagcaactactggttgccaaaaaaaaatccttgtggattcctggatgagtattgcctgccctttatttagatatctttttgaaaagaaagttagaacatttttctaaatgaccatcaacagttttttttttgggtaaatggtgttgtttcaaggtcaaagaaccagagaaaatcaggacgactgcgccttttaatagtagagataaattgaaaatttttagccgtgctatttgtaccatagctccttactctttggagtgcccttgataatccaggcagcctatccaagggtcctgaactcctgataaatctacagttccagtgattgtgtatgttttgatccaaaattttagtttgatgttttattgaaattttactgatagtaaagcttgtttacttcggatgtattgaataagaaatgtgctaactctgcatttggtatttcaatcccattgaggaatggaagctttaggatgaatcaatctggtagtaaactattttttcagtagtcgtaacatttttgtttggtgaaatctacactgcagatttttatggagggtgttaaagcaaaacagacacaagatgctttgcatttggaaacatattctttgcgcagaaacttgcagcaggaaagctctttgatggatctgtacaaccagaaaattgtttccttagaagatcaggtaggttgaacgcaaatattgtataatccaatacaatccttccaggaggtgctgaatattattttcccctgattcccagcttaaaatgtggtctgatcgggttgggaaacttcaagaggatggatggcaacaatctgtttcattgagtaattaccaaagaaagctggttgatgtgcacagagatgctcaaaagcttatgcaatcattggatggaatacaagcgaatgttggaagcagtcgtttggaagtcgctgatctgcttatagaacttgagaaagagaggtgctctataagaatattttacatttctatgggctaattttttccaatagctgatctaacgagatgagttacattccaggtttagtaagaagagaatagaggatgatttggaggttatgtcaaggaaagctagctctcttagagccaaggcacgtgaatcagcagtcctggaaaagcttcgtcatgaggtcaaggagtatagggggatattgaagtgtggtatctgccatgataggcagaaggaggtaaatgatcttgatttcgttctttgacactcttgacaatataacctgtccttttaacaatataacctgtcaaaagacactttaacagtgagcaatcaacattggatattcagatctaatatattccaattgcaggttgtgattaccaagtgctaccatctcttctgcaatcagtgcatacagaagtcccttgggaaccgacagaggagatgtccttcatgtagcttgagttttggggctaatgacgtgaaacctatctacatatgaggttgttaatttcaagatggtatcgcaggcatctagatcaagctactttgatggtcattacttggtcatatggttagatgaccatgcgagttgaagatatgacaagtactagcttgtacaaccaaacatataagcagaatgtagtagcctaatttggttggctacatggaattgcaggtgtctggcattcgtgatgctaatgtttattcctgctcccttgtatagttcgggattctcctggagtagttaagtcgctagattagtctgacttttgctatatccattctgttcttttggggaaaaaacatccaacaaaaggggtggtgcttcccgccatactgaaacattgtaccatatatagcttgtagttccattgttgtagcagacaataagaatgtaggtcttacgggttttccagattgtacatttcaggagattggcaatagcgaaatttcagttggatgcagtttgtttggtcttacctgaacggctgagtacctgaattttagtttttgttttggggctattaagctaaacctatgctgattgtttggttcgttgtacgcttaaaccttgatatgtcctctttttggcaggcgtgactgttaagcacaaagcgcacacccagaaatgaatcagctgtcagtgcgaaatcccatttgtgcactcaattttcaacctttcacttaaagtttgacatttgcgaaatcccatttgtctgggataggaacgctttacggtcccccaattccattggtgattgcattcaattgtagagctgcgtaatctccaccagctcttttccaacatctcctatcctctaacctttgcgacatgtgatgtgatacatccattttgtcttttgatgtatagtagcttctgacttttggcaacgtgacgctccgcatgtatgaaagctgacactgatcaccaagctcgcggacgatgcttagctttatccgtggagacaggttggtagagatggcagaagcatcctcttcttttccctacctatcgccgttctcttctttctttcatgggtgacgctctctccccatcgactctcatgtggcatgttgttgaatactagtaccccgtagttggttagcaatctgccttcgctgattcatctgataacaagctgaaacgagtagtcgttacggagaacggacgctcaagtgaagggtcacgtcgtgaaagttgcctcaatccggaagctaggcatcactcgcatttgacgctttgaggcctccacttctggaaatgcaagtgtccccctcctggttccctttttgggctccattccttgtggaaaagttgatgaatgtgtgtacctgtaacatgtgttcaggtcaatactgttctctgcgccttctacgacgtacagctagtcagcacctggagggttccactcagtcgcattgcattgtaatcatgtaaagccggggcgagtcctgactgcactcgatcaatcatcgcatcgtaacaacagagacatacccaaattgagcatttgactcgtggatagtgccatagtggcatacccccttcctgaagttgaacaaacaagggggcatcatccggcatgtggtttgtccttccagaacgttggagcagaggcagaggcgcagagcatttgctttgcagtttgcacagttccgtcgtccacgagacccacgcggtgatgagacgccctcgtcctcgtgcccgaaggctgtagtgcgggctgccaccttgcctcaccttcacctacccacctggtccttcaccggaacgaaatcacaaggagagggactgagggagtcccggaaaacggcgaagaagaacccagccgcgtgccgcgcgtgatgagccacgtctcgctcacgcccgcccgcggactcaaccgcgagctgattgcgtaaggtgacgcgcgccagcagttagccgggagcggatccgtggcaaattaggacgcgtgggttgttggtctgatgactctggcttcgtcggtaccccgcgggcgggcgatacggtgcacgcgcatgcgtgcaccaggccgctcgtggagaagggggatcgcacggcggatttcgcgtgcggcagcttgctcgggccgtggcaggaagccgagaaccgatcgtgcgctcgggctcgtacgcggcggcgcacatgtttctcccaccggcacactgggtccgacaacgaaggtacgcagtaggacatgggagggatcgttccggttccgggcgggcacatggctaggcgtaccgcgcgccacatatgcttcagcccgaccggatggaccgtctcgctcctctctagtgaactgcttgccttttacatctttcacaggctctctcattgccacggtataaattagtggggcgctttaacatggcggttaaggctctgtttctttcagtttgggattattataatctaaattattgagtaatctagattgttataatctgtagtaaaataagcggttagttgtttcttttctagattattagagcctagattattgggtttgcaagtctaaatagggagtggggtggtatggtgggtaatttttcatccaatattctggaaaaagctcacctaaatgaggttatcagattataataagttgggctacagattataataagctacttcaataagttgtctatttctttcagcttactcctaataatctggattataataatcccaaactaaaaaaacagggcctaattctcgatcatctgagttagtgagttacctcaggaattatatggctgcatagggaatttgcagtactactcagagagaaggcacattaaccggcatttccaattaagttccaacacatgagaaaaatgtggcagcgcgaatatgcggcagcagtgtccggtgtccgtacacgaacccagaccatagtaacgtcgttttgctgcttggaatgtggggttcaggaccacaaagctatagcacacgtagtaacgtctgtatggtccaggccctgaaccaagggatccgcccgagatccatcgcccttgcttgccccgggcatccgagacagcatcatacgggagtacatgacaacgtgttaatccattgtaccgccacatgacaacaccggtagccccagtttaaaccccacaccgatgggaatacgacagcttttaattacgcaccgcactctcactgcctgatatacttctgtggtgtatcgtgtgttctttatttgcttgctattgctgaaccgtcggttcctgtctaaggttttccaatttattttaatcttttgtggtgttatttgtgtcccctgcttttcatgttgtttatgcggatctagagattttttttcatatgtatacagtcatatgtctgaatgtccccacgtaaattgcttgtgctgatgtgcatgtatgaccacctctatatatgcgtgggtttatctatacacgttcaagtgaaaaggattgacaaagagtgaaaagagcaaaaaggcaggtaaaaagtagtactacatactattcgtacatagtagtaagatttttctttatcgtgagcaaggattcggattacccctctaatcttagcttagctgtctgtgatcatgcctacttggaatcgccagacgaaacccgcgggccgcggcaagtgtcgacagtcgaagcaggaatggacttcatatccctcacatcatctaccctagtacgtactactactggtactttcaaatcttttcacgcgaagtttcatatcgcctccctttctcttttgctcttttgcaagagcgtataatccagcgtacaacgtcatggatgaaccccgaccattggccgatcgggcaaatctcatggtgtctaatccctgcacgcgcctttgctccacgcccagttgtccactgtcccttttaattattcaccatgtcttctctaaatagtcgctgcccatcaaatcctccggtgggtaagacgttcctgtcagtctctggagctagctaacagcagctgcggctgtgttaggtcgatcgatcgatgcaacacgtgcacgggcgccacgcaaatctccttccaaacaagccagtcacgctgattagcggatggctaagctgtgtgtgttggtgccagatggtaataataacaagtggccactctgcagacgcatttccctgtctcttaaagctgggtgtcgatatgctcttgatcggtaaaaaggacaacgtatcttaccgtgatggagatagacggcctaactgtcccccatctccgtcgtttcttccattccggcgctgtacttttatcaaattaccattagctatcaccatttgtctacgtgcgtgcacagtatctcgcgtgacttctacgactcttatgttcggtctgatactctgatgagtgatgagaataaaccaactgctcatggtagcagttgccgccctcgcattgcatgcatgcacacatatgatccgtgcgtgcgtgcatggcatgacaaaaaagtatagcacaccgcgtctgcatgctaatggagacgttgatgagttgctcggtcgatcgatggcgacctgctgcatgcggacgtatgtatctggatcctagtaaaaaaatattctacgtgccgccgaacacctgtcctgctaatcacaacgatttcttaatttaatttcacttcttttgcctggccacttgttaacctatctgccctgttttggttaaaaggaatcaacgccctcggataacatacttatatggcggcctgcaaacctcaaccgttgtcgttttacatacttatacgtataattgtacgcgactaaacgggagtaggcatcatggatcagctggactccatgcgtagataagccggcaattagaatcgtcaatgttattaggactagtactagtgtcatttttttttaaagacgcactatccattaattgctatctgaaagacacagttttctttttaaaattttgaataagaatgtactagttcgtctataaacttgtggttgctaatgggaggtctcatgtggccaactttagtttggaaattctaaatcaattcatgatgacttgatttgtgcagactgaagcagattgggtgcagggtactgtagatatactgcaagtcccagtcctccaactgtacgtacacactgcatgtcaagatttcggcgatcgacgatcggttcatccccgacatgacgcgcatgaaatttgtgggaattgatttggacgtgatgcaaaatcaacgtcggggacaacgacggcatcggaaaggaggcccgcgatattcttctctacacgagcaccgctttcacgtagaatttcttggccaaaagctggtgtcgatcgaaggctcgatcgctgcatgctagctaagatctcgtcgcgtcgctctcagggtgccgatccgatattcaattccagtggttggttgccgatggccatcagcgtgacaggcacccccgtgaaacctcctccactggagacaaaattatattcaggtgatggcgaatttggcgtcgacatggcaacagcacaagggagaccagtgcgtttttcagttgcttctttttaaccagttgggctttctgcattgtttctgcgaacgagcacgtcatattgatcgactaatagtagtttatattgcacgaagttagataaaaagagaggccacgccattactgtggaattacagcgagaggtgtcctaattggcacgataatgatgccaccaaaaggtaccatatatctctgttagaaaaagtactaatactatatctttggcaggttaagcgttagtagtacgactttaggcaatgtgtatatgtggacagttcatattcagatacagaatactgttcgaaccaggcatgcaccagccgttaccaattacacaaacaggggcaggattggaaggagaatacttggagagaacgaacggttttaagaagataatgatttgtgttccagggattaaatacacaagtttaggtaggataaacagaaactaaacagaagtcaatggtttttttaagcttttgttaaattttcttctttattattcaattgctcaagctacttacccagggctggttgactcgatgcaaatgcttgtctagttgtcttgcaaaaaaatatcagggttagttggacaggaatcattcgatttgatttactcctccctttgattcctactacctctgtcttaaattagcagtcgctttaacttttttcttgtaatatttgatcattcatcttatttgaaaaattagtataactataaaaacagagaagatatacttaaaatacttttgataataaagcaaatcacaaacaaaataaataataattctataattttttatataagacgaaagattaaaagttataaacaaaaactcaatgacaagtattctggaacgtagtcagtagctgccttttcccaccatcaccaatctgatgaccaacgcaatctgatgaccaagagagcatcaggccattctagtgcatcacatttggcatcagaacagaaacacgagtcaaagaccaaacagcattatacgtatgcggcagcatatgttcttgttttcgaaatccaaccaaaccttactacagtactcttatcaaaaagagtgaattacgctttggaccacattttattacctaagttttactttgaaccacccttaaacatatcttttcattttagaccgaataaatttgctattgttacgatttggaccaccacgaacaatttttttaagtacaattaatgacgttaaacacattagctctagtatacggccgaacttctctatgtgtggttcatatgtttgccgaaagggaagttagacatgacgagaaaagttgttcataatagtccaaaccgtaacaatggtaaatttacccggtctaaatttaaaaaatatatttaagggtggtctaaattaaaacttgggtaataaaaggtgaaccaaaagtacaatttactctatcaaaattaaaaaccgcaccgtgatgtgcagatggggggagggggggtcgaggaaacttgaaacgcgccaggaggagaacgcggcggggggcggtgcggattgaccaccggccacgcggcggggagcgcacaccgatgcgtggacgcgcgctagctgccgcctgcgcgatacaccgatgcgtggacgcgcgctagctgccgcctgcgtctgccgcctgcgccccccatcgcgcaggcgacagcagcctttcgcaccccccgcgtgtcgatgaaactccatcaattctccgtacactagcgatcgggcgacgtcgcggcctctctctggccatccgtgtcgctagccagccgcggccgggccgcccaacccagcttttcacaatccctgtgctgcgtcgggcgcatgcctgctgtacggaagaagagcacggcgacgcgctgctgctgttgctcatgctctttagcgccaggcagcgttgctcatgctctttagcgccaggcaattttcattttgaccgagcaacgccaaactcaaactactactcttttcgttccaaaatataaacatttttaacacagtgacaaattaaatatttttaactttgaccactaataacaaaaaaaaataaaaaatcaatcatataaaattgatgttactagatattatttaaaacatctaataacatcaattttatatttataaatattgttggttaaaatagtatctcggagatcatgtaagagtttaagggggtgtttagatggggctaaaactttttagcccatgtcacatcggatgtttggacgctaatttggagtattaaacatagactaataaaaaaactaatttcataaatgagagctaatccgcgagacgaattttttaagcctaattaatctataattataaaaagtttactgtagcatcacattgtcaaattcatgacataattagactcaaaagattcgtctcgtgaattagtccaaggatatggaatgtgttttgtaattagtgtatgtttaatactctaaattactgtccaaacatccgatatgacatggacttggaataagtctctggaaaccaaacaggccctaaaaatatttatattttgtgacggacggagcagtagtactaccgtggagtacgagtactctacttctactgcctccgtatggtccaacgacctcgcttcagtacgggatgctactagcctagattacgagctactactaggcggcacataagtgtaacacaccctccaatctccgtgagtgctttgacttttcttttgttggtgaaactgcaatcaatcatatccatgcctatgccatggccataccaccaataatcaggcacaagcaagcacaaagatttggttcgtagtgtcccccgcgtatgccaactacacgctcatcctgatccgaaaccgaaacatagtcagtactagaagtatgaaaggggttgcatctagaagaagatgcactttatgcatgcattcctactacttctactgctacactgtttagttctttagctattgtagcatcacattatcaaattataacgtaattagacttaaaaaattcgtctcgtaatttacatgcaaattgcgtaattgatttttttttcatatttaataaatcatacatatgtctaaacatttaatgtctaaacatttaattttatatttttaaccaaaattttttggatccaaccaagacctgcctaatgtacaccagccaggcaacaaacgggctgctgctagtatgctccatcctccaattctactcgtaccgtcaaaagacccagctcccaagagctgagagacttgaaggggatgcccctagacagtgacaagatgaagccaacagctcctcctctctctctctctctctctctctctcttcagtcctcacagcagatgcgcagctgtgtcccatggcgagcaagagagagcgccgtactgccgtcagcgtgcgtgacagtgcctccagattggtggtacgactcgccagcctgtaccccaagcatctggtctcgccagttggacctcattaccacgaacttgccatgggatgggacacctggctcccccccggcctgaacggctgaacctggtcgccgcacgcagggatcgtaaacacccttctcgccgtattaacaaaccggttcgcgatctaacaacggagaggccgagaccgtatgcacgttggggaggagacgaaaaaagggacgggaaaagattagcccgtcgctgcacgtaacgtgtccgatactccaaggaaattggcagtggcagcacaacacacaccatatggccccgatcgatcagtctttttttttttttgagttgccccgatcgatcagtcattcagcgatggatggcatgcacgacgacggtctttattctccgcgaccttttttcatgtggttttctcatcactgttgcttgaggagcagagcagtagagaagcatcaatccatgttggtctgcgtctctgtgccttgtcgtcgtgccgccatgctcgacagaatcttccttttccatgccaatgcgagccaaatcaagagctcctgctaatgcacggacagttggatactcattgcaagtggttgcacggatcgatcgacgtaggtgtgccgccgtgattttagacgtattctccgagcacgtatctccagttctccactggctagttatggcgggaatgcatgtatgcagtactctgattgattctggaacgtactacgactagtatttctatagtactatactaatagtgatacaatccgtatacttaaccccaatatagattgaaattggacagcggagacttgtgcttaactcaagtgtcgtttccgacgaggatccgacacctgcctgaccgcggaatttataaaagcatagcaggagtattgatcaccacgaaaatcgacaggcttacgtgcacaacgtcgatttgggcaaaggatttggggatcgcagaaaccgcgattcccccatgaatgcgcccccactgcaaagctatgagtattcaatttgtgcctcagaccatcggcaacgacgagtcagccggacctaaaggaaaattgttcacgcaatccatccacaaggaccgagttaaaagcagggtgggtgcagtgggagtaggactaactggtatagtacgagagtaggagtactcgttaagatgttaaccccgggacaagttgttggtaggcaaactagcggccaggttaggctagttaacccagcggatcaagccaagccatccgtctaatccgagccagccttcccccacaaggatcaaatcgttcgcgcgccggcacatggtctcttgcacgaaagacaatcatcgggccggcagcgcggactggtcacgcaccgtctcgcaggcttctcgagcggccgcattggcgtcttccggagctcgcccatcacccacgcgcacgcacacgttcctccaggctgacgcggcgcggacaggcgagccgccgtggccgcgagcgacgacgtacgtacggcgggcgaagcgtggcccgggctgtgcgacgacgagacggcattaactttggcgtagccgggaagccgctgtctttacgcggaaaccgtcgctttcggggcctttatgcgctcccgctcactgccgcgccacacgtcgccatcgcggcgcagctctgaaggcagtgtgcagtgcagtcgtgcaggtccaggacgacgacgagcgggaggagtcaatcgattaatcgctagcgcgtctcttctcttttcttgtttttttgttgttgttgttgttgtgctgtggttaaggtggagctggaaggctgggacgattttgaatggcgtggacgaatcttaccgtggcttccaaggccggtgacgagctgctaaaacaccggaaaggtgcaaatcggatgcgtcatgcgtgaatatcacactgtccatttggcccaaatcttgctggatcactttttaccactaaacaaaacaagctagaaaagggatagtcgaagataagatgcttgttaattatacatattcttgtcccccaaatcaagcaaggcgaggaaaaggaactgactttatacaacctcgcatgctagatttggcaaagaaaagaagaaaaaatggaaggaaaaaaaacaaaatacaaagggagaaaagaagaaagagaacagagcagaagcagagtaaagaagaagaaaagaagcaccgccatgtacaagccactgatcgatctaatacacggaagcatgactggctcccatgagcagccacattgatcagtaatcccacagcatgggctcctcgaggcggaacacgacgccgccggccacgtcgtcatcgacggcccacgacgccccgcacgagaggctcgaggacgtctcgtatctcaggtccaggagcaggtccgggaggtcgaacagcgtgctgtcagggtccgcttcggcgtccggcggtggcggctgcggcgaggcggcgctggcgacggagcaggtgtcggggctcttggcattggcgtcgacggagacggaggggaagtcggctgcggcggcggcgagcagcgccgccgcctgcacgtccttgggcgccgcggtggccgggcgcgggagcaggtgcgcgaggtccgggaagttgaggtgcgcggtgcggcccttgatggcgagcgcggccacgtcgtgcgcgcgcgcggccatctccgcggtggcgaacgtgcccagccagatgcgcgacttcttgcggggctccctgatctcggacacccacttcccccagctccgcatgcgcacgccgcggtacgtcgggtgccggccgtcgttgcgcggccgcttcttcggggcgacggtggcggaggacgatgatgtcgacgtagacgaagacgacgaggacgccgtgtcaggggaggtcggggaggccaggtcgtgggagtcgtccatggctgccgcggtggtgcgggtgtggactggagtagttggaggcttggaggggagcggagtggagagggcaatggggttttatggtgtggcgcagtggcgacgtggcacgggaagataaacaaagggccatacctggtttgtgggccaggcctctttttcctgttttttttttcaattttctgtttgagatgattagtagtagtatgacacggctggaattaattttcttctactccctccgttccacaatataagagattttgagttttttattacaacgtttgaccacttattttatttaatttttttttgccaacataaaaaacgaaaagttgtgtttaaaatactatagataataaagtaagtcacaaataaaataaataataatttcaaaaaattttaaataagacgagtgttcaaacgttgcaagcaaaatcttataatcccttatattatggaacggagggagtatataagttcaatgcaaccgatctacccgtgttaatcaggtttatggcatccaggtcagtgtggaatggattttttttcggccaaaaagtgtgaaatggatttattgcattgtgcacagcaatgtggtgcaaagatatttggaaacgtggaggcaagtgttatctctaaactgagatttactattttgtcatggttcaattacctggatatcacatatttaaattctaagctagacagaatatgctttcaccctgtcattttcctgagtaaggggacccaagttcaaatattctttcgtgggccatttatgtgtatatatgttgaggactcgagaaaatcgtcatgactatcatatttcttttgtagtttaatgcttcccaacaaattaaaacatgttcaagaaacgtttttttgttggtttccaccaaacaccaaatttgcaaaagagaacaaaaatactactactcattttcatcttataagtcattttaacatctttcttaatcaaacttaaccaagtttgattaagtttatagaaaaatagtaacatctaaaatatcaaattagtttcactcaatctagcattgtatatgtttttgtaatttgtttgttttgtgttaaaagtactactatagtttttttataaattgtgtgttaaatctagaccgtgctatgtctaaattcgtagttataaacgtcatgatttaaaactccagcagatacatgcatgtacgactctataatcacataaatgacaaatccacataactcagttttagcattataatgcagattttccgcagggacacgcgaaaatttcatttagttgagcaattctaggtgaggatccttggtggaaacaagccctatggtagttcgtgtttttttttttgtcaagatatcctataacctgtcccagatgggaaactaacaaaactggttgttggtagatcactgctatataaacaattttttttacgagaaccatacaatttgcaggcggatagtaagttagtaaccaatagcctctacaaaagttgacctgcattttcgcgtacggtttgttaagagacccgtataaaaaacagttttctcaagtgggtctcttaacagagccacatacgaaaataagcttattttcacatgcagactcttaaacgatctcacgcaggcgaagcctcttaaagctatgtctgcaagtctaatcacactcatctcttccctcccaacaacttcaaattttactaaggcctagttctatttctcaactacaatcttcaacttcctcattttccgttagcacgcttttcaaactactccatccgtcccaaaatataaacatttttagctatgaatctggacaactgtgtgtctagattcatagccaaaagtggctatattttgggacggaggtagtattaaataatgcatttttttaaaaaaaattatatatagaatatatttaaaaattcatataaattcattttaagtttataattattaatacttatggcatgtttagatcccaccccaaaattttacaccctattacatcgaacgtttaaccacctgcatgaagtattatatataggcttaaaaaaactaattgcacatattgcgactattttgcgagacgaatcttttaaacctaattgctccatgatttgacaatgtggtgctacattaagcatttgctaatgacggattaattaggcttaataaattcattctcgcggtatactgacggattctgtaattatttttttattagtgcccaaacatcccatgtgacaccctatataatatccgatgtgagacgccaaaactttacacccctgaatctaaacaccccttaattaatcacgtgctaatgggatttctcgttttgtgtgggtcaaaaatatctctcaaaacaaagagatcgaacgcagcctaagcctcaatccgtatctcctcaacttctctcccacctctcattcccctaatccctccccactcattttctctctccccacacattttctctccgtttcttctcctggccggcctctctaccaacctctcctcaacctcctcctcctcctctctctctctctctccccaacctcccctcggtggcatcggcagccccaagcggcagtgtgtcgatagcatgggtcgtagccatcccgtcgccacagctggatccggtggcgtgcggcagccgtcctgtcgccaccgctggatccggtggtggtggccctccccgcacagccccgtgcggatccggtggacaacataagcacccgtacatgaaaatcggattctcgcacgcaggtgagtcatccgcatgaaaaaatagtgatttttttagatattttcgaacagacgtgtggatcaaccgcacatataaataggttttacctgtttggaaacatacttttttaagtagtggatgttgataagctatgcgtatctacagagtcctgtattttatttattttttaaatatgggaagctaactatgagcaacttcattgaagaagtataagactgtttcacctactaataatagaaggaagctacagctggacgtttttcgtatactcttccaatatagcattgtgttctctctaaattgtaagaggttgagacgtggttttttcttatatttcgtgatggagatagtagtagattattacggatgacctcagttgtagtatggtgctaacaagaatacggtgggcttattatgattagattgagtcaaggactgctaaacaaggcccccgtctgcagtgccttactgccttgagccttcttaatttccaccatagaacctacgtatacgcacatcgaagcgtggcgatcgataccccaaggaagaacatatcgtcggacaaggcgaagtccatggcgccgccggatccccacccaagtttttacacgggcgccgccaatccgttcaggccatgccgtgcgttgatcgatcgatcatcgatgcacgcgccggcggtcgaagccaccacgcttcgtcgaccgtggccggcccgctgctttggacttggacgcagagttgagttgccttgcctgggcatggcgcgggccgtgtcgtgtcgcaagccggccgcgactttccacgctcgtgggcctgtgaaagtggggacggtgtgggctcaaccacgcaccgctccgcgcatcacgcaaagtcgcaaaacacagcttcccgtaaaactacttcgggcgacttttggttgacctgctacaaaaaaaaaaaaatcctgctccttccaccgatggcctggttacagatttcagcctttcaggtgtagaatcgcatagaaacggaagtgagatggaacgagatgctccgcgtagaacggacaagtcactcgacgatgagatggcacgcgacgcgagcgcccccgcggtctcacaggcagcaacgcaccaactctcggctctcgcacactctcctcctccgtaatccgtatctatgctgattgatgcagaaatagctaagctacaagttacaaccaccacatactgcaggttgcataatcgtcaaacagtacatatattcctacactgttgccgtaccatgattgggcgagtccgcattctgttggactgctgcgagcgcgagcacgcgacgagtatcacagtgacacgggaacgtcgaaacggccccgcccataacgctatcatttaagaacaaacgtacgcttccaatctccatgtctcctcattcccgcgtcctgtatatgaccatgtactactgtactattctcctctctgctcttcacacgctgtaattctaccggccatatgagacataagaggaggcgtaccactgatcaatcgaacactgcttccgtttggttatgataattaattagggtgagtttgaggaataggggattgagaagattaggaaaatatgaaaaatgaggtgagccattagcatgtgattaattgagtattaactattttaaattgtaaaaatggattaatatgattttttaaagcaattttcctatagaatttttttgcaaaaaacacaccgtttaatagtttaaaaagtgtgcgcgtggaaaacgatatgctatctcactcattgtctatggaactaacgcacccttagagcaagtataatagtgagctataagcttactgtaaacttatgtggaggagagaggtaacaaaaaatcaaaggggttggctctcatgcaagagctagcttaacacaatctccaagacaaatacattaaatgtataagtgagagataaagagaggagaagaaaattatagccaaccttatagctaatattattatatatgttggctttaagatgaggtgagctatactattatccttgctcggatgggggagatgggaacccaactcctgcgcacggaaaacagaatagtccattaacgcgtgattaattaagtattagctaatttattttaaaaaaaatggattaatttgatttttttaagcaactttcgtatacaaactttttttaaaaaatacaccgtttaatagtttgaaaagcgtgcgcgtggaaaaacgagagagaggggacgggaaaaaggtgcatgcgaacacagcattagttaacctgtcgccgatgatgatgtaacatgtgtgctacaggtagccgtgtgtcctctgcaaacgtactgtactaccctcgctaggctccggcttgtgcattacacgctgtgatgactgatgagtaacccgtctgcaacgatcgtcgctttaccagctgtatctaaccgttcatcccatacgtctgtttctaggattcttgcaaggaacattgttgggtagcccagcaattaatgatggtaccatgtacttggagtagttttgatttaaccccgtgtctcaaagcttcaaaaggaatagcaaggccaccatcttctaactcgagtacatgtgtaaatagcttcctcttttggtttgtcgagagcaggattttctcagcatgtcgacggtaaacccagcattttcaatcacgaaaacttatagctgtgtttaagaagggacgaagggagtactttgtagcagatgatcatataacagtatagtatgaaaggaagagacatacaagaccatgaaaatgtttcggaaacacatcaaacaatagcgtaattatggcaacactgaggtcgaggagtggaagatggagattggaaagggaggtataaggttgtgggcatgtgtcgacataacataactcgacaaatacccgctaaagtctatgagctctcacttcatggtatgtggagacccacagcctcatcttttcgcttatgcttatcaactaaaaattgaattttcaactttaaatataaagttgatttcggtgttttttatcgaagtttatttttcaacatttacgtttatatagttaagaacatatatataaaaattttattcataaattattttttgtttgtaaatatatcgtttggcttattccccgaataagcgtaacgagggatccctagccaaaaattgaaaaacgaaaacgacgaagatcatctctcatctagaacttggacatgaagtaataaagggagagtagttttaggtcttaaagaaggtattggatgtatcttaattttaggaggaaactccaaattagacatccgattttctgtaaaaaaaaaacggacggtcaaatatttcagttgaccacccgtgaaacattaaagagagaatccattatatgccactgactttgttacacctctacgatttaccactggctttgtcacgttctataatatgccatcgactcttgcttaacttctacgatttaccatcaccgtctggttagcctccgttagcattgtacaattttgtccaaataaccaaaatacccctaggacaaagacttccaaaaattggataaaattatcaaaatatcatattataaatataagattgtaaacatccaaaatttggccaaaaatttaaaatttgatattttagaatttgtatccgaattttgaaagtttttgtctcaggggtattttggtcattttgacaaatttgtacagtactaacggagactaaccggacggcgatagtaaatcgtagaagttaaataaaagtcgatggcatattgtagaacgtgacaaagtcagtggcatataatggattctctcaacattaaattatacacgatgaaaaaaatagtcatttaaacatttttatttttttaaaacacaacaaagatatacattgaaagatgtcgcaattatgtattcaacttcgagcgttaacggattgaaacatacggttttttttcatcaaaatataataatgcaacatctatttataaatatttaattacaacaaataaatagtgtgagtagatcgtagattgaataagtagtttataagaaaaaaatatttaaagaaaggagaagagaataagagaagaagaagagaaactagctagctgcacatgcgtgtaggggagtgttagggggttcgatttgtttctcaatcgggcgcccgagggtgagaaatctccaaatttttaatgtttacttatggtacattttgtcacttgacatactcccttcgtcctaataaaaatgaatctagtactggatgtgacacattctagtacaacaaatctggatagaggtatgtctagatttatagtactaggatatgtcatatcatctaaaagttactatattttaaaatggaggaagtattttaagagctgaggtagattataaaaggatctatggactctggcccattaccacccttaccccgggtcccttgcctcttgagtattgatacccaagtctctgcaaaggtagagctactgtttttaaagatcaagaatcgtagaaaatctttttgcatgacgtgcgtgtgtaactagtttatactcccaatgaatctaggcgctacatcaactttattagaatattatagtactctgtaaaattacttgtaagaatcttaatgtacggaaattgtatatgcttagaaaaaaattatttaggggacaaggggcgaatatataatggcgtgttagagcataaaacttgttaaggatcattaattctggtagctccccacaggcccacacagaacatactccagcagggaaggacaagaggttggcagattaaactaacggaaaacagagaagctacacaaattggcttgtcttattttgtggcctttactgtccagcacttaattatagcttctattctcgttgtaaactaaacacccagttgatcttgatggttctcaaataaggaaatgggcacaaaatcttgagatctcttggaaagatatgctgtggtatttcttcccttccaatcaaaaaataggcacctaattaaactacttatacatattatactttacgttgtaccacttgtcatgcataaactacattttctttataattgcataaactacatactccctgcattcctttttacttatcatcttttctcaaaacaaattataaatattgaaaaagatgatgtattatcgaagtaatttgcatgctaaatatgattattatactatttgtgttcaccaaaacatcataatttaaaagtttttactggtcaaagataaatttacactggtcaatagtgtcaaataaaaagaatggagggagtatacaaaataaatacttgcatatccacatattattcatatataggccttcaaagaccgaaacgtgattattatctggcttcagcctgtaatgcagggatatttgctgaatccagatcgaagaagaagtttgtccagaatttaaaccaaatcgtactagtaatatgcccgtgctaaacgctacggtgcaattcgatttatctttaataattgttaaaatttcatgttagcggaaatttttttctatgatatgtgcatttgaactttaattcaattcatgtcgtacattaaatatatttattttacgtaaaatataataatatgatactgcatgggcacaataaatctttacaagaattaagtatatataatcacttcagtatatagtacgctattatgttacaaaagtgagttattttattatttgttgcggaaacaaaataaagcattatttgcgatctggaggaggtgcgggagagaggctgcagtggttggcgatttgacggaggggaaaggaaaccgagtggtgaccgcgtgcgcgattatttgtgatccctaatacattgcaggggaaatctgttatgtgctgcctactcaaaggcagaattttctaagccaatctcattgtcatccaaagtactactgtcaatgaactgacaaaagaattgatgaaccaaagcagtgacatacttctagacaaacaacttgggcgaactgagagagctcccatggttataacatatggaaactgatcctacaataaagaaaataatttacactgtaatataagaaaacaacttttctgctacttgaggtttagaaactgaacttgaggtgatgtgtttagaaactgaacttgaaaccatggttctggtttgatccacctgaacatctcatggttatccataagtacaaggcaaatatgagtagatggctaattcgctatggagcaaaataatactgaaagactggaggtggaggttaccttctgttgtttttatgtaatgaaatatgtgacacagaagatctcaagaaaagtttctatgtacggataagggctatggcttataaacatgttcatgttttttttccggtttgcaaattggtattctaacctggaccagaaacctaccatgagttttaatattaacataattgttttgcattggaataatgaatgttatgcaaacattatgcagtctcctgaaatgaatcatccgataataccaaagtaaatgaagcagcaccgcatttatagagaaaaaaaatgttttccctaagtagtcctacacttccagttgtaagaaggattcaaacttcagaaaaatcacccttccatttgtattcatgctttaaaattgtaaaattttatcttatattcttttctttttaccaatgctttcatacacttcggggacagacggcggagatgagacgaacatgggtagatgcatggcaacctacggagcggcgacagttagggttgggagatgccgcagcgatgtggtggtggcggtgcgtgtggcagtgccggttggtagtggccacggaggagatcggcgtggtgtcactggtgttgtcctcgactgtcggtggcggcatggagatgtcgagggtgggctttggcggcgccggtgtggccccccgaggtggaggttgccggatgttgtatcaataatccctaatcctatacagcaaaataagaaaatcaggaggaagattacggtggtgcaatgtttcatgaagcttattgcactttgcttaaaaatgaaccatcttggtacataattagccaaaagcttactgaagtcataagttcatcttgaccaaatctgtcaagaatccagaaacagttggattgtcctaacatatgcatggtgatggtgatttcattaatcaaggaatgaatctctactatactgataattgacatagatggtgcatcatcttaaatattctgtcactgccagtgaaaatcgaattttaaggtttgatttctgaaatgtgtaaaatcttaaataaccagatactatatattgttctttggagatgtttagacatgtgcagacagttatgcgttgttcatagacatggatactttagttatcattatctaaaaacatgaattctttagataccaaaacgatgctttcggttttctttcttttgattgattctggattatattaagaaccgtatgatcaaatcagcggcgactgatggggagagaggaaatatatataatactggattgtggattaaaaaaaggagagaaggatgatttctgtaccttaatttcggcgaatcagatcgaggatggggcgacactgttctgaaagcagagatcggtggttgcacggagacggtcgacgagccggagattgggggcggcacgaaggagaccggcgacgcggagttcctggtggagatcgggggcggtgcggaggagaccggcgagaagggcgatgaacggcggagtggcgagtagaggagacaactggcggggtgggagggcgggtgcggtgtgcggcgcgcgacggcggagtgggcgatgccgtctggacggcgggtaggggcgcgagcgtcgggagacgacgggggcggcgacgtgcataggcgtgatgggcgagagaactggcggaggagatggatttcgcgatcggaaggaaagtgcgacgatttcgggggtgcaggggtgagggaaggcggatgctattctggacgtcaaatctcttagggataatctggaccgttgagtgacgaatgaaagaatgagtgaaagtatttgttgaactatagggtagatgaggaatgaattaggggagactcatttaattcggactttactcagtacagtaaacaatgtatggcgacaaggatcattaactagcgaagctattcgctgggttaccctttttgacgttgctctgaatctaccttgggtaacaaacgtgtgtgtgtttagttcacattaaaattaaaagtttggttgaaattgaaacaatgtgatggaaaagttgaaagtttgaagaaaaagtttggaactaaactcggcctgtattccattcacttatagcaacatggagagtacctactccctccgttccaaaatataacaattctagcattcaaaatttatctgaatatagcaactttttcacctacattctcttctcaaccaattataatcttccaccattcaaattctccaccaactttctctttctcaacccatcacaaattttttccatttaatattatctatttttttaatactcgtgtccaagcttaaaactttctatatcttgggacaaaggtagtagctactatctacagggttacaggtccccaacttgtcacacagttgcacttttaggagtgtaaaatatgctggcgatttggtctacacacgtctccaatcccctggccgcacagaaatagtaaattaagaattatgaaaaaccgtcaattagaacgtacttacatcagactaaccccatgcatgtgtttgtttattctcgcagtcaagttgaagcccaataattggcaaacaaatcgacttatgtgcgcatcaaatcaagcatgttaacccaataatatacccacatgcatgaaagcacagaaggtgccatttccatggcgtcccgcaagccagtacaaaacggcactctagatgccgcctaaacagtaaacaattaactcttaagtctctacagcgacaccgatgtactgatgtactcataataatatgcgtgaattcatggaaaaacttggattgtgcatgctgtcgtcctacgatcccgtatgctccaaactgtcgccaacacacttctggtccctaaagctaattaacctcccaagcacatgtcttttttaagactcacatgccgattctttaatcgacgtaatgaaatcgcgctagaaaccaatggaaaggccataggtaccaggaatattgacccgactcaactaacctcatcgcgagaaatttgtgtgccggccggcgtgtagatttttgtagtttaattaattaggtgatgaggcgggcgctaactattgcatgcatccacatgcatatgggttaccaaccatactaaaaacttttcagccactaactacaccttaccgtctccgatctttgtatgtcatgaccaatctcccggccgggatggtacaacttagtagtataaggctattcccaacctaataactaagatggtgtccatagcattaaataggctgccatctaggatgaaaaatgatgtggcaagtgaataaatgagaaaagagaagaaaaccatgtcttgcatgagacatagtttctacacaatatccaagacatcatgtgaaataagtagcattaaatttaagtatggatagtggtgtttgcattggaagagtagtgtctagtactaatttcttgatgatgtagagtttatgaaaattatgtatagtgttttgggttgggaatggtctaatactccgtattgatgtagggattgctcatgatggttcatataaggtcatacatgtggaaaggagccattgggcaaggaagaaactttaaaggtaaaacggctgaagacaagaagagacagaacggtagttagctcgttaattctagaatatttcttgtgcgttgcatgattgtgtccattgcttcgtttatttatttatttttggggacgtgtaacgtccatagccaaattggaataacaaacttgtgagtatagtgttctggcagtgtggggctcgctagctaagctagtttgtggagagcgagctggcttgattaattatcttaattaagaatagcacgttgttttatgaaattaaacaacacattgtcaaaacggggccaaatgatatgttacaacaaaaccttcaataatataagataattaaaaaacatttgataatatgtcatccttgaggtggtattttcagtttatgagataccaaacaaaatccaatctttcgatagtaaggatgtggtgggtatttcgaatcttccccggcgcaccccctatcaagagtaccacatcatacaacttgtcaccgctcttgtccgcctgcattaggatgccatcaccctttacattctccttagtttgcccgcatccgcaacactgttttggcgttggacggcaagggtgctacgtgctcagattcagtcggtgagcttgtggaaggacctttgcatgaggtggacatcgccaacaagctcaaatgtgcgagattggagggaagagcggagcaggaggtgaagattgtcggcaactccaggttgatctggctggctagcttggaggtacgagcttgtatctcgtaggcgagattgggaaagggtcaagcgggaggacataggttatcgacaaactcagactccagccgatccggtgccacctctccctctggcatggatgatcacgttgcctctccgccccccacgcgtgcgggtccactggccgaggcgatgtgaggggcggatcttgcacccttccctcttctacacagatcccgccacctctccacctcccagcccctccagtgcacaaggatccgtcaatggcggtgacaggaggggtggatcctgtgctcacttcccctttcacgcggatccgccagcctctctacccctaatcactccgccctccacatgcgcgggtccaccggctgcggcgatgtgagaggcggatcaggcacccttccacctcccgcgcggatcccacctcctctccacctcccaacccccttggtgtgcaaggatctgtcggtggtggtgacgggaggggtggatccagtgcccgttcccactctcaggcgaatccgccagcctctccgcccctactcgcgaggatccatgggcagcttcaagcgacttaagtacctgcatgcgaaaacacaatttccacatgcaattgctgtacccgcatacagaaatagtgattttcgcagatacctaggtgcaggtgagccatccatccgcctgcgaaaatcaattttgaccagattagaaattcgtttatgtagtagtatgccttactatggatgtcaatatttgagtgtgaagctatatggtgaactctagcagttgcatgacttattggagtttaagtgtaggccttgggtgggggatggggttgagcatgtggtgaccagtggggccaagaggcaaatagtttttaagagatgaaaggcaattaatggtgatgaatcttaccgttcaaaatagggagccataaattgctgatggtcaggaggttgcgagtcccatcagttagccatatacggaataagccgttttggtttattagggaataaaaattaatttattgataattttttatatacgtgtttttggtaatttaaaaaccaatactgaaaaagaactatatatgttgaatatattttaaagtcaatattaaaattaagcttgaaaattcaaattttagctttatctttagctaattagggcatcccaagggagtcctgcaaaacatgcacatagatggtggatataattgatggctgatgctagctgatgaagtgggttagggttgggtagtaattgattgaaactcttaaatggaaattaaaaagaaaatgtagccccaatttgtttggaagtaagaactttgacagaaaggaggatcaaccagagagatgatactcccttcatctacttttgatagtcatatttcatcttggcacacagtccaaggataggtaattctacttatcatccgtttaaacatgctactagtcattcctcgtaatcaaacaattcattaatatttacatttctcgatgcccatgtagccaatcttgtgtggaagaatggagagtcacgtattaaattcgagaaagtcattaagacgataggttgttggattgaaatatgcttatcaaaaataattttttttagatttagaaatatgactatcaaaagtagattgagggagtatatgatagacactgggtcatcggctaccgggccaaaaattgattggctattaggctgtgtggagaaaatgtaaggccgggcatatatagacaattccaactcaattattccctccatctatttttgatagtcatatttcatcttgatacacagaccaaggataattaattctacttatcatccatttaaacatgctactagtcattcctcgtaaacaaacgattcattaatatttacattttctcgatgctcatgtagccaatcttgtgtggaagaatggagagtcatgcattaaatccgagaaagtcattaagagaatatgttgttgaattgaaatatatctatcaaaaataaattaagaggataggttgttgaattgaaatatgcctatcaaaaatatgtctatcaaaagtagatggagggagtataatatttagtaaaacaatatatatgaattttattgacatgtgacaaaaatcaacatattggtccaatctttaactaatgatgctatcatcgcctcatcggagtggaagagactaagccaagtggtcagtaacactctcaagttgacctagatattgacagaaagcatctaaaataaacatagtccgtgcatgctttgacaaaaatggaaatattgtccatgcatgcatgcattcaccgtgccggcgttgtggtcagtgttcccagagcaccagtggctcaccaaagaagaaatcgtcagcatcgtcatcccacggcgaaccgcaataatacggcggcggcggcggcggcaacgtgaacccgaactctagaagagcatctggcatggtgaaatacgtgtagtctagtccagtgccgccgtcctgctgcagtgtcccgttctcaacgatgcaaaccggcgccgtcgcctgctcaggctccgccggctcgggctcgtcatcggcagcggcgtcgacgtcgtggcatggcgtg

SEQ ID NO: 9993 - DNA, 6823 bp, Oryza sativa
actctctctttttttggccttgttttgctgtatttttctctgaattttctggcttgcggattggcagtgtccttgccatgtcctggttactattactgtttctccccgtactattcgacgaagatgctgcttgttcggaatgatatcctgtaactgttacgtaccttgttacggtcattgagtttgcatatgcattcatgttgactttgtagcctagagtcattgaagtttgttgagagagattgtgcgtcctggttgtgagatattcgataaattgtgatatttgtgctgctaatttcgacctcaagttgctgcgcaaattgcagttaactgattaactcattgcctaagctttattatagaacagttttttctgttggactactgatttggcctttgttacagatttgttcaaaagtggtgagaattgacctgttaatttccactgccgattattctacatggaagtttgctgattgtgactgcattgttctattacaatactccagttggactagcatgtgaacccctcatattgtccaactgaccacatgtggatgtcgacctgagttgattttgtccctgttatggcttgttggccgttgcctaagaacttacagtttcagagaatgctagctttgttctgaagaatttgtcagctttctttgtatcctagtggtccatcctttcccctctgttctgagaatatcatacctgtgctggccagattgagcatttttaattgtggagtttagtaatagatattcaatttaatatggtatatgattagttgaagtaggtagccatgttgggccaggaagcttagccattattgagtcatgtaactagcaagagtatataatattatgttattggcactaatgaagttacaactaatcatggaggaacaaatatggacataacaaaactagaggaacattagtgatgttgtaacttataagtaccatgcaagaataacagtggcattattagtggaaccaatgaggtgattaatggggtaataatacatgcatctttcagaaaaaaaatgatatttgaattcagtttgtcatttgataacttaagttactggtagaattggcatgcaattattgttactagatatattttccgtcagctgaaatacatgctctttttgtcttgtgtggtcttgattcttctagtatttatgcatcttcaactgtttctttaggaaagatgatggtgtgaaggtggtctctgtggagaatttgaagaatccttatgaaaaacaagggaacttcaacatgcgattcaagttgactcttaacaagctgtatgcatggagcctagtttcctatgaccgagttgttatgctagactctgacaacattttcctccagaacactgatgaattatttcagtgtggccagttctgtgctgtcttcattaacccttgtatcttccatacagggctctttgtgcttcaggtaggattacttgctatatgggtttctcctttcttctgcaaaatttcttttaactttctccatgtaaggaaagatattagctcttaatctcttcattactaggaatgactatgaatcgacctcctttagtccattgcatctacaaaggcattctgttttgtttagcacttcatattaggggtgatctaactgccatttgataagtaatccttcattattgtttaattaaaagatctatgcagttttgttgccaactggtttactgcaaatcttttacctgaaattaataagcttggttttagaagctgcaagcttatattgaatctgttttcttcctggatattagtctttagctttctgttggcctttctcaaagcacagatgtatttttcaggggcgcgaaacacagaatctacaatacttcttaaatctaaacctatctaatgcacgggccaattgctgttttttttggcacaatattctgcagtaggcaaattcaaaatggttatgacaactcctactttgtgcactcattttttttgtcatactaaccagttgttacttattaatcaacctgattttctctagtccagaaccatctaaagttcatcaaatgaacctgaatattgaaatttatgtcgtcatgaatttttttttctttctattttgttttcagccctcaatggacgtttttaagaacatgctacatgagctagctgttgggcgtgataacccagatggtgcagatcagggcttccttgctagctatttcccagacttgcttgaccgaccaatgttccatccaccagttaatggtaccaaacttgaaggaacatatcgtcttccgttaggctatcaaatggacgcatcttactattgtgagtatcaatagacatatacgaattcgtatgctcatgcattttccccctagactaatgggatatttgttcagatttgaaactccgctggagcattccatgtgggccgaacagcgtgattacatttcctagcgctccatggtttaagccatggtattggtggtcttggccagttttacctctgggactttcttggcatgaacaacgccgtgaaaacttggggtgagtaattttctcagatattttgtcttgcattttatttgcatgattgaattctgatgttaatagaatcttccactaatgcattgcttcatgtacaaaatttgttagcatggatcatggatggtaatatcatccataacagtgtatcatgtgcactcgtgtgattggttaaatgccctttgtgaattgctttctatcttctttagaataaagatgtgtaacaggtcattatcgagccttttacattttagaataaagttgcacaaggcaaggaattattgtgcttctttttttttgtcaggataaagttccataaagtagtggattgcaaagtcttcaaccttctgtcatgttttttaggataatgaagcatataacagtattcatttgtgcatcttaattctgaccagagggttgcctttcctgactatatgtaaacttgatgcaaagcaagtattcatcggagctaccggttgtattaatccaggccctattttacattggagtcattgcagtcacccgacttgcgcggcctagtttgtcaaagatgtgctacaacagaagaatggagaaaagtactatagttttgctcacaacactcagagtagtggcagcatggtccatacttgcagcttacaccatacccttcttcctgatcccacggacggtgcatccgctactaggttggccactatatttgcttggtgctttctccttttcttcaatcgtgatcaatgtattcctcctccacccccttgcggtcctcacaacatggttggggatcatcggtgctctcttcgtgatggcattcccatggtatttaaacggtgttgtaagggccttggcagtgttcgcctatgcattttgctgcgctcccttgatctggggatctttggttaagacaatgagctccttgcagatcctgattgaaagggatgcattcagacttggtgaacctaaccagacagccgagttcacgaagctttattgaggtgtgtattgcagatacatgtcattgcatttcatcagctaattccgattcgcattggctattctgatggccaattcagttgtacaagtaaaaccgcagatgaaactacagttgcacctttaacaccacctgaaacctttggagcccgtgatattcttcgtaattgcgtaggtgacatacagggcaaagggagagaacatagtttgatgtttgtgtgtggggggtgttggttgtggaagtggaactgcagaggaacattatagagtaatttttttgttacttcatttactgctcctctaaaagagccaacacattcttggctttcttgtaattgatatcatcagttccacacgtccactatcatgagattcaggtgttctttgcaaaatgctgattggaaaaagaaaactatgtactaccactggatatgcatttgcctttccctataggggggtgagtggtgacgttgcaaacaccaaagtaataagctttgcaaatatatggcggcacaaaatccaatcgtccacttcagaatgttgtcttgtctcgtcttgacaacgacgttggatacgacaaaggtgtttctcatgggcacggcccagtgatagaggtaactgaggttataggttcaacccggaagaaaccctcctctcaatgtcgatgtttcagtgtattacaagtgtttttaaatctttcccgctctcttcttttaaaaaaaaacacgtcacaaacgcaaacgctcacaacgtttgtgcactcatctctataaacgcaaacacgcacgccccacttttatgaacacctatgaaaaactaggtcggcatatcttgcgcgtgcacacttatccctatcaacgtacatacactatacccttatgagcacctccagaagattgggccgtatatcttgcgcgcatagattcacccctataaacgcacacaggtacatcctacctccataagcacctttgaaagactaagccgacatatcttgagattaacgaaatcaccacagatgcctcgctgtcaacgggtacatcgcttaccattgaaagaataattagccataaatatgaacatccgagtcagctttaaaacttgaacttaggtggctggctccaccacaagggactaggggtgtcaatttctccatcggggcgaccctaaggggccgggggcaaggtggaattctcacccgtgggtagggggcgcaaacagagttcactccctcgccgtccgccgcctcgttgtgccccctcgttggccacctcgtcgtcgcaccccctcctcgtccacctcatcactgagccccctcgccgttgccacgtcatcgcctgcaacctcgccgtccacctcatcgacgactttcttggttaggttgcggggcctcggggcgggtactgattttcgccctgttcatccctcgggggccggggacagggatacccgcaagagcgaggggacgggagcgttccagcctaacccggccccgtcccggcccattgccagtttgcaacccttacaagtaatctaacaagttgagctacgctctattcttttgctatgggttggttacaagggcaaaaccatcattttgctaagcctagcactcgactaatataattttgtaaaatcttcattttttatattttttcaaatgaattttggcctctttgatttgtagagaaaacaacaaatattggaggattttaatcctaaaaagaaaatactaagaagtcttttgaaacaaatgatttaattatattcttcctctaaaattcttatgtaagggataattctatagagatttcagaggaaaattagcaagagctttaaccccttgaaaatatccttgaagtctctcactctcatttgattcttgtgttggtctaatcaaatgactatttctacattcttttgtgttttacaatttgttttgcacttgtatttcttatatttttgttaactagaaaaatacccgtgtgttgcaagttgcaacagccaacaggtgaaggctattttaatttttattattgttatatggtttagttaaggtgaaattcattgggggagttcgtttggatatatatatatatatatatatatatatatatatatatatatatatatatatatatatatatatatatatatatatatatatatatatatatatatatagagagagagagagagagagagaaaatcctgtagtaggagtctggtcgtctcaaattagcatgcgagtttttttttagagaaattttttatatgactccttctgtattttcaaaagtgaacgaacttaaaacccgacccatacacggatgacgtaccaaaggaccgtaaaaaatatctttaatttttataatagtagatatatttatatgtttttattcatctttttttttctgtcaaagggacgacggaaacatgcgcagggctccacccctgattagttaggtaatactaacttgctgtattttttcttcttgttatacatgtttggaatttatagtccatcgagtaaaggaatggtactgtcctagtttagaagtggaacggtacatataagattttcttactaaaagttttatgaacaattaaggacatgttcttttctttaactctaaacttcaacttactcatttatgttagcacgattttcaaactattaaataatatttttttgcaaaaaaatatatgtagaagttgtttaaaacaaattaaataaatctattttttcaagtttataataattaatatttaataaatcgtatgctaatgaactttcttgtttcacgtgcgtaaaaattttccctctaatatgagacgagcgcagccttagttctatttaattatctaatataacgtgttctcatccataccttctttcaacaatgggaaccacgtcatccccttttcctaaatcttaagagccattttgaatagtagaaatagaaaaaacattgaattcatatacgattgtaaaatatggagaaaatatagaaataaccgtttgattggaccgtatgaaaaacgtagaaataagatgaagaggtagactcaaagaaaatttttcaagaggttataactcttgctaagttttctctatctctattggatcttcattccatagaaatttcaaatgatacgataagatttaattctttataatctttattataaagatattcatagaaaattattttaataggattgaaatcctccgaactttctattgttttctataaactagttgga

SEQ ID NO: 9994 - DNA, 9009 bp, Oryza sativa
ctgttcccataaaattactatcatggatgttcattatattggtaggtaaaaaaattactatcatcactacaagaaacttgttaatccgtgatggattctccgtgacggatttacggatcgtcactgacagacatactccgtgacgatattttgtttttcgtcacagatgagcccagtggatattcacagcccacaaactcgtgacggttttatcaggaccgtcacaatgtatgattttaaattcgtcatactctagttagcctagaaaaataaaaaacaatgtatgattttaaattcgtcatactctagttagcctagaaaaataaaaaaattgtagcgcaaagaaaaacaaaaaatatgattgcaagaagaatcaaaatatttgttaaatttgaacataatatttttgttgatttgttacgtgtatataatggtttgttaaatttgaacaaaataattttattaatttgttacatgtgtatgatgcataatatggcaaactaaaaaaatattgtgcgcatgcggaaaaaatcaaaatatttttgttaatttgttacatgtatatgatgatttgttaaatttgaacaaaataattttgttaatttgttacatgtatatgatgcataatatggcaaactaaaaaaatatggtgcgcatgggggaaaaatccgcagcatgtgggatttgaacccacattgagcaggaaggtaggaaatatgttaccaattgaaccacttgttgtagatgtccacttctgcacttatatatttttatttatttattattggcccagcatccctgttggcgtggcccattaatgccattcactcgagttgagttggtccaggatgttgcccacagtgtggcccagcagctggagttggcatttcgaaaatggggcccagcagccggagttggcatttcgaaaagaaaaaaagaactcgaatttgtaaaatagaagaaaaaaatgcaaccaacgagaatcgaacccatgacctactagtagaaggcgccccatcctaccactgcgctagttggtttgatgtgttattgtaggattctgtactctttttgacctgtgtatgtatggaggagtaaggtttcctcaaccgtgactcagttattcagttcgacacccagccgcaaccaatctaagacaccgccgccgccgacggcgaaatttggcaggagcggcgttgccgctgcccaccactgccgcgtcgttcagcaacgccgcctccttgcctaccgtgccatcgcgcatcaccgctgcacaccagccgaacagcgacatcaggcaccaccgccgccctacaacgccatcctgtagatctgcagcaccgccgccctccattgccgcaccaacgagcgatgccgagtgcggccatgcgtccacctggtgacaaattcagctgttgaccggactcctgaagcctcttctcccatctgcctcaacagccagccaaggtaatatcttcttcttcttcttcttcttcttcttcttcttcttcttcttcttcttcttcttcttcttcttcttcttcttcttcgatttagttggatgtagcatttgaattggtgcagcttgctcattgtggtttatctacaatgtttgattagatggatagaagttgggtgcacagcagactattttcccctgaatacattgacggcgtcaaagaatttatgagtttcattcaggggaaattcaatgagaatgttgaaattctatgcccatgtagcagatgccttaatcagaagtaccaaagacaggctgttgtgaagaagcacatactgatgaatggtatggaaactacttatactcggtggattcatcatggagagagcttagatgtcaatgttattgacgatcctattgatatgaatgaaaataatgatggttccacaactatggtgacagaggatgacaactatggtgatcgtttggaaggaattttaggagacctacagactgcagcggcacaagcaagaccggatgtagaaaatcaagttggtgctgaagaacctcgtgataaagagtcatttttgaatattgtcatgagagaggcaaagcgtcaactttatcctggttgtaccaaattttcaaggttctcatttgtggtaaggcttcttcatatgaagtcattatataggatcagcaattctgctttttctgcacacatgaagctattggctgatgctttcccagaatgcaatacactcccaaaatcatatgatgaagcaaaaggcattctaaaggaaatgggtcttggttatgaatcaatacatgtgtgctacaataattgtgtgctgttcagaaaggaatatgagaagcatgacaattgctcggtttgtggtctctcgagatggaaagatgcagaaagaaagaagattccacaaaaagtgttgcggcattttccattggcacctaggctaaagaggatgttttcgaccaaagaagcatcagaagcggcacagtggcacaagttaaagcgacagcccgttgagaataatatgagccacccagctgatggcgaggcatggcaagattttgaccgtgaatatcctggttttgcaaaggatgcaagaaaccttagacttggcctagctactgatgggttcaatcctttttcagaaaagaacacaaaatatagcatgtggcctgtgtttgttgtgccctacaacctagcaccgtgggagtgcatggaggaatcaaactttatgatggctttgcttattccaggtccgaaatcacctgggaaggactttgatgtatttttacagcctcttgtagaggatttacttgagctttgggcaggtgttgatacttatgatgctattactggcaaatcatttaaacttcgtgcagcggttttgtggtgcatccatgattacccagctttgagtactctctcagggcgtacaacaaggggctattttgcttgtctccattgtgacaagcatcctctttcatatgccttaaggagcaaaattggttattttgggcacttccgtttccttccaaaggaacatcctttgaggagaaacaatgagtttactggacttcacgaaagcaatgatccaccaggtaaattctgtacagaagagttgctggctgaattggagagagttaaagacgtcagacctgggaagccacaaggaactgggaaaaggaagcgttccaactctgaagggggtcatgtggaaatttggagccggatggttagtttatggaagttgccatattggaaaaaactaaaggtgagacataatcttgatgtgatgcacattgaaaaaaacatatgtgagaacctaattgggacaattctcaatataaagggcaagacaaaagacacagctaaagctaggcttgatttgaaagatttgggtattaaaaaggagctgcaatttagagaggatggagagatgcctcatgctagatataccttgtctactgaacagaagaaggctttttgtgcttttttacaagaggtcaagtttccagatggatttgcttccaacatctcaagatgtttaaatgctgagggaacaacggtacaggggctgaaaacacatgattgtcacattcttttgcaaagaattttgcccgctgccatgagaggatttctggacagtgatatttatgaagcaatagctgagttggggatgttttttaggaaattgtgcagcagaactcttaacaaggatgtgctggttcaaatgaagaaagaaatccctataattttggtgaagcttgagaaaattttccctccagctttctttgatgtgatggtacaccttgctatacatttacctgatgaggcattgctcaggggtcctgtgcaatatgggtggatgtacccaattgaaaggcgactatatactttgaagcgatatgtgaggaataggtcacgaccagaaggttcaattgccgaggcttatattgctgatgagtgtctgacattttgctctaaatacatggacgatgttgaaacaagatttaatcgggagccaagaaataaaggtttctccaatgaagaagcttatggtgttgatgtttttgggcatggagttaattttacttctgcacctgaatatgtatatgatgaaaatggcattgatcaaatggtgtggtttgtgctaaacaactgtgcccaagttgagtattacgtcaagtatgttctatatacttacttttagacttcttctatatgctacctttgtgttgcacactaatttatttttttttctgcagtttgttcatagaagagttagagacacaaggggtgcctaacattgaaagaatgcttcgacaaggatttcagacctggtttaggaaccatgttagtgttcattgtcaagttatatattgcataatgtaacttctatttttctaatatatgtgtgttgtatgcatgtggcagattttgaagaagtatagtacaaatccagaagaggtggatgttgatatcttctccttggcatgcggtcctgatttgagagttagaaaatactcctcgtgcatagtgaatggtgtgcggtttaacacagttaaccgtgacaagaacaagaagacactgaacagtggagtaatgtcacaagctacacataatggtcagttaattgatttttttggaaacataaaagagataattcagttggactataacttagaggagaggtccgtagttttgtttgagtgtgactggttcaaactggatggaaagaggactgcacttaaagatgatggcttttttaaaagcatcaatgttggaagtttgtggtacaagaatgattgtttcatattggccactcatgctacgaaggttttctatttgccagatacaaagctgggtgaaaattggcaagttgtacagacatttgaccataggcatctttataacgtaagtcagacggaggttagtgctactgcatatcaagaagacgagtgctatgatgaggaggatccacgccgaccagtttctagcattatatatgatacgcctttaaatagagatgatgagcgtggccctgtttttgaagctgctgaaattgctcggttgatgaaagaatctagcaaagaagtgaatgtcattggtgatgaagatgaagatgaagaagatgacacacttatggagtattttaacgaagaagatgactcagttatggaggtcgatagtgacgacgaatagttctgtttgaattttatgttttaatattttgtcgtaaggctcaattagtatttgagaccatgttctacttatttgagaccatatgttctattattttagatagcctcaatttgtatttgagatcatgttcatctatggaatttatgtataattggttcgatgccaaactattcatatccgtttttcaagttttgattctttgttggcctaaatggcatttcaacttgcctgtgtcaatgaaactacagatttagtctctactagttgagcctttatttttttattaactagaaaaaatacccgtgcgttgcaacgggtgaaggaatccgatcgtctcaacttacttagtgtgcgagttttttatagagatttcctatacggttccttttgtatttccaaaagcaaacaaacttataaaccgactcaaatacggatttgtattttcaaaactgaacaaacttaaaaacgactcatatacggatgacataccaaagtaccagcaaaaacatcttcaatttttataatagtagacactttgtgatgggtactagttgagcctaaaaatgtttttaaaaatataatcgtgatgcaccactcacctaggatatgtacagcaccacatgacatgataaaccatgtgcggtgcttcacatacagctctcgccggacatcggggatcgccttgtttggcgttgggcgagtgacctattgtttttagtgcttttagtgcctgattcgactgaccttctttaaaacaatcatatctttttcatacggactcgaaattagacatataatatatccacagacatctacagaaaaagttacatccgattctccccgctttgccgggttcggtgaaattagaactaccaaattccgcttacaaaattatgttttctaggcgagaagctccggaaccccttggatagaactttgaaaaaattcctcatgcttcatcttttgtccgtttgagctaagaatttctatggttggttgcagtgtgctccgagactcgaaaaaaatatcaaaaaaaaaaattcgcatatctctcctcagcactagagagagaaagcaacattgactctgtgcgttcgctccgtaggtttagtacggtgtgctgtctcctcccagctgatcatgttgtgtaacataaactctgtacatattgaagtgcaatccttttgcgtgttcgcgaaaaagtaatgggatcatggggcttgtttggccaaaattcctaattcctaaatttagattagtggaatatgactaataccgatggaataagatagattcaagggaacaaatttgcttcatgcattgttttataccacttactagctagaagcactaattgggaaattatcaacacctatatagttttattaatcattatcaacatttttttaagataataatcatcaacataagggatcataacatgatgaactatgtgtatcatatatggtgcttgtctaacctgattttctaattccaacaaaaaaaattaatggagtatgaaggaatgagacagattcaatcattcaaggggaacaaattttacatagtagcaaatctcaaatataagacttattataatatatactcatctagaaggttccaaacaaaacaggggctttgagttttcaggataaggggaaatcccgcgcgcccaagcggcttggcgcgcttgatgtgcgccagcccgaaatatttcacagtccgaattaccttactacccttaggttcataaaatataaaatatagagaacacttccatcagaaaatttctcaagggtacatcggtaattatgaaacagcacttcccaattcctccaaaaacctagccgccactcatcctccaaaacccatcttccagccgccacccatcttctagccgccacccatcctccaaaaccctagcagccacccatcctccagccaccttatctcaccggcgcatcaaggcctgcccgccgccacgcatcctccagtttcccatcctccagccccgatggaaccctagaacgctgttggaaggttccatccgccgcccgcgcgcccatcgtcactgggaggctccgagcgcggccaccaccagcatcgctgttatggcgccgaagaatccaaaaggaaatcgggtagcaggtatagtcctaacatcacctcgctcttgacttttttgtggcgtttggatttgtggagaagaccggtggatttgggaaattgagggatgatagatgcaaagctctgtttgctggattatagttagaacttccatttgcagtgttggtcattttacctgaaaagatagggtacatgcttctgcctttgcagtaaaaaataggttcacaagatgattcttgttcataccctacagttatacatgaatatggaatggaatggagggggagagagtcatactttgcttaattactggtaaacaaaaatcaaagagtacaataattcatttagcatatggcactttcagtcttgttgacaaattcctgatcagttcatctattctcctgatgcttgtgcatgcaattcatgacaatattttaaacaacgtttagttgaaaggcatctcaaagagccagcagtatatatcatttttttactagcaatatatatctttgagtccactaaccattaataatattccaattcatctgtacctcatccaagacatggtgtgctattgctactcttgtggcttatctattgttcactgagtcagtaacacattaatttattgttgctgtctaccatccaccagttcatctgagtccatacgaattggagcgcctaaaagaatgcatgaagaacagtgcaaggctgaaggagcttggacttcctgatcgctacaccccagttttggaaggctatgttggtgttcattctgaccagaatcaaagtggagattcggagtccgagtatgatcctttaaaggatgatactggtgaaggagatttgattgatgatgagaatgcaaaggttgtaattcctttatgttgacaagtcttaacttgttatttttcttcctaattcaatgtaatactatgttgaccaatccatgcttttctttccagcagtgctctaaggagaagactcgcaagaactgtaacaacaaaacttcaagtatccagactggtggagtcaagtttcggtctcgcaagagagtttatgcagagcaaatgactcctaaagttacaaggtcaaagaaaagcattgcccaacaagatgcaagtctcacaccaagtgatatttgtatgccagctacatcacaagctaacgctggagatctcgatggcaacttagatgaccacacacaggctgctgttgaaggccagttctactgccacatttcttggttacattccattaacatgagtcagctataaaaatgtttaacttgctgatctaagtttattgcttgtttaccttttgaaaatattaacttgagttttaagaataaaaaaaattaatgaaaccaattttcacatttttacttgacaacactcacatgaccaccgggtctgatgctatcgaccaacataatcagcacaaccatatggacaatggaggtgatgaattcttactgtcgttatgtaagttttgtttgtatgatgaatgcttttcttacttgctgcccttttttagatggcttcacccagcatgatgacaacacccttgtggctgatgtagttgatggcattactcaacacggtgaccacaaccagattaccaacgaaggtgagtttgttcatctattttccatatttcatattgtctcagttgatcaatatttgtatgc

SEQ ID NO: 9995 - DNA, 30460 bp, Oryza sativa
caagaaatatgcattaaactcaaagtgagataaagagagaggatgaaaaaaataaagctaaccttatagttaatctattatacatgttagctctaacattgacttataataagtagtgaattgtactattaaacttgctcttagggcaagtactataggcattttaggcatccaagcacagacccaagataccacatagcactaagggcaagtactacgggcatctaagcacaatctcctagtgccacataagcttaaatagtgaggtggaggagagaaaaaatgagagagataaggagccacccctcatgcaagaggcaactactacacaaaattcaagacaaagagagcgagagaggaagagtagatagggcaaacaaatattggggctagtgtattataattagtatagatgtgatatattgtacatgttacctctatatttattagttgatgatgtggtcaagattagatgtaacatccacctcttttataaaacttgccctaaatgatgagatggaggagagaataaagataaaaaagaaatagtcacctctcatgcaaggggcaactcctacacaaacttcaataaatatgtgagattgctagaaatattggggatgtgtggtagagacaatctattacacatgttacctcttaatttaatggtgtatgacatgcataaaattagatgtggtactcacctctaccataaaacttgcccttagagcaagtttaatagtatagccaaatcatctatagtcaatttaatagctcatttatataatatagttaactataaatatactatatcattaataattggtcacacatatcatacacacgtagcgttttagaatccgtgctgcagctggctacaaatatatagtccgcttatcttctctcttttcttatcttccgtaccgcagctggctataaatatatagccgacattatgttagggcctcatcggatggatgtatgggctgaggcttttcagccaaagcctatcgaattgcttattgggctgaggactttaaaccgaattgcttattggactgaggactttaagcctcaataagccaaataagccaattaatggcttttctttagcttaaggagaaaaggtaactttgactattcagccaaagctctaggttaaccgatgagggcattattgtacctgctcttaacgggtcccagcaaggccgactccagagatgggcctacagaaatggtcgactgtacagtgtacacatgtgtctagtggttactcgaaataaagattttgtcgggtggtgataatgatccacttatctgtgctcggctagttgtacaagtaggcatatttttttttcttcaaaacagcacaaatacatgcacttgtataaacatacacacacttattattcttaatacacacactcacacaagagaacacacgcacccatgattcttatgtgagtgtatgaagattgaacttgaatatcctgagatttataaaatcaccatatattacttgatatttgatattgataggtacgttggctatcagtgctataaatacaagatgatttgataggtggcaaagcgatagcgctataacgaccgtgatcaccttaacaaatcatcttagttgccttatataaggcgcttcatcgtgcatgtgaaagtcaaagatgtatgtatgcgttgtgtaaagggccagagaggtatctttggaagctttgtttattaaaaaaaagattcaatggtttaaataataggttcaatggttcgaagggaaactattttttattaaaaaatagtatgttcaccgttttagtttaaattagttaatatagaccataaaatgttaatttattgagtatataatataatggtgtagtacattatttgaaaataatagtccaaagtaattagttccctaatttaaataaaaattatcttatattattattaatttaatgggtaaatatagtggtgaaaactttattaataaacattgtagagctaattaagttacacattttttaaaaagttttatgatgatataatctttataaaagtatgattatttaaaatttagagtaaattgcacccacggtgcaacaacttggtaggtgggtgcaatttagtgcaataacttgagaaatgagggttccagtgcaacaacttggtaggaaggtgcaatttagtataagaactttataagtgatcgtataaatacaacaacttgcaagtaggtacgattttgatacaataaattaagaagttatatgataacttaatttttttggagcattttaattttttgagtatttattttgacaatattctagcatggatttgtataatcatatttatatatttatcctaataactaataactgaaagttaataaaactggatgtagaattattatatttcggttgatatttgagatggtgaagaaagaaaaaaaatcttaaagttaattggatgtaaattgtatgtgcagtataattcttaaagattaaattcaatattataaggtaatatccgtaggaatattgtgtaatggcatattgacatcgtgaaaaaactcacctagcatatgcttagccaagttgatgcaccaaaatactataaattgtagttcttgtactagaatgcacccacttgtcaagttgttgtactcaaacatttaattcgcaagatcttgcattatatcgtacccacctgccgagttattgtaccataggtgtaatttactctaaaatttattatcactattaatacgtgtatccatgaaaaaaaaaggagaaaatgtacgtatgtacctacctatgcaacaggagaagaggtcgaatttttcccatctaaacacatgtggccccctaatttcaaatgtgagcacgtattgttcagaattcttttctaatcgaattagttggtacaaagcaaatgatcgatccatcaacacgtgtagctagtaaattacagtaccgtgttattttttccctccttgctgatgttgtttctatgtaaaacaaattaatatttgttagcacaaattacaattttgatgatccaaacaaatggactagatttgagcttaccgctgccgttctaatttcctaaacgaaaactcgagactgacggcatgatgacagggtgccctatctcgtaatggttgatctaacctattgctaatggtatttgggttttctttttcataacaaacagtgtcaagtaggcctaataaacaagctgctacgagcaagtgatttgtcctaacgatcaacagccctttagtttgttactactccctccgtcccgcaatataagagattttcagtttttgcttgcaacgtttgaccactcgtctttttttgcaaatataaaaaacgaaaagttgtgcttaaagtactgtagataataaagtaagtcacaaataaaataattaataatttcagaaaattttgaataagatgagtgatcaaacgttataagcaaaaactcaaaatcccttatattatgagggagagggagtacattttgttgcacatcaagtccgatgggacgaccactgacacacagtcacacacatgagcttttgatttcaaatagaattccagtcattacatgctcacatttgaaattagacggttgcatgtgcttagatgggaaaaattcagggaatgcctgatcttggtcttcgacacaaacagcaggatccgatccccttttagttatttggtagagccaaaatctggctctaccaattctttggtaggattagacttcatattatattgttggttcgctagcaatatcctcaattggtacatggtgaagaaagtttttgagtgttgccaaattgaacgtttgggcattttccaatgatttggctccaatttaaactaactactgtttaagttgttgaacaactcatttgataaatttcggtttagatccaacgcggtccaaaaaaaagttgaggattgggctttacttgcacgaaaaaagttactccctccattccaaaataagtttattttgcatcccatctgtttatcccaaaataaattcattttctagtaatcattgcatcggagtttgtaaaagtatggataaatgcaatgagagtagatataataggaaataattacattgtgattaaataaagttggggtattctagattttttattgatatatgcaatatgagtaaaaataaacttagggttgtgttcgctgaggtaggttgagaactcattctctccgcacgaaaaacagagtggtccattagcgcgtgattaattaagtattagctttttttttcaaaaatggatcaatatgattttttaaagcaacttttgtatagaaactttttacaaaaaaatacattatttagcaatttgaaaagtgtgcgcgcggaacacgagggagaggggttggaaaccctgagcaaagaacacagcattattttagaactaagggagtacagataaagagatgcttgctcaacaccaaattgatcatctcacgggaccaggagtgcacaaaaagtggaaatttgtattatattgaattcggttgaattaagaaagggcataatcgaaatcatttctttgatatgccatatgctttacgaaactgcatacacatcaagaaatgaaaattgcatacatgcataatacaactaccggctggtaggtatatataaaaagggaccttggaaaaccaacaagaacaagttccccatctgctaagcctggctacgtgatctatgaaccatcaaattcttctagcagattgcattacgcgtactatagttatagaccttttgtattgttttggtgcaaacccgcaagagaaatctcgctcgtatgtaggcacgtagtaagctgccctgccctgccctgtcctgcccatctctagcagagaagacaacgaccgagcagggcagcagccagcatcacccactgattagccgatcgatcagcgtgtcatcccagggtacatctccggcgccatggtcgccgccgggttttgcccttgcttctccatgtttgcgtgccatcctgcacaaaaccaacgaaatcgtcatcgtcacgatcatcaacacgcacgacagccaaccattccattagaaaatcgatggctatgctataaacatattttaacatattttaagaagataaaagagtagagagacgagcagtggactacagatttgtagccagctgcagcacagactcaaatacgcaatgtgtgtataacatgtgggaccaggaattaatagtgcagtagataactattgtatcaattaactattaaattaattataaatgatttggagttggtagttggctgtactgttaaacttcctgttaccgaggctcatgtcgaagccgcgcttcttgagctcgcggtactcctggcagagggcgcagggctcgcaccacaagtggacgaggcagtcggggcagggcgtctcctgcaggccgtactgggaccgcagcttggagcggtagatgcaggagtagatacagctgcagcccgtgacgagaaacaccagcgcgtacagcgacccgctcgtcccgcacgacgacgacccccggtcgacgatctccgcgatctgcccgaacgtgatgcacgggcacaaccacgtcataaaacctgcgcccgacaacaatcgatcagcacacacgtaccacgccaagcagagaacacacaatcgtagcccggcttgcttattttacagttgctgctgtcgtcgaagcagtcaaagaggtcggtggaccatgggacgggggcggcctggtcctgcatggcgaagggtggtggtggtggtggcgcctccaccgtcctcctccggcttctgagtatatatatgctggcccgacgtacggggcgccttcgtcgatccctcactctccggcccgcgagggtgaggctttctctccgacgaggctaatgatgagcgcgcggtgtggtggtacaagtagtagagggtaaccggccgaatcgcggactggtcgtccgcgcgcatttatcgggcgaggccgcgaatgttggcctatcgatcataattttaaggacgtaactacgcatcgggtgctcgatttaacgctaaaaatcgggtgcccacccctacaaaacatcagctaaactggatgcatgcacaaagccatgcgcatatgcaaagagacatgcaacaagcatggaggcactcaatagctgtgcatgcaaagtacataactatatctctcactcctagtattaataaacaacttatttaacatgctctaaactttttttcttataaattacttatctcatctgtgatatgattacaccgttatatttgttacaattaaatatttaaaataagatctcacacgactatattttaaattaaaaattaatatataaatatataactaattgaaacacatttatattatatatgaaacattaagttgcaattgtttaaacatcacaaaaaactccttgaaaaatatctaaaaagaatatcacatgcaacattccaaataatttagtgaaacatcacaaaatacctaccgaaacatcccaaaaaacacaccacgtgcaacattctaaaatacacaatgaaacatcataaaatacctcctcaaactcaaagaacaccaagtgcaacatttcaaataaagtagtgaaacatcaactaaaacatcacaaaaaatacttcttcaaacattcaaagaacgctatgtgcaacattctaaatgacctagtgaaacttcgcgccgtttaagtaatccattgcaacaaaaaaacatttaaaatatttttgtcagaatataatcaagtaagattttattgtgaagaattaattataacaaatacaacagtgtaatcggatctcagattattagataataatctgtgaaagaagattatttgaagttatggaataagaaagtataagtatgtagtaggagcatatggatacagagggtgaacttaattgtacacgttacatgtatcatggcatcaccaatatatatagcaaaagtgattcatatagataggatccacataaataaactttaactataacaatcctcacaatgtatatagataaaaggtagcactaagagaagatagaagtagagacaaataatattatttattttatatgggtagcctatatggttttcttttttactttttagtcctttttttaaattaaaaaaaagacctttacaaaaaatatttctaaaaactgaatcttttggcccgattggctgccacaccagttgcacggtgtgacaaagttatttggctggccaaaaggttcagatttggaaatatttattttggaaggtctatttttaaaatttaaaaataaaaaaatattagtccatatgcatatgggtatcttttgttattttctttaaatggactagttgcataatagtattaggtggttgaataaaatattgtattgcctatagatcacttttgcaccacattgtggatgcccttaagtaggagagaataaaactacactctatatgatttttgatgggtaccggctcaaaagcagtggccttgatcttctttcctggctggaaattgcagtcatgaaggcttatctcccgcttcttattgaaagcaaataataagatcaaaacagattctagggattgcgttcgttggcggactcaacctgacatcttacgacatgaactgctcccaaagagggaggcctaaatatagtttttttggatggaatctttggcgtcagcctataggttttctggtttttctaatttcttctttggcggaatgtgaaagattaccctttgatttaccagaagcggaggaagaattagtagcaggttatcaaaccgaatattctggtatcaaatatgatttattttatcttgtttcttacctaaatttattagtttcctctttatttgtaacagttctctacttaggcgggtggaatttgtctattccctatatatccttttttggatttttccaaatgaataaaatggttggaattttagaaatgacaatgagtatcttatcagaaagataggcggacgacttgaccataaggtcggatgtttccgtgagcagtaagctgcggatctccccttttttgggggaaagctggtggcccttttggcgtgttaattctttcgacggggtggccttcttcgttcggtagatccggtcgaggtggttttcgtttaccagcgcgtaggtggtctaagttcctatgaccgagtctttctggcccctgtgaacatattttcttaatgtattaaagagggcctctctaaccggtgaaaagtggtaggtgtccactaacggctattcctggctcggctccgataacgcaattccgggaggagtcggtagttaggcacttgatcccttcggacctggagaacgtgtgacactgggtcggggtttggtgaaccaacaggtcgctcctttagttgaagtattgggcccctttttcgttgcctaggttacaccttcggaataccccagacggggattgagctctattccccccaatcttcactttacgccatgccgactctccgtcgtggaattagaccaagggtcgaagacccataccataggaccccatcccccgtatcttatctttcgcgcgtaggagatcgagacacagccttagggctatggggaaagtagatcgattgctctagaattacaactacatagagggtctctacaagtctataaagaagtttaaaaaaattgatagacactgtttgatggtgcatgctgcatgcaacacataaccggagtaggaggacgtccgattttttcaaattgggtcgaacacccgaccttaatcgttctcctaatttttcaagtggataattgcatttgtttggactctcgctgaaccaatcatgatgcagtgcgggcctggtcgcgcccacggtgttcacgtgggtggcgcgggctctgcatgcgggatagcacgacgggtggctacggttgtacaagcttcaataaacggtttggagtcagttgcaatacaagcttcaatacaagagagacgagtaaattaaatattaatatattaataattaactattgtataaataggctattaaattgacgaagctagtagttagttatattatattattaagggactaactagctgtcattcgacaaattttagtatagcttaactggttagattctttgtggtggaaccagcccacccaggtttaaatcctagaattgacatgggtgctcgtatttacgggctatttattctttcagtggtaggtaatatacccgtcaatagcgaggcacttacacgcatcaataacttaatgggcttcaacctaactggaccaaccaacggtgctcacacgggctaaaaaaattataacaggcccatggtcaacttcttttttatcacaacttattacaatatatctatagtgtaattatattgtaattataccataattatagtgagttacactataatgataatgtaattttagcttgtaactaaattaaattattcacttgttcgactgacgaagtgcatgttctagcaattagaattcatatgccatcccacaaaggcacttgctggaagattttgtcagcctacagtagcctagtgttggtaacttttttttttttggcaagaagataatcataatcgggacacttaaatgtcttacagtgatataaagtcgccaaccaccccgatatagccaaaggctaaatcaagatgagttttatataaagaaaagctaaaccggctagcggagccgatttagagatcaaaataagcctctaggccgatttagatcgatatgaggataactacccatctcgtgggtgaactgaaggtttacgggacaaacctatagaggggtaatcgcactactctcgcagcgacggcggacgatttacagcgcaaatcgacaaagatgtagtaaaacaagaaagtagaaaacatggctaaaagtaaagataaaagaacaattcgattgtgttcgggggggggggagagatatatcaatcgaaccggtcttgtcccttaaaaaggggttggtcttacctcctacaaatcctcctccacgtccaactcgggatagaaaccaatggaaatccgaaatataccttcccgagtaaggaaatccgagacccgacgaaaacaaactcaggctcggactctaccggtctgaccggccacacactgccggtcagaccggtcctcaagcaacgatctgaccggccaacatacggtggtcagatcggctctgtagaggaaacatgtgatatttccaaatcttgacaataatttcttaatttgaacctaggtgccaaatttgagtataaacaaaagaaaacttatgttctgatgtggtaggcccaagaaaaaaaggtgtcatttgaagtaagaaatctatcgacaaatttatagtaaaaccgtatgattaaacttgctcttaagcaaaagcgacgtcatcaatgaagtttacggatagtgcacgaacaagactcctctgacttaagtcagatgtacatagccactaacgtgtgagcccataaagatagtctcccctgtcagggaccatgtctctctgattttaagcctgaggagatcgctccggtagtacaccagtgtgcttgtactatgggtcggtactttttttggcgtgagataggattgatctgctggctggtgatgttgatcgaggcgtcgtccgcgtggtggtgctgggtggggtgtggctccgtgtgtgacgggggtcaagtcgtcgcctggaccccagccgccgcccgcgactcggcggcgagctttggtttgactggccaagccttgtttctttgtgatccgcgggtcgagggagtcgcttgccagagtccaaaaggacaccgcgatttttgcgaagcaccgcgcctggtgagtcagacagtcacgcacgacgagagggagttgtccccgggtcagattggcatgggaatcgtcggtcgtcttctctttaccttaacctgatttgagtgttccagtttcactgcgcacggtgcgagaccgaggtccgtcgaaaaacgtcgctagctgtttctgttggccagtcacggtcaccaggggaattcgcccagccatatatggcttggcaagccggatggcaactccgttgtagtgcgtttttttttatttcataattagtaaagtttagcttcaggaatgggatagagagacggttagagttgctgcataaatcccctgtgatactgcaaatatattaatattaacagcgactgacatataggccaaccgaaccctctgggtaactgcacagctgcagcctacaccaccaaaataacattggctgtgtttagatccaaactttcaactttttccatcacatcaacctgtcatacacacacaacttttcagttacatcgtaccaatttcaacccaaacttccaactttgaaaggaactaaacacagccaattatagatcacaacatgcgcatgcgaaacttccatgttgcaggcacgacgtccacttcgcacacggtaaaggcgcataccgatgctgtcatgcctcaccctcactctttttgaacaaggaataattaattatttgccactcttacggatggtgataaatgatttaccactggacccacatgtcatagacacgtaagggctcacatgtcatagacagcgagtggcaaataattaattgccacatcttaaaagtggccaaaagttaaatgtccctttgaacaaaagtagagcacctgaaactatgaaagcaacagtacagttagcaacttggcactcgactgcatgtccacaagaaaccgtaagccgtagagtcacctttcagtgaactacatagctctgtagtagagatcactgattagttcatgacaacgaaactgtacctgtaattcttgcagactgaagaattgacatgaagaaatgtttccattcacgaggctggcagcaggctcagtcagttacaaaagacctaagtcaacaactggactaagattttctttactgttttccctacaaagctgcatacatacagatcaaagaaaggccagcattgcagttctacccaactatgaacatatggctgcttgattggcaacatcgtgttgttttgaaggccaccatgattgctggggcacttcattcttctatatttcagaggctgaaaggttccgtagatcaatatttagaccgcaggaagttccagaacttttttgttctggaaattgcagcagcactttcgatggaccgacaaaaatggtcaaatatttaacatgcaattcaaatactcgaggtatttggcaactgatcaagccggctgttcagtatttggtgagctcgcgcacttcggtattgcagtcgctggtgtagtgcttctgacatttgatcaaaaaaatcaggatcccatctctgaattaaacggggatcctcagcatagcatatgtatatcgatgtaactgcactttcgacaactacaacagttaccccaacctgaaagggggaaaaatcaatcaactcaacatgatccaacaggggtcatagtagagaagtcctgctgtgtgactcctagcaatattctattgaatttgtccagtaagagaaatccttgtttccttgtaaatttcaattagattttgcatgaccataagaacttaccagtatcatgcccatcagcatagaggttgagccaaccataatagctttatcactttgtttaaaatatgtccaaacacccgtacatgttcctgtaattaacccacctaaaatggtgctcatcagaaggacagcacctgaacagtcataagcaacaagtgcttcaacgccagttgattggaacaactcccaagcatccctagctgagcgattgaaactctggccattgatagctatctgaaagtgaaaagtatgtgagacatttgtgcaagcccaataggatatcagtaatttgatatagtaatatccatacagtgatattgattcacaaagcatacaaattggtgtaacatcaatccaggtaaggtatcgggtatccatgtgcactttgacagtttgtatagtaaagttgaacttattaatagcttaaggaaacatttaaagttctatcagttcagaacataaatgataaagtggcaaacacatcgaacagggacagttttggcattggcatgagattatcaaaacttccacaaagataaaacatctgtcactgacctgtacatatgcatatttgttgaagaagcgaacaagagtttccacgatatgaaacaaaaagtcaacacagcacagcaaacactcattgttgcctattttagaacgaattcctcgaatctgaaaattagttaaaaaaataagaaaagggaaaattaatattttattgagagaatgacaataaaacatggtaatctgaaaatttcatgcggcgaaactctgttaaggtaaaggtacaaacctcccaacgtaaagtcctaatagcagccgtaaaaagtgatccatagcaaatgctcccaaatgaagttgttacagcgtactgaagtgattttagaagtggttttgggggcatcgatgcagcagcttgaccaccatgaatgagaacaagaaaaaccatccctgatactatgacatggactgtgttactaaggacagctccagtccaaaataaactgactgagaaaatctacagattacaagtgaaacaatcagaaaatatataaagaataggaaagacgttgaaattcgatatagaataaacaaaacttgcccgctcaccaaaagagcccaccattgccctccattaggtatgtgaaaagcaagaatgccagacactccaaaggaccataatgccatccaacaaagcatgactaacacaaatgcatatgctatcctcatcacatcaggaagttcccataccattcttactgccttctgcaatacaagcattgtgaaggggaacctagcaaaaaccaacccaattaatgccattggagataaacggggtatgtatttttgcagcaaatataatgtttatgagaatagaaggggttatttctcatgattttagcatagaatggaaggaacaattttagcataagaattccttatgaaaccaaaccagatattttcagggcttaaatagttttcttccacagacagccatgacatgcaaaaaggttgccataagacatccatgttaacacctaatgttcacaacaaacttttaccacctacaaagtttgtaaacctagctaaattctgtgagttgaagaaaaaacagttgctgtcaaattttccactgataacatgccggctgatattggatgacaaaatatcaataatcagtgggaacatttacaacctacaaatatagtaataatactgtttgtctgtttgatactggtttgggacataagctgattattgcagagtaatctatagaatagttgttttgttgaagtgacactgtccattaatgtaattttgcctaaagatctggttttactcacaaaagcaattattttcccatatatacaacgttatttgaaaacaggttatcaaactaaatttgcacattgcattgtatgatgtctctggcaaataccaaaaaaggaagcttgaactgtatttaaaaaaaaatgcttgaccagtgggtttaagacagcccgtgacattcaactaagttgagaaaaatcccccagaccgcagttgagcacactcaacttctcgtggggagcacgcttctaccagtgcctgcgaggggggatgttttttgggcaaaacctgggttcaagcctgggccggcatcccctctactggagtctctaccactgcgccgcaagcgcgtttacaaagcttgaaatgtacaaaaaaggattgtggaaaacccattccatttatcacatttcaatgttcagaagttatttagatattcattgtccattggtaagtttcatttccatcatggtgtagagcgcactacatggataaaacagaaatcaatagcatcttgtcctcatgtacaatcctactgggaaatgtacagaatttgtaaacaaatgtacatcaataacaattaactccaacaattcaaacatgtacaatcctactgggtacacagaatagcagagacaatctgcaacacctgcttaaatcttactccctctgcttttttatttgacgttggttagttcaaacaatatcaagaatggagggactactatgtacgcacgcaccaaaagaatggcatgatccctgacattgtagtttcttgtacatctttacagcatttgtaggcactaaagcctaaaagcaacactagcccatgcttaaaccgtgtgctaccatccaaatcaagttaactctaaaagagtgtgaagaaacaaagcactagcattgcacacccatacatatgggtgcacctgttggtaatgggaaccgacatggacacgcgccaacagcctagtaaaattcttataaaagagagctgcgcaattcatcgatttctccagtggcaggaatttagcttctgtcggtgtcagcatcatatgaagtatgaaccctcacctactcaagtctaagtttgcctcgaattgcatacgatttctaattttgtgcaggacatttgagaagacaaaaagggcagttgctgtgcattattattacctatcaagaactgacatgacgtagaggaagtgcagcgctccgccgacggcgaacgccacgccccagaagaagtgcttcccccagaagcagagcacgctgaccaccgcgaggtaggcggtgaggctgtgcacggcggccctcatgaccaccctccccccgtccttcttccccgcggccgccgccagccacgcccacgcgagggcggtccccacggcccccgcggcgccgtagtagggccagtacgactccgtgagctcggacttgggggtgacctcctcggcctcgagcgacggcggcgggggcgcctcccgagcgggctccggcgacccggcgaagcgaggcgcggcggtgaggttggtgaagcggtcgatgttgaagcggtccgcctggccgaagcggttgagccccgtcagcgcgagcgccccgccgaagacgagcaggtggagcaggaacaccaccagccagaacacgtcccggcaccgccgcctcggccacgccgccgcccccacccccacccccgccgccccagccaccgccgccgccgccgcaggccccgcggggcaggggctagggttcgcgctctccccctccgacgacgacatcgctccccgccccgccccgccggagatcagcagcagcggggaccgcaccgcaccgcaccggagcgagggatcagccgcgagcggatcgcggggaggaggccggaagcggaggggatgacttggaggagaagaagaggatggggaggaggagtaactgctcggcagtagtagaagcgaggcagtagtaaccgtttctggtcatcgacgacggcgacgactcgcgctgaaactgtgagaactgggaagcgatgggcgatggcgacgtcgcggcggtgtggggtgtttggggatttgaggggaaagccggggaatttcgggggttttgctgttgggtttggggggccgggcggagcgcgaccggcaccgcccccttcctccgtccgtcgctgcgcctggttggttggctttgtggattctagaagcagcagccagcatctcaaagcaagtggcagttgggattggagaaggcgaggccttggtggtggcgtggtgccagttcggaattctgatgcgccccgctgcacgagaggagattccgcgacggcaactcccaacttcttcgtccgtcgtttcgactccccgattcggcgattcgctaccggggatccaaatccatatccacggcgtttgtgttcgtttaacctgcaacgtttggcaccgttcgaacgtgacaccgtcgatctgtcagttactctcggtgtcaccgtcaagaaactacggtgaagttggaatttttttccatttttaaattttttatttttaatatttatagaaatattgtaccggcgaaaatttttacaaaagtataccctgccgagggcggcagtgtgacatgagggacgaacaagataaaaaaaacctagaaaaatgcatctttggtagggcgaaaattgcatttgcccctttacagcccttgcagaggacggcaagggacctcagtgcaaaatgcgcacaccttgccgtccttcacttgggcgacagaggccatttctgtaaatattttggatggtataatatttttgtaaatattaaaaaataaaaattttaaaatgaaaaaaattcggtgaagttgatgtgacatcgatgggccgaagacgagacggttttctgagccaggcctactactgggcgaattctggagaacggcccactggagtactctctgtctctctcccactggacagaccgggctcaacgcagacacggaacggagccagccatggtgaggtcggggcaggcgtcatgtgcccctgacacctgggcccccccgcgacatcatcctccagtcacgtcgtcctcctccacctcgggtccccaaccttttcaaccacacccacccaacacgccatgatgagggcagcagacaagtgggtcccaccaaacagtgtcgacgggtagatgcggctagcagccgtaacaatccgggcccaccttatcaccaacgcggagtcacccgagcccacatcgcgtgacctcactgacatgtggggcccagacggttaactgccggtgggaccacggaaacagagagggcgggggagaggtggggccaaggctccacctgtgcgtggaaaccttttggactgctttggtgtgcccagctttttatgggggcaggagcgcgtccggaaatagaaacatctcgccgaatttgaactccacctgagcacaggagaagccgcagccactgaggtaaactgctcctcctcgccgatttcccccctcctttttctctaataccaaattactcgagaaattgtgttggttcggtccgcgggtagcgtgattcggccagatctggcgtctgtgtgtgtggagaattcgagggttttgtttgggtttgtggggggagtaaatccggacgaatctgtggtggtttgggggggaattcggtgtgtgtttgagttgatttgagttcgtggatgattccgttggatattgataggtcctagttctgatccagaagtggcggctacgcctttgctgtagcctcaccgatccgccgccgccgccgccatgaagttccgctctgattcgtcaggcggcgacgagccccgcgctccggctgccggcgacggcggcggcggcggcgacgagccggccaagaggcagcggaccgatccgtcctccagttcgagccagggcgaggcctcctcttcctcgcagccgccaccgcagcagcagcaggaggagcagcctccggaggatgcgggagagggcgagcagccgagggttccggatctcggggaggacctggtgttcgaggtgctgcggcgagcggaggcgcggacgctggcggccgcggcgtgcgtgagcagggggtggcggcagctcgcggaggacgagcggctctgggaggccgcgtgcgtgcgggagtgggcgaacctcggcttctccgagcggcagctccgggccgtggtgctctccctcggtggattccgccggctccacgctgtctacatccgccccctgcagtggcgtggcgccggcgtgcccaggcaacaggggaggcggcagccgccggtgaggttgggccgggaccaggttcagctctcgctgtcactgttctccattgggttctttcagaatatgccttgtcctaagaaagacaagggaaatgacagtgataagaatggagggggccaatgcgggtagtcgaatttgtggaataagcttcactccaacaagcatcatcctaagctaccatggcagttgccctattgttcacactggtgatgctagagagtgttggagagacgaacaggaaaatcggcatgcttgatttgggacatgagagaaattaagtggaattgcaagatctgaattggttcggttgtgttccgcacttgtaagatttatgtgatagtgtcacatggattgatggacgttgagtgctatgaggacagttgcgtgaatgctgatgacaagtgatttacttcaagagaagggagaaatggtttgcaattcgttctgctgttgctgatattctagttatcagctattgtgtcaacttgatatatctggcccaagagcagtatggactgtgtgccttcttgcgccggtaccaagctttagagggaaagctgatgcaaatagcttttgtttgcataacctttttcaattagggaaacataatttcccatattaggcatatggagaattatgtgaggtattgattgtttgtacaaaaataaccattttattcttgaatattgcattttcacatgttaactaaggttcttaagttgatctgactgccatgtacaatatggagcccaacaaggggtagtgacacatatttctcaacttcagtatgcaataagtcagtcattttatatgtttttacatgtggagctgcggataatgtgacaaacttatgtaatcgtgaatgatcttttgatgtttctctgtttttctttcatgtagtttgatataggattcctttatctggcactattgaagttttgttgtaaataatgttattcttgcaaagattatcttaaatcaatcatttctggatctgaagaggtattgtaacaatctgaagctttgcacaaccaattgcaactaaacttttgtatttcttagggtgaggacttgaggttggtgtgatgggcatttagctaactgaaatttctctcaaacctcacagatttgaccttctgtttctaccagaaaaacacaaacagtgaagatgtcgcagcctgctgagctttcccgtgaggagaatgtgtacatggctaagcttgcagagcaggccgagaggtatgaggagatggttgagttcatggagaaggttgctaagacagttgactctgaggagctcactgttgaggagcgcaaccttctatcagttgcttacaagaatgttattggtgctcgccgtgcgtcatggcgcatcatatcatccattgaacagaaggaagagagccgtggtaatgaggatcgttgcacgctcatcaaggaatacaggggaaagattgaaactgagctctccaagatctgtgatggcatcctcaagcttcttgactcccaccttgtgccttcatccactgctccagagtccaaggtcttctacctcaagatgaaaggcgactactacaggtattacaatagttcctggcatagcagtctttaatttctatttctttatattgtcaagttcatgtgtttgaatgtatgtgtttgataggtacctcgcagagtttaagactggagctgagaggaaggatgctgctgagaacaccatggtggcatacaaagccgctcaggtggtttccttaacagtgaatttgttgttgcggcatcctgtttgtttgtttgtgccattttgcaattttgattcggggtattcagctaaagttatttgtgatgtgttctcctttggtctgttttgtttttctgaatattgttggtgataaaatctttcaggatattgccctggcagagttgcccccaactcatcctatcagacttgggctggccctcaacttctcggtgttttattacgagatcctcaactctcctgaccgtgcttgcaatcttgcaaagcaggtttaatttctactgcattctatttcattatttgtgaattggaggaccatatggagttgagaagatattttgaagtttataccattgttgtgaaatataatgtcttagtaattgggattgaacaaataacatgtatgaattagtaatacacctggaacaggttctacttagttctgttagcaaatagcaaagtgtaggctccttaatgcaagtaagctgaacgggttaggtgcattgtcatgatggattttcttcattaagaatacttgatagaaaatgatgaatcaaataagaggtgtaagaaattatagtttacagttacagatttgcccaccttgaatacttgagtgcttctaaataactgatgaagtccgagcatcactatggccattgtgacgtggaacaagcttgtctcaatatggccatcgttcattcatagaggcctaccagtttgttctgtaatttgttaataatagatatctgatgtatatagaatggtttactgcagacaagtttgctataagttcactgctttgtccatggatataattgatcttggacttggagcacacattatgtgccttactttatgaaacttgcttgtgctagtacttatatttgccatcataatagaatgtgacagtaacctactttatctcaggctttcgatgaggctatctcagagctggacactctgagtgaggaatcctacaaggacagcactttgatcatgcagcttctgcgtgataacctgacgctgtggacttccgatatctcggtattttcttcgccgctagcatatatatttgcacttgcatcatattgtctttggaatcatcttaaatgcgtaaattccatgtgtgcggcttcaggaggatgctgctgaggaaatcaaggaggcccccaagggcgaatcaggagatggacagtgaacatgatcgaatgcgtgcgcccacaaactagaatagtgacgctgcaaatgtgctgtgggttatcgtttcattttatagattgtaatgtctcgtgatttgtcggaaacaggaggcgctccccatttatgttgtgctaggaaaccttgcagctgactcgctgcttggctggtggattctcgagctgcactttctttggggggagcctcagggtggaaccttcatgtcacttattggatcgattgttttcggtatgtcagttgtgagccttatctccagagtccacagtcctgccaagtgccctgcttgagtgtttttggtttcttcgatgtaaatcccgttgtgtgcacgatggttcttgattcaccacacattgttgtctacattgccaaaacgtatgcttcaagtgcccaaaaggccgaagcggtccgagaaacattattctgtcaggtatgtgtgataagcggtttcatatgcaacaatgctgtagggacccaaatgttcactggcatcatgtacagatacttgtagtaccaaaattagtttagcagatataagcaccagtggtgtggttatggccttatggattattacgcacacacgattatgccatcactagaaatttagtgactaagatttactaatgacttctgcgtccactcaacgtacaaatattgtagttttctagatgatttttttattttctataagactcatcaaaaaatattatatttgataggatcccttgaaatttttagttgtgtttttcatgagaatgagcaactaaacataactaagcataggggtgccttctgcttgaaaatttttatcattaaaaaaatggggttttcttcttcaagtttgaatatttaatttctttcttttttctacaacattttaaaagttggcactaaagaagacaattattatgcaaagaagataatacatctatttcaatcctaccagaatggaaagctctggaagctgttaaatctttttttccctttttttaccttgcttccagattgtggccccgacgatggtgtcaccttttctattttcttttacatttggagcttaagcatctctattgttttatttgagctccgattctagagacattcttagcatctagaaaatattttttattccaataatgtcattatttatttcatattttattatattttctttattttctttcctaatttttattttgcaatttttcagaaggtgatgtttattttagtagtagtattgttgaaggatctagatgttaccggtttaatttattgagaattagtatagaagtttctggagagactataagctgcaagaaagcttgagctctgtggcatcttttcttgctccatttgtgttttttttttcacaaaagagtctatcatttatcttggaagctagatgcgccaagtgaaccaatcagctggctggatctccaaccagctttagaagtatagctccgttacaggttataagacgttttgactttggttaaagtcaaactatttcaagtttaactaaatttataggcaaatataataatatttataatactaaattagtttcatcaaatcaataattaaatatattttcataataaatttgtcttgggttgaaaatgttactaattttctctataaacttagtcaaagttaaaacagcttggttttgaccttgaaacgtcttatagtagtttttttttatggaaccgaattctggaaggagtaggttgtaaacagccgccgtttgccatatacatatccaaatcgcaagtctcccgccatcgcattgcccgccgaaatagcctccctgcacatcacgcattcacgttcgcacgcagagccaggtaaaacggtcactacccgccacgccggcggccggccgccgcgccaactttgcaccggtttgatgtaatgatgtgtgcagtggtggaggcgccgccgccgccgccgccggacgagacggagggccagcaggcagggggcgacgattcgtcgggcggcggcgaccggcggagaggcgccgccggcgccggccggcgcgtgatcgccgcggtggctttgggcggagcagcctccgtcgccgcgctgcttcacgttttctgatgatctcgcacggcaacaggccgatcaattattattattattatttttcagcttctttagactgtcagtgcctcccagtaatttagcggtagaagatatgcaatgtggcaatgcaaatgaacggttatcgatggttaatttctttcgacgtaaacatgcttatcgatggttaatttcttcatgtaatcaggtttagatgagaccttgaggttgaatatgtcgttcggcttgtgatgcgaacatcccagattcaaaaacatcaagcaaaagagctatagtttcagccaagaagtccaaatgggaagcatcatcagactcgctatatttccctgatttttcaggtaccacaactcgcagctcaggttttctagctctgatcaataagaaccagatacaacatacaaggcacggtcggaagcaaaagctagttttcttcatgctggagaagtgactcaactaaaagcttccagagttcatggattggatgccaaatgtttacatcggctgcagattaatttccatggagagccacgattgttctactcaccttaacattctacggctcttggacgtcagatacatataatacacagcaattttttaccttgtaatgaatcgatttttgatctcattgtggatggcctaatggctcgacagcggttctgaagagaagaacgtagaccttgtcgacggagaagtacaagaagcctcccacagagtgggtgacataggaaccaaagcctgtaccaacaatgcagtgccaagcaggaccatatgttgcgtcgaattcctgcaagaaaatgaaaaaccacattaacaatggctaagacatttcatcctagttggctcagtgaaaaataatgtaaaacgtagtgttcaaaaggaaaaataataatacagtagggaagttgctacaaactttaacctaaggtgcaaccgtgcaagtgcaaccgatattctgagcattagcattctgtagtaaccaaccatccatatgagaaccacttgtacatagccagtttaggagcactgagaatcagagcttacagacatgcactctgaacttttttgtgtgaaccttgaacaagctgaacaacagaattcgatggaaggtgctgggaaatatgattggcaattaggactaaaaaaatgtgccctaattttcatctgcctttcagggatatctaaatttcatatagttttttttttcatgtgatacataaatgcctgatgaaaaaattatttcaagtagcaggtgcctttgggcatgagtatttatttaacataggaggtttgctataaaagtatcattcctacaaaaggtgtaagactgcagaaaatcttgttgggtcaagcggtcttctgacttcagatagggctgcaattttgtaagtaactcttcttcttaatacaatgatgcgcaaatcatttgtgtattctcagaaaaaagactgcagaatatgacgaagtaaacacagaaatattcttttgcaccacatccacaggtaagagttaagatgttgataagttagcacgttgaggttattaagaaggataggcagacctctaagtcgaactgtcaaagtagtcataagtaaaagcaaaatactgttacttcttctagacaaagtattttttttattcaggcttctacacaaggaatgcactttaccatccattattacattgttttagccatatgttgacgaccaatgctaacaaatagcactcattcacaaaattgaaaccttgaatgaaaaccatctaactacaaagcaaaatattgtgtacctagatggcatgcatccattttttaagcaaccaatttgcgtacctctttagaggatgcatttagttaatctaccattgagcacacagaagtctagattgctctcagattcttgtaatcaacaaatttctagaagatctgttccacattttaatgctcaggtaatgagctactccggctaaaatataaaatcagacaaagcaaaaggatcagatggtgtgaacaacaacatatatgaatgggaaattctgttaggggaatggcgaagaatgaatcttacaacacaggggtaaaacaaaagccagcttctgagcttcacgggtcacagctaacaaatgctggatgtcacatgtgttaggctaagctgtcacaattgcatttctggtatatgattctaaagtagcttttcccctatccaatgttgggaccaaatgataacacatctctaacagaaacagaaaattttcaaccatagtcactttcttcaagatatcccttccagttatttataatagagatgctggcattgcacctgtctatctatttttgctaaactagcctcaaagacatcgttttccttttcccattttcctgtttttaaggttcccatcactagccacctccttgcttgagttgtgaggctatatatttcttgagaaaattcccaatatacccctgaaaatttactcaatcccttcaatacccctgaatttgacatcatcccttatatacccctgagttttcattttgatctcctctatacccatctccgttagttgatcattagttgaccgttaaatattttaaaataactatattacccatcctatacaatggtacctacctaataaattttcatatgaaaaaattaacttatacaaaatacaagcaatataatcatttaatgcccaacttaaaaaataaaacttattattttttattttttaaaacttatgattaaatccatacattagtttcaccagaaaattaagagcaaaaactaaatgttatttaggtttaaattttaaatttgttttctaatttgtgataaactaattacatcccctttgttttttcgcaacaaatcttttttcactaaatatttgttgaaaagtaattttgaaattttatgcagaactttttttacaataaatcttttttattttaatgaaataattttttatttttaaaaattcataacaaatatttagtaattttccttattggttttcacaactcaaataatttacacataaaacatttctagcttttaacaatataccaaggacaacaaagtaatttctacaataactaacggtcaaactaatggtcaactacggaatgggtatgtaagggatccaaataaaaactcaggggcatataagagatcaaacaaatctcagggacgtagaagggattgggtgaaattacatgggcacgtagggaattggcccatatttcttgcccaaatttctcaatcccccaaccatattctttactactccctccgtttcgaaatgtttgacaccgttgactttttagcacatgtttggtcgtttgtcttattcaaaaacttttgtgaaatatgtaaaattatatgtctacataaaaatatatttaacaatgaatcaaatgatatgaaaagaattaataattacttaaattttttgaataagacgaacggtcaaacatgtgctagaaagtctaacatgtgctagaaagtcaacggcgtcaaacattttgaaacggagggagtacaaatttaccaccccaatactgcactgtgccactgtctacgtgtactcgaatagcttgaacaaactgtagccaatggcgagacggatggttttaccttcttgagggcgagggcgaggcgcttgctgtcgagccgcggcatggcggcgacggcgtcgaaggcgaggcggaccgcgcgccgctgcatcgccagcggcatgtcggccgcgcgcacccggaccgacaccttcctctcctccttccccttctccatctccttctccttccccttccccttcccagcttggccgccaccgccaccccctcccttgacctccctcttctccaccacggcggccaccgccgccggcttcttggcggcctcctcgactcgctccggctgcggctccatctccagctgcagcttcgtctcgggctccgggggaggcgtgggcgggggcggggcgagcgccggcgcggcgtggagcttggtgcggcggatgagcgagctgaggtagcggctgcgctgctcgagctcctcggacgccggatccatggcgggcgtgggcgtcggagtcgtcttctgctgctcttccttccagggtgcggggacgcgcgcggggcgtcgtgctcacctgaggcggcggcggcggcgagcgttggtcaccatcgctgcctgcgccgctgcgcggtggtggggggaatggaaatggaagtggccaaatgagaggtcgtggtcaaagcacaggagaagtagtagcgccggttcacgagacgaggcggtgtggggtccgtttcccctggccttttcccgatggtgattggtgacccggcgaatgtggtgagcgagaccggtttgaaactttgaactcctaacgaacgtggtgattcgttgaggccttgaggggattgtcgcagaaatagctacattttgtaactgagagtactccctctatttttcaatagataatattgttgacttttaaatatatatttaattatttatcttatttaaaaattatgtgtaaatatataagatataaatcgtacttaaagtattttaagtgataaaacaactcacaacaaaataaattataattacataattttttaaataaaatgaatggtctaacatagaaaaaaagtcaatagtatcatctattagtatgtcattgtgaactgtggagttgtttcgagctggcatttttactttatgttcagtgctactgtgcgagcaacacgaatggatacagatcaggtatagttgtacttgtatggattcttatcggaattttagctcttaaatttaacttgaagaactagttcgaagtggagttgtgaagtagttgaatcgcgctctatatctttcattttgtgggaacactccagcagtccaactcgagcattatttaggacttgtttagtagagctccaactcttaaatttagctccaagagttgagtctggagtggagttgtggagcttcctaaacccatctccacctttctagttcattttgtgagagcactccacccagcttcgctcccattttaggtggagctggaactggttcattttgtgagagcactccacccagctccgctcttattttagatgaagctagaactgctggaactggttcattttgtgagagcactccacccagctccgctcttattttaggtggagctagaactgtttggctggactctagctcaggaaaggtggacttggagctagagctgtgacaaacagattctcagactctagctccagaaaactgtttgtttcgactctctggatgagatgagactctgctcctttgtctccggaattctcaatttcaaggcttgtttggacatccgagtgtcatcattgcaacagcgctcatattttctaaacaagcacagaaggttaccaaagagatactctctctgtcccaaaatagctctaggattgaatttagtttggaacagacgagtacaccataaaacaagttttcgatgccagtatgctccatcagtccatcatcgaacttccatccctcaagagttcccagaataaacattagcaatttaagatcacataaaagccaaatggcttcaaaatgtagactaaactacgatgggtaaagaaaactgggctcttctgacattttgcctaatcttgtgcataaactacataacattgcttaatctcgtacattaattacataaaagaaaatcaacagcaagcaaatcataaaccatacttcttcccccaattaacattaagtacataccagaatcatggctgtgttctccccccccccccctccaacccattttcccaacccacctctctcattttccgcgcacgattttcaaactgctaaatagtgtgatttatgcaaaagctttctatatgaatgctgttttagaaaatcatattaatccatttttcaaaaaaaaagttaatacttaattaatcatgcaataaaatgagcttcattttgcatgccaggagaaggggttcccaacccctcctaccgaacacagccatagccacatccaactccgtgtttttgagtttcagaaacaggctttactatttgttgtgcaatgtgatctaaagcaaaattcgtcacagaaggcaaagcccaataactaactgtaataaacgttctcaaatataaatgctctcaaatcaacaacagtgacagtcttactactgatttagactggaagtttggaagctaacattccggaaaagtttcagatcagtaaactcggctagtaacaatcttactgagtactgaactactgaccatgctaatgccactaagcagcacactacaggatttgaattcaatgccatgctaccataattctattcatcgcatggtcctcaacgatcggagtagtaatatactccctccgtttcgttttatttgacaccgttgactttttaacacatgtttgaccgttcgtcttattcaaaaacttttgtaaaat

SEQ ID NO: 9996 - DNA, 39164 bp, Oryza sativa
acacacgcgcccgtgaaaccgcgagagtcggctctgataccattttgtaacgtcccgccttcccccaggccaagcccgcttacgtctgatagctttcataggtcatagactaccctcacagaccaacacatgtcttttctgcacactttgtcctcactcgtgtgcacccgggaagaatttccgggtcggtcacccatcccaaattgctccacgccaagcacgcttaaccctggagctggagttctttggagattggcttccggaaaagaagttgcaacttgttgatatgagtattctattaatcctattaagccctagaccgggatgttacatgaatgtatataatcctactattaatatatatttcgatctaagtgatttatactgtctcggcaaggcgaccgatctatctcaatcatttgatttaagtatatatcgatataaggattatatatcattaatatctacagccgatcgagtagatttagttctggtttgcttattgatatttgtcgatcgatgtacacatgacaccggcttgaaataaatgatgtgtcatcggcacttagccgatcggctatcatttataggattaattgcggtttctttgttctatttcttgttgatttcaagatcaaatcaactagcacgctcatacatccgaaggcgagctttggacctgcactggagttaagcagatctcccaggcctcgtgttttctgtcaacagaacccaatacaagattaattaaaattcaaagtaaaaaataaaataatattcaaaattagaaaaattaaaagagagttcaagtaggaatacaattttgaaacaactgagattgaaaaaaaaagaacacaatacgatattaattaaaatttgaaaaaaataaattctgaaattagagcaagaaaaataagatttcaattaggaatacaatttataaataactaaattttttgataaaaataaagattattaaaataaaataccatctaaaatatatgacgagatatattaagtaacatgactataaaggagtagagtggtggcggttgatatgacatataaaaattgttaataaaacaccaaatagagtctaatgacgattaaaaggagagacgtcagggaggccgtgaagcaaacgaataagacggttgccgggacttctagaaagtaaaaaaaaataatttttagaatcacaatgacaataaagagtaggtgacagacgggctgtagatcagggacacagtgacatcgtttggtggcacttctaaaaattattaaaaataaaactacaagttcaatttttaaaggttcggaacttctgaaaagtaaaaaaaccaatgataatcatgttcgattttaaaatcaaaatgaaataaagaagggaggcagcgggcgagccgtagaggattacaatggcaaagccgctaacggtttggcgggacttttaaaaagtaaaaatgaacttaaaacgataattacgttcgatttttaaattctcaatgacaataaagagataagacagtagacgtgtcgtagaggagtataatagcaacgtttgacgggacatctagaaattataaaaatgaaacccaacgtgacaataaactctaaaaactataaaatccaatttttaaaggttccaataagaatgaatagaaatagtggtagatcgagcaatcaaataaagaagaagctgagacataaggggtagcaactagtgtgacttttaaaaactatattattagaaacacgatgatgataaggtttggtctttcaaattcttaagacaatgagatagatatttaataaattttaagtaaaatcatacttaaaaaaatatatgattttgtttgggtgctagccgcgcaattgtgcgggccacccagctagttatattattaagacagctcgaaaagaaggcaccacgttcgctgtaggggctaaaaattcccacattaatcggagaaaaagaaaacaaagaaaaggagagtctaagtagaagtataatctaaaaatagctgaaattcggaaataaaaataagcaatattgaaagaagtttccatataagaacccaatacgagattaaccaaaatttgaaataaaaataaaatacaatctaaaattagaaaaggaaatgagagtccaagtaggaatacaatttaaaaatagctgaaattcagaattaaaaaaagcaatattgaaagaagattccatataagaacccaatacgagattaatcaaaattcgaaataaaagtaaaaaaaatacaaaattagaaaaggaaaggagagtccaagtagaaatacaatttaaaaatagctgaaattcgaagtcaaaaataaggaatattaaaagaagagtccatataagaacccaatacgaaattaattaaaatttagaataaaaataaatccaaagttagcaaaagaaaataaaagaagagttcaagtaggaatacaatttaaaattagctgaaattcggaattaaaaataagcaatattgaaagaagaatccatataagaacccaatatgagattaattaaaattttaaataaaaaataaaataatatccaaaattagaaaaattaaaagagagttcaagtaggaatacaatgttgaaacaactgaaattgaaaattaaaaataaaaacattaaaagaacacaacacggtattaactaatttttttaaaaaaaataaattctgaaattagaaaaagaaaaataagatttcaattaggaatacaatttataaataactaaaatttgtgataaaaataaagactattgaaagaaaagaccatctaaaacacatgacgagataaattaagtaacaagcctataaaggagtagagtggtggcggttgatagttgatacgacatataaaaattgttaataaaatatcaaatagaatcctaatgacgattaaattgagagacgtcaagcagaccgtgaagcaaacaaataaggcggttgccgggacttctagaaagtaaaaaaaaaccattgatagtaatattcgatttttaaaatctcaatggcaataaaaatgagaagcggtgcgcggggtgcatataagtaactcaattttttgataaaaataaagattattgaaagaaaagaccatctaaaacacatgacgagataagttaagtaacaggcctgtaaaggagtagagtggtggcggttgatacgacatataaaaattgttaataaaacacaattgccgcaaaggaggaacgtcaggtaggccgcgaagcaaatgagtaaggcggttgccgggacttctagaaagtaaaaaaacaaaccccattgataatcatattcgatttttaaaatctcaatgacaataaaaaggagaagcagcgggtggggtgtataagagtatagttgcagagccgtcgacgggacttctagaaaataaaaaatgaattccaacgatagttatgttcgacttttagaatcacgaggacaataaagagtaggcggcggacgggttgtagaggggcatagtggcattgtttgatgggacttctcaaaattataaaaaatgaaactacaagtctaatttttaaaggttcggaacttctaaaaagtaaaaaaaacaatgataatcatgttcaattctaaaatctcaatgacaataaagaagggaggcagcgggcgagccgtagaggagtacaatggcaaagccgctgacggtttggtgggacttctagaaagtaaaaatgaaccaaaacgataattatgttcgatttttaaaatctcaatgacaataaagagatgagatagttgatgggccgtagaggagtataatggcaacgtttgacgagacatctagaaattataaaaataaaacccaacgtgacaataaactctaaaaactataaaatctattttttaaaggttccaagaagtatgaatagaaatagtgatagatcgagcaagcaaataaagaagaagatgacataaggggtagtaattggtgtgacttttaaaaactatataattaaaaacacgagaatgatatggtttggtctttcaaagtcttaagataatgagatagctatttaacaaattttgaataaatcatattaaaatagataattttgtatgggtgctaattgcgcgggctacccagctagttcgattgaattgctgccactaagtgttactatacaacattctcctctaaaagaactatatatatttctccaaaagaaaaaggaactatatatgtaccatatgtacaaacattcgagtggccgggcatgatactcgctactttgctaggcacgttgcgcacgtacagctcacgctcaagtcgtacacattatggagtagccatttgacaaacgtacggatgacacaagacgaatatcaaattgcgaattttcaaagcgtttctaaccaacacaactaccttgtgagaatagtttatccaaacccttgcggctgcgtgatcacctccttcatgcaaggacctccgtaaagtccacaagtatactcttcgatcccacacacacatagttgacatacacatcaacacatgtacaaattcaagttgccacgttcacctcaataatgcttgggtacacataatttgctaccacgtttgtgaccgctaatcttccctataaataccaaccaaatcaaatcatcttaaaaatcaccgagcaatctccgcttaacaatcccagctacctaaccgattgcccaacaagaaaatagcaatggttagccggggcactttcgtttttgccgtcctagtggcgctaccgatactgtcactccccgtctctggctacgagcagaactacactgccggcagacggagcaccatgtcgctgggcagaggctacggctggtcctccggcggcgcgacgtggtacggcggcccgcaaggcgacggcagcgaaggtaattaagtcgttgtcaagtggtagtatgaactgcatgcatgtgcgtatttgacctcaagtactcacgttgccatgttggttaattaatccaaatgcaggcggcgcgtgcggttaccagagcgccgtcgggcagcgcccgttctcgtcgatgatcgccgccggcgggccctccctcttcaagaatggcaaaggctgcggctcatgctaccaagtcagtagtgtatttgtatgttttaccagtcaaatgcatgggacgtggagcattcctaactaaattagatgtacagattaagtgcaccggcaaccgggcgtgctccggccgcccagtgaccgtcgtgatcaccgactcctgccctggaggggtatgcctgaacgaggcggcgcacttcgacatgagcggcaccgccttcggcgccatggccaaccgtggcatgggcgaccgcctccgctccgccggagtcctcaagatccagtataagaggtgccccgccattgaatttgcaaaattatttctggagttctggtccactctgcaatgtacaagtgcagatttttactgaatttttacttttgcctgcagggtgccgtgcaggtttgccatgaacgtggccttcaaggtggacgcgggctccaacccgtactacctcgccatcctggtccagtacgcgaacggcgacggcgacctcgccgcggtgcacatcatggaggcccgcggcggcggcgggtggaaggcgatgcagcagtcgtggggcgccacctggcgcctcaactccaacaccgggaagccgctgagcccgccgttctcgatccggctcacctcgggctccggcaaggtgctcgtcgccaacaacgtcatcccctccgggtggcaggccgggttgacctaccgatccaccgtgaactacgccgcctaatgcggcggcgtcgtgcgcgactacgtacgcgcgtgtttgttaacgtcgccgcgatagatccatcgcgaggcagaagctcgcctcgtcgaagtgagttcggtgtgtgcgcgtccgggaatcgtgcgcagccgcggtaaaagaggagttcgatctgttagtgttaagtgttcgtgatgtgtgttctccctccgtggccgtttgcagagctgcttctagtgacgtctcttgcttggttataacttaaccgaattctgcgttgcgatttgcacttgtataattgcgttgacatggttggagacatcccgggcctgccccaaccggcaaccgtagctcggttttgacgagcccggccgtgtgacggcctctattcttgctctgttttagctaccggcataatcgtatgcagtaagcgatttcttattttccaacgtccatatatatacatgatacgtcttctgttctctgccgaatcagcttacgtcaatctatacgccgtgatctgactttgccgagatggcaaccgccgaaccggatactacatatacctctcgttggccacaaataagggcaacgacaccagtagttgcgatccaagtcggggaaggcccacgcgctagtcattctaagaataagtccattttccatccctcaagtttacaccgagtctacatgacacccataatctccaataccagaaattatttctgaccccctcaaaccttcaaaaccgtgaaaaattggttccatgaaaatatagaccatatttcccattgtttttgttgacgtggcatacggtggggcctacttgtcagtgtgtcgtcagtgccgttgtttgacaaatcaacagcaaagaccagtttccggcgagcacgaggctgcaggagctggcactggtggacaactggccctccggcgagctgccggggttgttcggctgcctctctccctccttcctcctctcttccccttgttctcggcctctcctcccaaaccaggtgaggctagctgagcgacgcagcgacggagatggcgaggtgagcggctcggagatgagggacggacaaatggtgaggtgagcggcgcggcaacagagatgatgatgaatggcggaagaggcgtgatgtggtggtggcagccgctgctgtagccacggcagcgagaaaagtggggtggaggtcgaggcggatcagggacgatttcttcgagggccttcgaccgcccgccgccgtctccactcgccgaaggagagtgcacatcatccacatctccccctctcccaagtctgcacactaagaccacttgagacgatggttgtgcccgtcgagggctggcggctggaatagctcgctggggaggaggttgtccgacaggttgagaaggtggcgggtcatgagctacatgcggtgagacagagagggggaggttgtcagctcagcttccatgtgaggggactggaggcgggaaaggggcgacgtggccgacgagccccactgagcttgagcttgctcggcattggtgcaagggaggtggaggtgggagagggaaggggagactaccggtgagcccctccgcgggggctcctcaatcgactgcagcaggtgctcctctctctttccctcatctcccagtgacaccaacgacaccctgacaagtgggacctccatatgccatgtcaacaaaaaagggggaaaatgatctataccgtcatgggaccaactttgcacggttttgaagactaggatcaagatatctggtattgagggttagggatatcatacaaactcggtgcaaagttgagggatgacaaatggacttgttcctctattctaatacgaagccttctccattccgaaacagcgctattacttgagcccagaagacccaagttgagaaaaagcccaacacatcagcaccccgtccctccgccccttctgtctccaatggcagccgcgccgccgttgtggccccagtcgtccaatccctccacggctccacctctgtgccttccgtgctccggcccagctcaatcgtacatcattgcagctccacgcttgagatggcatccccatgtgtcgacgtttgatagtcacgactagggtatttggatggtatggggatcgttggtatcagggtatgtgcgagattaagataaaagagatggagacatgaatttttatacaggttcgggcctcttatctgacaggtaataaccctacatcctgttagccgaaaccagtgttgctctttatttatctggatcacacaaatacaatatttgggataacctatatagctgccatcgtcttggcttatgtgtatgttatgtcttgtggctttgtggcgtgtccccttttctcctaggggggcttgtatttatacccataagtgcccccttgtccaagtaagattaaggagataaatatggatacaatccgagtagtccttcccgttttcatatagaactctatttattcttccttatccggaactctttttatatacgaggtttgtttccgtataagacatgatatgtggtgggtcctgccgagtttagtcaactactattagatatgtggtatccataaccatgacaccatgacaccatggatgttacatatcttcgttgaaccatagcttttgttattatgcttagtcctttatatgatgtgatcgttcatgaactttttgaggaatgtaaaagagtaaatatgcattaccggtatacggacttaagttagtgtattaacttataatacgtttgttttgggtctgatacgtctagacaagttgtttgttttggtgaataaacctttttattgtgtaccagacaatttcattcaccaaacatgcacttgcttgaaactagcttatcccttcattccaaaatataagcatttttagagttggacacggttattaagaaagttggtagaattaaatgggggagtgctctgactggagaataagtggagatatgtgagaaaattgaatagtggaggttgtgattggttgaaaggagaatgttaatgaagaaattattatattttaggacaaattctaaagactaaaagttgttatatttttggacgaaggaagtacttgataaatacgtattctatttgcaaaaatagtgtaaatcacttatatactgaaaacctgaaaattatcgttggattaaaataaaatggacataagattcgtccacgtgcgcgtgaacaaatcttaggcgtccatttttaatctaacggtagttttgaggtttcaattatatatgtggtttctgctacgtattatgacaacccccccccccccccccccaggctgtcactctgctctctaacattactctgtcccgttcagatgatctttgtcctggtcaccgtaagcaagtgaagagcagaatgtaaaacatgcttcaatgaaaaaaataataaatctcgcaaaactatatattggtatacattaaccaaactatcgaaaaaaatgtaattttaagacgttgaattacaaaactttagatttatcactaaagttatcccaaaccaaaagtatcaaaaaatacagatttagcaacaaaattatcctaaaactacaagtttagcatcatattaatcacaaaactataacatttatagttcaactataaaatatataattttatgttaactttaatattaaatctatagctttttatgtactttaaatatgtggttttgtgatatggtgccttaaatttataattttggatagtttagttaaaacacctatagtttcatgaaatttatttttaaaaattctctagtaaacacatgcctcaatttgtttaccatccgctcgcatgagcactgtcgcaagccatggccgattgattcgatgtcccagagtggaatctcttggcaaagatcatgctgtacattatcacgcctgacaataataaacaaaagctacttgtccagtgggagagaaataccaatatccaatcaagatcaggagttcaaaaaaaaaatctaagatcaggggcatgataactttgatcattattatcagaaagcaaagcaaagttctgctttattcctgcaagctttatgtgcgtgcatataccaaccagacatctctttccaaaaaatgatcctcacaaatgaaataaattaacctttggcaactttaattattttcgatgaagcagcttattgcaacctaacctcatcattctgcaagtagtactgatgatgaagaaaaactatcagcagatccatttttatatcctctctggatcttcatgtcaacacctcgatgccgctgtcctatgagtacccaagaacagtattcccactgatcatccaacctactaaaatagtgcaaatctgtcggcagaaagggccactcctctccagcaactccaagaaccggttgttacaacgccgcggccattgtcgtctcctgcatccatcggtcgcttcgacgtcttaacagaagttcccattaccatcataaactagcttatcaaccggcaaggcaagactaaaaagatcagaggcatctgttcttcacttgcccacaagccacgcgtctcgccgtgacacaagacgccgtacctgaacagcaggtagcacgtacgcgggaaaagtctcgcatagttaaatgtgtacgggttcgccgggcaccgacgcgataattcgccactcgcgcttgtttttccctcataaatccagcctcgtcgatcacggatgccgcccccaaccgcagtagtgcagtaccagccatcaatcagatctgcccctggatgcatttgtcgtccgcttgatcataaataagctcgggtgatcgggtcaggggcctcaatggaaggtgcctgaaggcttcatctccgtgtctcgatttgttttagctccagtttgcgtgtacgtgctgagtttttttatgccgatatcttttgtttctttgctccttcctcgtgtcgccttcagctgttcagttccgccattgttaatagcttctttttgcccccacgcttgcctccctctggtgtataaagtgtctgcatttgcaagagttctctgtgtacttgtgtagcataggttttgtgaagaaccaagcttttgccattgaattcttcaggagatggcgtccactgagttagcgtcggatgtgtacgcgctcccgtgcggcgacgacggcacgacggcgctgtcgacgccggtggtcgtgtcggtcctcgcgtcgctgctggagcggcacatcgcccggaacgagagggaccaggcggcggcggcggacggcgaggccgcgaggagggcgcgcgccttcgacagcggcacggtgctggacatgagccttcacgcgttcctggagcggttctcccggtacgcgaacgtctcgccgcaggtgtacgtcgtggcgtacgcgtacctggaccggcttcgccgcggcgacggcgtgcgcgtcgtgtcggccaacgcccagcggctgctcaccacagccatcctcgtcgcctccaagttcgtcgaggaccggaactacaagaactcgtacttcgccgcggtgggcgggctgaccgccgcggaactgagctcgctggagctggacttcctcttcctgatgcagttcaggctcaacgtgagcgtcagcgtgttccagagctactgccggcacctggagagggaggtgagctacggcggcgggtaccaggtggagaggtgcctcaagaaggccctcgtctgctccggcgaggcgcaggcgcagcagaggcaagcggcgtcggcggcagcccagtagacgtcagctccggagccgccattcgcgcgtgatctgccagttgcccgccacaggcggccggcacagcagccgcacgatttgatcgccggcagctgccactcgagtgcccagaaagatcaaggatgtaaatagttatggtttgctcgtgtacttaggataggagtaagaattgtgcaatgcaattgttcctctctacctcgattggtaaaagaactgatgcggggacaagtaaaattgattttctttcatgttgtcacgaccgatcaactttgctttccggcaaatcaagtctttaaaacgctaacggaatcgatagcgacaaggtagcgagattacatcaaatcaactccagtagggaccaaatatgactaccaattaacactttaccttaactcatggtccatgccaatgggcgaacatagcacgcaaaattttctctgttgcgatatgcgaatgcgttgtcggtgcacattaaaaacttttcggataataagagttatttttaatgaattactcgacgcagcacagcttgcaagctgcagcaactcggccgcccccacggcagcgtacgtacgcggcggcccatacggtacgggaaagggttctgtgcaggtgcaggatctgatttctggcaacgcggatgcccctggtccatggaccatggctgagtgaggagaggactgaggtccttgtcagcattccatggcagcatcttgtgacggaaataatttacccacagactagagcgatgacaaagctttgcccgttcttggagggcaccagtgaccagacactatatctgacgagatgaaattgcccagatgcaggaaactacgtggagtacatgaggaacatttcaggcgagtagctctgggcagctgacggggagtcggtgtgggggaataggatgagcgtgcgacggcgacggcaaagaatagaatcgaggcagcgggacgaatggaatggccgatcagctgcgctgtctcggcccacattcggaggcacgtcggctgtgaatctgtgattggaataagttggtcccttaattttcaaaattcgtcccttgaccataaaatcaggtacaatgcatcatccaacttacaaaaccagtacaaacgagatccctcagtgatactatccccggcttcgactgacgtgacgcctacatggttcatttgactactacgtctcacgtgacgttggcatgatgcttacgtgacaatttaatatgggtaataaaaaaaagcatgagcccacatgttagttacaccacaaaacaattaaaaatgatggggcccatgtgggccccaaatgtcatccgcgctcctccggtccacccttttgccctctcccctctctctcctctctctattcttactcatcctcactcctcccttcttccatctcccctctcttcatcatctcttccaaggtggcggacgggggtgggggtgggggtgggcagcgaggagaatggcggagcaggcaagcgaggcaggtggcggacggagctaaccgatggtgggcggcgacctcaccggtgccttccctcttcgaccgtgcctccaaggccaccacgctcctggtgctcgtggtgctcttccgcattatgacccccaagtgcgtagactagaagtggattccgccggttttcttcttcatttgttgtctctctgttacttccaaagaccaaacaaaacatgggtaggaaagagaagaggagagaggggaaaatttgggagccctagatttcgacaggttggctatagtgagggggagtggatgtattggcgcgcggatctggtgggtgcaagaggttgggtggggcggtgagatctatgtggcagggaggagacgagaggaggaggaggggagaagggtgagaggagaggggaggcggttgagttgtcgttgtccgcggactccgtggtggtgatcgtggtaattgtggcggtggtggggcatgtgctcatggcatggtggaagttgaggtgcgacgcggttttggagggaaggaggtgtggcggctcacgcggctggcctaggagccacaggaggagtcggagttggtggaaatgaagttggcgcatgtgtactagtcagagctgttcccgagcacagtgcacgccgcggaaatatggatgaggctttgtgggcgttgccaacggtggtcatcttcagctcctctgcgccacccactaccgctatgcccttctccttgcagtgtaggggaaggagagaggggatagggagaagagggaggagtgacgataacacgtggggtcacatgggcctcaactttttttttattatcttgtgtgtagctgacatgtgggtcccacgtcttttaatttttacagaatcaaattgccacataagcgccacgtcaatgttacgtgggataaagaccttgtcaaaggagccacgtatgtgtcacgtcagttaaaactgaggacaataccaccgagggatctcgtttgtattggttttatatgttggggatgcgttctactcagttttgcgctcaagggactaattttggactcggcgactgagggactcaaagtgaacttattcctctgtaattcatgttgcgcgttcgtgtgaatacagtcccggcccaactaattgcggcagatgggaatcccgttccggcccatgtagttgggcacgtgtgtggggatccagttacagcccaactcgtgttgacggacctggcggtgcgttacttgcccggtcgattgatcagcaggttgacgcaggatggcgaaaggagccgaaaattccccgggaaggccttattttagaatcgccaaacaaggggagggtggtaatcgtaagaatttggatcgctgccacttattgcaatccaacatacggcgctctctggaaacttccgaaacaagagtgtacaatctcatctaaaaaaatgtgcgatctagagtatagcagccgtcgcatattcagacggatttgctattcagatgtgcatacgcgaatgatacttacatgattatcatttttaaaattacgaccaaaatttgctactccctcctttccatattataagtcatttgattaatattatcaaaatacattcaatgttaaatttaacaaaattaattttagattctgcaatccgaaggagccccaaggtacactagtgcacgtgcgctgttgttaaaaaactaacaactccaatcctacatatatgtcaaatggcatccgttggacgaacatgattcgtgggctggtcccttgactttcagattcagagatatgtagcttattatcaccggcacgtgtcactcctaggcgttgtcaaacgtcactagctaaagcggccgatgcaccgcgaaacacgcctatgagaactatatatgtctatggacgtgcagtagtgacgaagtttttaaatttggatggctgttttggaccttcaggttcaggagaactcgcggcattgctgcgatcgtgagttcgtgacaccggacggaggcgcgcacttgatcggcgctcccatctccaggtcgaattcgattccgccgcggcgaaccaagcgcatgcatgtgtgaatcttcaccgtctttggtacttagtcgattatcacatatatatatgtctcgcaccgaaagttgatttgatttttcgtcgagacatgttgacattgtgattttccatacaacgattgcatcttcttgagcatcatggccagatgcagccgtcgccgtcatcacctcgggcaccgccgccgacggcggcgcaggcgtcggggtacaagcacttctgcagagtctgcaacaaggggttcacgtgcggaagcgccctaggcgggcacatgagggcccacggcgtcggcgacggcgatgggttgggtgccgatgatgacgacgacgacgacgacgattcgctcggcgatgaggccgtgcggcgtgcgcgcggcggggcagatgatccttggaacgcgggcggcccgtcgtcgtcaggggcagcgacacacgtctacgagctccgcaccaatcctaaccgggtcacgaggagccgccaggtgtgcaagaactgcgggaaggagttcacgtcgtgggagcatttcctcgagcacggcaagtgcagctccggcgaggacgacgacgacgaggacgacgtggatcactcgctgcaaccgtggtcgccttcgcccgaggccgacggcgaagaggattctgcaccggccgccggttggttgaaagggaagcgctcgcgtcgctgcaagggcacaggagtcgatttgtcaccgacaccctcagcgtgcgctgccggcgaggaggaggacctggccaattgcctggtcatgctctcgtcgtccaaggtagatcaggcaggcgtcactgaagcagaacaacggtcatcttcttccgcgagtaaggaacataagagactgatcacgttcatggagccgacgacgtatgtactggatacagtgatggcgcttcccccgccggcgccggcgccacagtatgtctcgaccgtgcctcgaggcatgttcgagtgcaaggcgtgcaagaaggttttctcttctcaccaagctctcggcgggcaccgtgccagccacaagaaggtgaagggctgcttcgctgccaagctggagagcaacgccgcagaggtggctgagccatcacaccatgcagaggtcgctgatcggagcgaggacaatcccgccaaggccacttctgatgccaggaggaacgtgcacgcaagcatcgacggtgatggaaacgccggcacgagcgatgccgcggcagaactgtcgatggccatcgtgcccatagaaccgccggtcgccgcgctcgccgctgcaccgttgaagaagaagggcaagatgcacgaatgctcggtctgccatcgactgttcacctccgggcaggcgcttggaggccacaaacggtgccactggctgacgtcaagttcggcggatcacaccgcctcagtcccacccctagccgacgaccttgtcccgctctcgttccggccaatgttggacgcaccggagcccgctctcgacctcagcatcgcggcgaacccgccactgctggcctcggccgcaacagtccgtccgaaggtcggcggcagctcgtttcatctcgacgcgccaccaccggtatacatcccatcgtcgccggcgatacccagccaacggaacaaggctaccgcgacaaccggcagccagaacgccaacgacgcggtcgggttaagcaccgccgcagcagaggacgaggcggacagcaccaccgtcaagagagcgaggcttagcgatctcaaggacgtgagcatggcaggggagacgacaccgtggctgcaagtcggcattggctcctcgtctcgcgggggtgctgatgataacgacaaggagtgattgatctgcgaattgatcagtacatacatatatactgttacattatttccatgcgtttgcaattgcatatatgttgttcgcatgagcatataagtatttgccttcttttttgtgactttttcttttcttttagacttgtaggtttttttttcttctcaagatagtgagtatgttttacaaagaggtaacatatgaatttgggaagaggcagtagacttgtaggatttttttttcttctgaagagaagcaagtagtgagtattttttcacaagaggtaatgtattaatctgtcaagctgcgtgaccagaaatttttttaaaaaatagttgcttctcttgttttttcacaagaggtaatgcattaatctgttaagttgtatgaccagaaaatttaggtaatgtattaatctgttaagttgtatgaccagaaaatttttaaagaaatagttgcttctcttgttttttcacacaagataatgtattaatctgttaagttgtatgaccagaaaattttaaagttatagttgtttctcttgtttcttctcgagagaagcaagtattgagtatttttcacaaaagaggtaatatatgaatttaatctgttaagttgtatgaccagaaaattttaaagaaataggtgcttctcttgtttcttctcaagagaagcaagtattgagtatttttttcacaaaagaggtaaatactagaaaattggtgcgccgttagcacaccatccatatagcaaaccatattaatactacatatactgtttattgttatttgtaaaagcgtaaaattttaaagagatattttagcagtttttaattttatgcctacaagtctgagtaaacattatatttgtaaatatttaaattacagaggaaaaaatgatgtcaaatatatgttggttgatggtcgatttaattattattaataagataaggctaaaaggtgaagccttatatgaaaattgtttgggactatactaattgagaaaatcccttatatacccctgaaattttacctaatctcttctatacccctgaattttgcttacttccttgtatacccccaaaatttgattttgatcccttgcatacccctcccatcagttgaccgttagttgaccgtctattttccataaaaatgaccattttacccttggatgaacaaagaaattcatgaattacattattaaaaatataaaagcttctcgcatgagactattatagttatgagtttgttgtgcgatgcattatttatcccaaaaatatttttagatcatgaaataaaaaacacgtatttatttttttaaaaaaagtcataaaaatgaggagcattcatataaagataggactaccaatgttcacaacattttttttatgaatgctcccgataaaaaaatccattgtcctattaaaatttgaaataaaaattttaatttattacatttattttattttcaaaatttatgtcaaaattttctgcactaattatttagtttcattagtcttataaaatgcacatactgtgcacccaaacaaaattttttcaattgttttttaagcttatatttaaacctaaagcatctagggcaaaaaggatatttgcaaccaaacgtaacagtgaaatgatggaaaatgtaacggtaggggcatggaagggatcaaattgaattttcaggggtatagaagggattgggtaaatttcaggggtatgaaagggattgagtgagttttcaggggtacacagggaatttactcataataactagaggtttcttataatagcactaacagttggaattgtttttttaactggttatgaaaaaaaagggaaatgattttttctttttcttcttcccatatttttattttctttcagcctaagtataacattctaaattctctttatttattttacttttacattattaaatcctcgatggttaaaaatcttatcatttgtatctctaccgcgctctctgttttttccaaatatttgcttatcttctcagtagtcgaaaatagtcatgactcatgactacgagaggaccacatagttcacacactatttgaagagccacatgtgaatggagagggacacgcctccatatcttctattgcgagtagtacaccatttagatgtcacaattcgtagcctcatatgtataattcggaaaactatagctataccacctctcttagggcgttcgtagtgcaagaccctcctcaaagtatcacgtaggatgagttagcatatctcaaatttgtttatcctataatgcaaagtaactctagagatattcttgatttttcatgccgggccctcatatttcttactttagttcttatgtttttcaaatttatagaatagtccaacattacactaaataccctaaaaattagaaacaaatatacaaatctcacctccctatcctttcccaattccctgcttccatatcctagaaaattggcgcaccatcggcacaccaacttatagctggatatatttactcatttagaaaaattattgttgttgttgtctagagtttcaaatgcagtagatttacaagaacctatttaatgaattttgaaaagactgaggaacgattaacttatagtaataaccatatttatgtaaagatttaagcgttgtaaaagaattaatacataaagcaaaattatgtataaaaattatgtatagtacttgcctatttgctttcaaacctttgtttttctcttccattagacagagtaattaacacctattattaattggtaagattagatcattagtggaccgaaaactaaaggatatattttttgacaagtctctctaagagaaatttcttctgctaacataccagtgtcacctactcctctctgtagtctcatatacgatactccctccatcttaaaaataatacaagctaatcataggtacaatcgaacatagttagagcaatattatcaacaaatagagtaatatggttaattagtgtatgcatggctaattaattcttctctaccacatttagatagccgtacttctctgctgtatattataattcaacttgaaaaaagttttgctaatgaaagattaacttgtttaagcgtctataagtacctttggacaaatactttggaagatgtgtcttttgaattagtataatttacagaatttgttaacctataggaaaattacgaaatttatgtaaggcataattttttaggctaatgactctaattgtcagcttaatatccaaagccagtctttgtattaaaagattactctttgtattaaaagttaaaaccagtcttaaaaagttaaagcatcaaaggtcttggaaatcaatatgtgactatgtgagtactgacatagtttgtgcgtataaatacacgtgaagaaccatgttatattttaatttttctagagacttcggaagggttacatatccaacttctatcttaatttttctagagacttcggaagggttacatatccaacttcttcacaagggttaggcaaggtgatttattgactcctgacttttcctgagagttaagtggacagaagaatgcagtttaattatgtatacgggaggacacgtggcataatttcagagtagccctggaaaattttgtagagtgccacgtgggccaatggcagcctggatgctgcaccctgaaatcgttatttaagatatgaatttttgaagctgtatgcctgcatgaccagaaaatagaaaatcaaaaatttccgttgccgggactcgaacccgggtctctcgggtgagagccgagtatcctaaccagctagactacaacgaatttatccgtcgatgtgtaaaaaggtctttcacatcacctagttttactttccctcacgtcaaactaccgaatatatttaccgttcttatatcagtagctatatttatgacgccatatttttcaccaaaaaatagtcgatatgtatttacatcgtaagttcttaaattacatatgtaattttagtgtatttataatgtaagtctcaaaattacatatgtaagtcccaaaattacatatgtaattttagtgtatttacaatgtaagtttcaaaattgtatatgtaagtcataaaatagtatgtaattatagtgtaattagtatgtaatcgtctatcatcacgcgatatatgtgtgaaaataatcttctctctcatggaagcacatgcagtgggaagcctgtgcggctgtgtgaccaataggcatgtataccgactgtaatcaacgaaaatttatggcgacataaatgtagcaaatccgtctcaaaaagaccaagtaaacatgtaggaatatcataaaccctctttaacgaaactttccgaaccaacccggcattaaaggggacaacaaagctatggctgtgttttcacaccaaaactaaaagtttggttgaaattggaatgatgtgacggaaaaattggaattttgtgtgtgtaggaaagttttgatgtgatgaaaaagttggaattttgaaaaaaaaattacaactaaacacggcctatatgtttgatcctttttcgttttctacacgatgcactacaggtctacagcaaatgcatcagcattcggtagcttcttcttcgcttcgttcatcggtttacgtgtcgaacagccagctagctgctcacaattaagcttgatggcgcacgcggctctcgtcagctggcgagcgccggcgcatgcgatgcgaggctgccgagcgagacgacgacggcggaaacgacgggggcttcgcttcgttcggcgcttgactcggatcgctccactccccaattcgagcgcgaggcaggcagccaccgggacgcgacgctgacttcttccgtaatcctttctgacccaatcccgttcgtcctcgcctgacgcgctcccgtccatccagccttgctgaatccaaggagttgtgcgagtggacattactgcacgctagccctctcgtagccctcgcggcttccgttctttaccccgctccgctccgctgcacgcacgaacgcacgctcgttttgaaagcgcgagaggacaagacggccatgcgcgccggagagcaacgtgtggttttcatcgccatcgcatcgcgcgtcttgttcctggactggagtaccatctaaacagttccgttgcacggaaagctttggtcctctggatcctcgacgcgactgcaagtgaagttcacagggtaggacaatgaccggagtactggaccgaatcgcggatttgtactcgttccttcgattttcgttttctccatgaaagaaaaaaagacatcgtggcacacaccattgtggaatagtaacataggaagacactaaccctttgcttccactgattgccaagccactgcattttacaggagaatacaaatctgcttcacctgcaggcccaaggaaaggaaaaggagaacactgcatgttttgtaagtattcagagctaatcacttcgatatcatatcatgaattcgggatgatgattccaatgaatactcccaaaggttggagatagggatcaagagcagaacaaggacagcaccaagatgacagaaaagaaaaaagaaggtgacagatagggggaaaaacttcacactccagtagagtatacgagaggaggagcgaagcaagaaaccaacacacgcctatgatctcatcgcctgccacgctgcctagtgttcagaacggaattgaagccagccagccgatcccccttgacttgtaccgtatctgtacgctgtactagtacagtactgacagtaccagctacaaagtgaaatggaaatttggaaattacctaccgaagtccaaacacgcacacacacagaaacacacagaaacacacaaacacaatgaacaccatgcatcggcagcacagtagcatgctactaacatgacagccgtagcaagcataacaaatgcttgatcaacaatgatgctggatacttggtcgctacttgatggtagtactaaatatgatcctgagtggctagctcgctagctggtaggtgtttattcggggtgaatggccatcatgtacataaatcgggggcgcacctaatgcgtacccatcataaccagagagatccctaaagcggttagttggaaaggctagctctcgcagatgctttgcttgcttgcctgctaagtgctaagctctcaacgagcatgcagcagctggtgcatatgcatgcctggtggttaaaattggcaggaagataatgtgaaggggaggccaggagtaattccagggagattaagaacaagatgaggctggatttggatgggcataattctgagagatccgctgatgagatgcatgcatgctggccgggcactcggtcaggctttgtgggtaagcaactaacgtgctgctaataagggattaatcgttgcctaaaccgtatcgagatcttttgttcccaccatacccagatcttaatttaatgagaaaggtataaaaacagtggtgcattgtaagtgactcttgtgatttagaccccggctgattaatctgccacttattactatcactgattccccaagccacactccaccctgtgttcgctttgttctcactggtctacccatcttcccaaccttcttgtcacctactctttgttcccatctcattctgagccctctattcagacatatctcacccaacttactgaacgcctgagctgcaccaaggtgtggcctttggatgatcaggatataaaaatggtggtttaacaaggcaaagctatattaaggagatccatcaaaagggcaatttgacagccatgaagtgtagtggcatcttccaaggcgggtaattttcagagctattgcattgagtacagcagcatcccacagtacattccctcgcatagaaagccatatggcacgtatgcaaaagccatttctgtatggtagcaaataaagatttttaattaggactaatctgatcaccaaaatagccaccatctcagcaatacaaccgctactgctaaaaactacgcactggaccacatgatggtacatggcaaaacattagactcatttcatcgaaaagaacaataggctcattcctttcatccgtactaacaattaactacaagcatcagtccgaaatcttccatacggttgggcttggttctacacgagcagtaaaagaaatgctgcaaatacaaccagtcaagaatacaatgagtcacccagaaaaaaaggggggaaataaaaggaaaacaataaacgagaggaagctggcagttccgctctattctaactccccacggaagcagcgctttcatctctctccgtttcctctgaaagctcgtatttttagctctcctaagctctgtgcctcatcaagctctatccaagctctcgccatggccaagaacacatgcaagctctgctaccgccgcttcggcaacccccgcgccctcgccggccacatgcgctcccactcagtcgccgcctcgaggtcgcagatctcctcgacgtcctccgcgtccacatccgtcgcggtcggcgacgacgacggcggcggtgatgccaagaggcccatccagggatacgtgctgcgggagaagcccaagcggagggtccgcctcgccgagtccgacttctcggatcgcgagagcgagacggagtactactcctcgccgcctcacggcaagcgcgcgaacaccggatcgggcgatgtcgagcaggtgagctcggtgtccgacgccacgtcggaggaggacgtagcgctgtccctcatgatgctctcccgcgacacctggccagccacgccgccgccgccgccgccctaccgtctccgcggcgcaggctacgacgacgggagcgacggtggcgacgcacctccggctccggccgcagcggccgcgcagaagcggacgcggttccagtgccccgcatgcaagaaggtgttccgatcgtaccaggccctcggcggccatcgcgctagccacatgcgcggcggcaggggcggctgctgcgcgcctccgcctaaccctcctccttctcccgctacgcctctccagccattgccggagtgcgacggcggcgaggaggagggcgcgaagccgcatccgcacgagtgcccctactgcttccgcgtgttcgcgtccggccaagctctgggcggccacaagcggtcccagctgtgctcagccgcggcggcggccgcatcgggcgacgatattccagccatgattaaaagcaacggcttcattgatctgaacctcccggcgccgttcgacgacgtggagctctccgccgtttcagatcctttcctctcctcgaagccaggttcttgaaagcaagcagagcatgagagagcgagcatactggctgttcagtgctctctctcctttcggttgattccaaagaagatggttagagctatggattcgagagaaagagctgcttaaccaggcagccgaaaaggtaaagaaaatatcataaaaaggagacatctttgctttggtagttttttttttctcagttgttttgttcattcagctacaaaaattgcttgatgctgtcctccattctgttctgtctttttgtttgtttcaagctacccgaacagtgtacattggggcaactagcagagcttagcatcttgcttacttcttgatcataatctagcatgaaaatattccaccgaaaaacagagagagccacaggagaaaaattatagctgaactgttgctttctgttgcagtctccagctgttcttgttccaattgtccatggtacgggatttggccaaacaataggcgagatagtaagcagtgtagtagaaaagaaaagcaacaaaatggcagtaccaatgcaggatcagcctagtagtccctagtgtgttcatggttgcatccacatgcagggtgcagcaacagcggcattctgctcctgctttctctcctccctgcttccactgcccaccaccacgaccacctgcctgcccggtttggctgctgcatatgccgccgtgacggcgtccccccttcccttctcacgctaggagcaaagcagaaaagaaagcctcgtactttgcctagtccattttgtccgtctcttgcttggctgctgctccgttcattcctctcactgtgcgatgggccccacttgtccggcgcaaacatatgcgctggatcctaacaaatcgtctgtctaatgcaacagaattgctgttcctaaactaagcatgcagcactgagaaaaaaaaatgtagaacttttagttgtttaaaaatgcttgggagaattagttggatctcgatggacagtttgtgtggtttcggcagcaaaactggagctcgattttgcaggagctgctctcctcgtttggtgggcaggtagttataagcatggcccacgtctcgcgtccacgtggcaccgttcttttctcctcgctgggcccacctggattgcatcggcgtgtcagtggccactgactttgcgcggtgtgggcgttactgacccagggtgggattagcacgacaattaacgcagttaatcaggggttaattctcggttaatgagtctggccatcgtacttctctcccctgtggaagctgtgtgggcacgcatcccgaggcggatctcccggcgtaatcggttggtccacaccgagcagcaggacgggacaaggtattgatacgttggcccgaccttgtgctgtccccccgtgtccgtgtggccgtagcgcggggcgcgcctggacgaaggcagtggggtttgctcatttgctgtctcacgtggcgacacgtgatggatcatggttggacggctgcgatcaggtggcgcttacccttgcgctttttttagacgaggcaggtgatctccctccctccttctcgcgctctctgcttgtacttttcttgccgctgttaagccgcacctaaattatcttagcaaaaaagtggaattcgtacaagaagcattcgttcacctcttttctttttacggggagagtggcagctcaggaaagaatcgctgaaaagtaccacaagtgtttttagcgctctcttttctttttttccccttcacttttgctgcgcgatggggtcactagcacgcaagactttcgtgagtcgaagagaacccttccaggtaagctaagccacggcatgcagtccttctgcaccatggttcacgccatagccgtcccatccccggctagaatttcctcgcctttggagtttggaccggtctcccactggcactcaaaaggcgaccggctaatccacccaaaactcgcggcactactgaatggtgtagtagcaatagcaacctttgctctacgatcttatccttctctcagttgttctcaccaatggtaaaccggttaagttgcacgggtcaaagcgactcgacggtaaattcgggcgatggtaaccgctgtggctatgactgttccgcgcaccgcgcgcgcgaagggggcaagtagcctgtacgattgactacggagtcgctgttgattgggtggtctagcttacgcaccggcgccactggtggctgtctggtgaatcccacgcccctgaacagagcgcgcgccgcgggcagtttaacgaccatccgtttcgcacttgcgtgcacagtgcgcggcgtcgttcgtgtgcgctctggaggaggaggttttccgtaagaagaggctcagaataacgctagtcgtacgggctcgatggctccatgggttcaccaatggcttaattagaggctggatttacgcataatgcatgcatggtgcaactgaggcgtggaagaagacaatgttctttttacctttaccacacgcttatacccggtagagagagacctgatgcaagttttggtttggtttttcggcaagctagaacgtacaagatcgaacataatatctagatcaatagatcgggttgtacacatccccgtgagttgaatgtaatcgtttactttctccagtatccctgtcccaaaaaggccgaggtgtgtaataaataccaacagctagctcgcgatcgaggccctgctgccgctgccgacgatcgatcgggcatgtgtattatggagcagtgtggtactactatactactccatgcgcacggaggtgtgtgcgcatcaatgagagctaagtccctctcctccatggagctagctagcacagagtggtcgctgctaaccgtcatacacacgaacgcacagatggatggatggatatatgcatcctgaattcttgaagtttttggttggtgcagctagggcctgcagactgttgaggagctactgttagtaggactggaagatctagcgtactccaagtggcacgtaggattcttgcttgcttctgcagccaagccggccctctctccaatcttcgtctctagatctcagtatctcacgagcaagtgatcaactagagcgaacttggattccctcacattcaatatcataaaaatcctagagggaaaagaatagcctagtgctgtctctgctacgtggaaaagaaaacatactgtcaaggatgcacgaaaggagtaaaaggcacctttgtgggggctaattctgaaacttggcttgtaagacattatgtgtatgccctatttttgtgctatcaaatctgctacaatgaatgcttgttcttgcccgttatcattttttagtcagatacatatgctttaactgcgttttaactgtaagcagtaaggatagttcactggaagtctggaaatgaacatctgaagccgagtttttactgtccttgagcaactgcagtaccaaatcgtgactgttgattcgagatcatccaacggtccaaaaggcgtcggtacctcatggtaccgcacctcccattgacgcggtaccgtggtatggagggtagttttgtactttcgcgttgtataccgattcacggcttcacgcacgcggcatctgtttcttcgctgtttcgcgagagaggaggaagcgctgggctgaagcgagagaaagaaccctagatggcggcgggaggaggggcatgtagcgaatcctggatcagcgactcgatggcggctagatcagggatgggtggaggtcatcagcggcaggcccaaatcggccaaccgtcgggagctcgaagatggttgtggcggcgattcatcgacgacggttagggctgtcaaaaaagctcggagctcgcgagcagctcgagctcggctcgtcgcaagctcagctcgagttcgactcggcaaggattcgagccgagctcgagcttgtctcgaagctcgcgagctctaccgagccgagctcgagctattcggcagaagcttgaaattttcactcccgctacctatcccaatttctcccgcactccaattccaaaatcctaccaccaacagcagtccatcacctaaccatttatttcccttatatccccatcccgtatccaaaccctagctcatttgctctcttcctcgaaacatttctcttctagatctacaatcctaggctgctctagtgctccactgaccactgctgtggatctagccaagcaccgtccatccatccttcgcctctcctgtccaggaagaaccccatggaggacagcagcagcccaccgcctccgccgtgagtgacgaaccgacgactcggatctgagtaagtttcctcttctttctttgttttacatttttatttcttttgcacccacatgtatctagggccctacatgtattaattgtgtagtgtttagttgcttgatggatgttattgatttacattgaattttatggactaggtggagacatagagtagtacttatcttgctgtcctcctcttctgaagaaagactgaaggttgcagaacaccgtgtgtttgccatttgccaaggtaaattgatggcaatgcttttcttgttgtacttgtttgattccttaccttgtgcagaatatatattgatagcagttggtatttttattttttgtagatgtctgtaaacctgcaaagacagctatctatagagatcgagtcaccgagcaatagggatggcatagcagcaacagaagcacaaccgaatcagcagctagtaccaggtgaagtaaggggagaagagggccaagagggaaacccaactaaagccaccaggaaaaagaaatctccattgtgggatttctttgaagaatgcactgtgccatcaaagaagaagaaaggagaaatggaaaataaggtcaaatgtaaggcatgtgaaactctgctcaccaagaatagtagtggcactacaacacattggcggaggcatttagagcagtgtgattatcacaagcttcaacaaaaatccataaaacaacagaatatcaatttccctagccttgatgaaggtgatgttgatcttgatgctccttgtgtttctgtccctggttattatgatcctacaaagatacgtgagcttatttgcaaaatgatcattgtccatgagttgccattttaccttgtggagtatacatggtttaatgttttgctaaagaggctaaacccttcttacaaaaaggtctctagaaataccattagaagtgattgtatgaggctttatgaatctgaaaaagaaaaactgaagaggactttcaaagatgttagaaagataagcctcacatgtgatctttggacctctaaccaaacaatttgctacatgagccttgttgcccactacatagatgctgattggtcaatgcattgtcgtgttattaactttcttgagttggagcctccacatactggtgtagttattgctaatgccatttctgattgtcttgcttcatggagaattgaggacaagatagctagcatcacatttgacaatgcctcaagtaatgatagtgctgctaacctgttgcttgccaagtttacaaaacgtggttcactttggttttatggaaaattccttcatatccgatgttgtgctcacattctgaacttaattgtccaagatggtctggctgtgattaagcatataattgacaaagttagggacactatcaagtacatcaagaaatcaaacaatcgagcatacaagttcagtgctgatattgattctctcaaccttaaaagtgacatgggtttggctattgattcctgcacaaggtggggctcaaccttcaaaatgctgcaatctgcatttttttataggtctgccttggatgtatatgctgcaggagatgcaaactataggtggctgccaacaccagaggaatggaatctatattgtgaagtcaatgatgccctttctgtcattcatgcagccactgaggagttctcaggttcaacctacccaacatctaaccttttttattctcacattgtcgatattaagagagtactaggtcagttgttgaagtgtcacgccccgagctagtcctgactggaattagcccgtgacgctccaaattaacctgttaatcgataccagtcccaggaaaacagtgctggtatcatagagagacagaatatcacagcaacagaggtctctttattatagagtagaagtacagtcatgttgggctgcggacagatcccgagctcacaactgcattacaaaagggaaacggaagccagggcttggaccaaacatcataggcgcgacttgggaactaggtcgaaaccctaaaactcatcgaagccggcttgctcctggaagaactcttcatcagcaggatccgcttcatcttcttcagcaactgggggggttatttatatagagcaaaggtgagtacaggagtactcagcaagccaggggaaataagtgtttaatgcaggcttcaaggaaaggctgttgttttcgtaattgattttatttgaactcttttctgaaacaactaagtgagtgcttctcaaacgacacggatgagacagtgcgtcttgtccgaacggagtatgtgcaatgtatcagtctttagattttgaaacaaggttggcacccggccaacagcttttcaacggccacccgggccaacaacttttcaaacggccacccgggccaaccactttcaaacgcccacccgggcctagctgatcccgtcagctacagatttttcaaacatcaaaccccttttcacaacagcaatttcacaagcagtagtcaaacaaaactacgctaagaatcacctcacatccgcccatgaccgtgggcacggctgttcgaacagttagttaacctctacagagggggtacactttacccacacgacattactaacccggatcacccagcccgtggggatcagccacgtcgggagacctccaagctttcatgacaaggcatttcgaaagccgacacaggtttaccatatgccgacgagaggggtcccagaccaacaacaggctaggtcccagaccatactgtgccaggaagcccaggggggtcctctccgacaccaccccggcgaatccacatgtctctcggcatcatggctcccctgataagctagttactcagccaggggtgtcccattccacccatgtggtcgtacttgtcttatgtttggatgaaattccaaggaaacggtccttaagtgcaagagcgggaaaccgtacacccggtacgttccccggtccgcggttttagaaattcatttagttcgcaagcaccgacccaggtgtcgggttttccaagtcttttgtaaaaccaagtttacccaagttgtttttcagattttaagtttgaaggcgaccgtcgatactcgcacagagtgcacgaatatcgaggcgcaactgggtggttacaaggggacatggtataacaattaacaaaggaaggatcaaatgcacaaattaggcaggtccgccaatctgccttgcagacgggacaaccgattaagtgcgatcctatcaatgcataatattttgcaagcaatataattaaatttcaaatataggctcaagatgttcaaaggtggcttgccttgctcgagatccggagcttgatcctcgaaatcctcgcactgcgggtcttcgggctccgaaactacacgcgaaacgggacaactcaacaaacggcgaaaataaagccctattaatgacctctaagcgtgccattaggtagatctcgagatttggggaattttggaagttgaacggagtcaatcggatttacggttgggaagatattgaatttctaagattattggatttttggtctgaaggaaaaaggatttaggcccgggtggccgtttgaaaagttgttggcccgggtggctgttgaaaagctgttggccgggtgccaaccttgtttcaaaatctaaagactgatacattgcacatactccgttcggacaagacgcactgtctcatccgtgtcgtttgagaagcactcacttagttgtttcagaaaagagttcaaataaaatcaattacgaaaacaacagcctttccttgaagcctgcattaaacacttatttcccctggcttgctgagtactcctgtactcacccttgctctatataaataaccccccagttgctgaagaagatgaagcggatcctgctgatgaagagttcttccaggagtaagccggcttcgatgagttttagggtttcggcctaattcccaagtcgcgcctgtgatgtttggtccaagccctggcttccgtttcccttttgtaatgcagttgtgagctcgggatctgtccgcagcccaacatgactgtacctctactctataataaagagacctctgttgctgtgatattctgtctccctgtgataccagcactgttttcctgggactggtatcgattaacaggttaatttggagcgtcacgggctaattccagtcgggactagctcggggcgtgacatgaagtccaaagacccaattcttaaagaaatggcaaatgcaatgcttgaaaaatttgagaagtactggggcccagaatgcaatactttgtttgcagttgctttggttctagacccaaggtttaagatgggtatgattaactacacattccctgctttgtatgaagaaactgtacttcctaagaaacttgcaaatgtggaatccacattgaaatctttgcatgcatcatatgaaagtgaactccagagcacatcaaaggaaaatgatgccaccactcaatctactagtacatctctgggcactactagtagtcatttctttgctgctagccaatttcatgagtatatgaaatcaaagaatgctgctagtcttcctaagtcagatttaaagaggtacttagatgatcctgttgaggatattcctgcaaaaagtttcaatctacttcagtggtggaggatgaatgaattaaagtatccaattgtggcaaagttggccaaggatattcttactattcccatcacctcagtctcatctgaatcagctttcagcacagggggtcaagtgattagtgattatcacagctctttactcccatcaacagcacaagctttggtgtgtacatctagttggattagaggaggccaccacaaaagcacatatttagtaagttcttatattttcatgtttctaaccaattaatagagatacacaatctaataatctgtgtttacttgtttgttgcatactaggaggatgatactaattctattatccttgtcccaactcaagcttcaactgcaaattcggttgtgggcagcaattagactcgtttgtcaggtatatgtttgaggttatataaattatctattgctaccatatcaattcctcatcactgatgaaacattacctataatctttgcacatggtttcagatttaactttacgaaacattaatgcaggcatatagtatagcatcaacaattagtttgaagaaagtgcttggaggtttcacattggcgtactgccattgccaatagtggagtaaatattttgtgacagttgaaatttgaagtacgctgtgttagtagtataagtaatatttagatattagagcttttagatggaacatatgttgggaacttccggtgggctacttttgatgttaattgatgctctatgttctgtcaagtcattgacacatgatattgtaatgtttcttatggtgttatacacaccggtctattataaagtagtaattctattatgacttatgcactactatgaatttgtaatctttctagtatatacctgtcgagaagctattatattctattatgaatttgtaatcctactttggcttgttaagaagcttttattgggagataagttcagattgctgaaggaaacagtcttaacgagcttctacgaatcgagctcgagtcgagccgagccttgatcgagctcgaaccgagcctaccttcaagctcgaaggtaatgctgggcccgagctcgagcctgtaccgagcttgagcttaggtaggtaagctcgctcgagctcggctcgttgacagccctagcgacggtgagctcggaggtttctatgctacatcggcgagctcgaagatggttgcattggccgttcgtcgggagctcggcgatggttgtggcggcgtttcgtcgggatctcggtgaccaaaagcgggagggagataggcagtcttcagtcttcactcgttccctccagcccaggcgtcgccgtccagtgctgcggctgcgcgcgtccgtgcgcggcgtctcagggtctagctcgccgttgaccatgcagcccccgaacggtggcgagcgggggcacggcaatccgggtcgccgccgtggatcttcaaggtatgtgtgcctgctcccgtccttcttcaaggtccaagtgtactgcttcgaggtccttttattcaatcagtgcttttcgagttttatgatttattcatgacaataccagcatggacaacgttccgaggggaaaaccagtcattttgatttctgacagtgaagatggtaaaccaaattctttttcctacttattcatgtcctttcttctttgtttcgaactaaaatggtgcttacaaaccaaaaacacgggaaatattattgtagatgatgatgaagttgctaagatatatcaaagcgtgcgcaagtgctccattgaaagaggtgattattttcatataaataattaataagtccaaatgtacagaatgttaggtactgctagtcagatgatgtgcttgtcaaacttccaatttcaggtcaatatggacctcgcaccttccctggatttgataggtagtactggtatgggactgaacatgcagtacaaaattgctcacattgctgtaagcaatttgcctaccattccactctatgtgtatgagatccagatgactaatttgacaaaagggaaaatggtatggttcacaaatctgactgccctgtatttgcatttgtttatacataaatgtcctgagtctaaatgtcttgtttatattttttaggccttcagtttgccatttagcaagcagtacataaacaaccacctttcaacaccaattgatgatttacttgtgactctggttggatcagctgaatcctttgagatgagactgaagaaatccaaagataagcgggctacctttacaactagatggaacaagttggttcaagccaatttattcgagcttggtgatgtttgtgtgtttctgttcactgaagttgatgatgacctatgtattactcttgaggttctcaactagtgtaatggatgaagaactttgatgtgccccctcataatgtagtagtatgccccctcctagtgtagtatctgcaccttatgtaatggatactatgcagcagcttttgttcaactttaatggaggccatgcagcagcttatgttctaagttaagacaatgttattctgatgtaatatatttatcatctatttccctaaaattacctagttgtttgcatcacttcaaatctgatatggcaagtgtacagtttttatgctactggagttgttgattgttgttggaatcactgctacaaaattaaaatggctgcccgttctgttctgaaaactaaaaacatgctacggaagcttcatcttgattgttgctggaatactatacttaattgggctgaaaacacacagaacagaagcagctggcatgaatacaaatgagtttaagaaactttagttggctggaatacaaatgtaaggtgcacacacaagagcgtcggacgatgcaggaacaacagagaccacaacagcaggaagcgacgcccgagtattccggctggatgcgacggtggatgcggcagggtggaggcggcgattttgatgcgcctggcgtcgtcgtggatgagtcgatgcgcctgcggatggctggatgagacaacgagttcttgcgacggcgggatggatgcgccggggtggaggctgccgctgtatgcgacgacgggatgcgccgctattgacgacgggatgcgggttggacgtctgccgcggcgtcctcgacggcggcagacgcgtgttcgacgcgcggccgcggtggcgtcgagggtacgtcggccgcgggggaatacctgcgatgagacggcggctgcggcggacaagatgagacgccggcaacagatattggcgcttggcggccgccgcagactattggctgggatgggcggtgattaacgctaccctaatttgtttagccccatcatacccttcctaaatcaacggtcagattacattggtacctcatggtaccttcttaaggatgggaaagatgctctctgaagccaaatctcaacagcaagagcaagctgcttgtagctctactccatcgagcatgctttatggagatttttagtggccggagctgataacatattattgcactcagggaaataacatcgatagtgtgactagacaagtaggcatccaacgaatcaggttggtaaaagacagaagaaaagtagacggcataaatgtttcttatcttccttcaagttggtaactggtaaaggttaagctagtaaccaaggacttagcctcgacctagtacatagatgcagccattacagatgaagtcatggaggggatatttggatgtcatggagctagttggagaaagaataaataagtagacagcatgttttctgaaaaccaattaagggtttctcttttgatgggtagccaagaaggctagcctttcttcaagcatggacggccaaatttaaaacttacagttaattaatgtgacatctcaggcttttaagcatatggtaaagctcctgtaactgtaccgttggttttacacttgtaggaaatgttgaactagttgctatcttacagttttatcaacaacctgcaagtcaaaattaaacactggttatattccagcagagcgaaactataagttagccaatgtcggtgttctgtgtgctgcttgttgtttacgaggatattaccaacatttgggaatatatcaagcatattttgctcactttgcccataaaagctcaactgatgccatgccgaaaggagatagcttgttctacatcattgccacaatgtcacagaacaggaaagcacagcagaggcacgaagcatcaatgagaagagttcaaaaaaaaaaaaaagggagaagaaaagacagagaatcagtttgtttttgcttgtccggtagccatcagtccctacttccagccactaacaacagaagagaggatcgtccttttcagcagccagcacccacgaattgactaggtgatcgacgatcaactgagctgcccatgtagggatggcaattttaccatgagtctgggtatccatggatacccgacctgacgggcatgggcgtgtgtgtgactttttacccataggcacgtccgtccaagatccgaagatgttatgggcaataggtgggtttcaatttttacccgtgagtaacccatgctcaacccgatacatatgtattaactacttttgactcatttcttaattcttataccatttctctcggttcatttgtgatgctaactgatactaagttgtgatgtaattcaaattattgttgataaacggtgatttggtaaattattgattttatttctctttcttaaattacatatctttcaagttattattcatgtgagatctattgggtacctgccggacatacccgcgcccgctgggcatgggtacgggcacggaattttacccgctaactctagtgggtagggtttgggcggacaatgtcgggcatcgggtc

SEQ ID NO: 9997 - DNA, 27185 bp, Oryza sativa
agaagttgtttaaaacaaattaaataaatctattttttcaggtttataataattaatatttaataaatcgtatgctaatgaactttcttgtttcacgtgcgtaaaaattttccctctaatatgagacgagcgcagccttagttctatttaattatctaatataacgtgttctcatccataccttctttcaacaatgggaaccacgtcatccccttttcctaaatcttaagagccattttgaatagtagaaatagaaaaaacattgaattcatatacgattgtaaaatatggagaaaatatagaaataaccgtttgattggaccgtatgaaaaacgtagaaataagatgaagaggtagactcaaagaaaatttttcaagaggttataactcttgctaagttttctctatctctattggatcttcattccatagaaatttcaaatgatacgataagatttaattctttataatctttattataaagatattcatagaaaattattttaataggattgaaatcctccgaactttctattgttttctataaactagttggatggcctgcgcaattgcgcggctagcactcatacaaaatcatttattttctaatatgattttacttaaaatttatcaaatagctatctcgttgtcttaaggctttgaaaagccaaaccttattatccccatgtttctacttttatagtttttaaaagtcacaccagttgctaccccttacttctatcacaccccttcttcatttgcttgcttgatctaccgttgtttcgattcattctccttggacctttaaaaattataccttatagtttttagagattaatctctcgttgggttttgtttttataatttttagaagtcccatcaaacattgtcactatactcatccacaacccgtccattgccttctctctttattgccattgggatttcaaaaattgaatataattatcatttgggttcattttttactttttagaagtcccgccaaaccattaacggcttttcactgtatttctctatggctcacccattgcctcccctgtttattgtcattgagattttaaaatcgagcaagattatcaattttttttttactttttagaagtctcgagcctttaaaaattggaccttgtagtttttatagtttgttgtatcgttgggtttcattagtagaaactttaggagtcccgtcaaacgctgcactatactcctctatgattcatccactctctcctctctttattgttattgggtttattttttactttctagaagtctcgccaaataatcagcggctttatcaccgtactccactatggctcgtccgttgtctcctctctttaatatcattgagattttaaaatcaaatttgattatcattatggtttatttaattaatctcatgttgtaccctatctggactattcttttaatataattcattttttaatcggaattttaattatttataaattctattcctattagaactcttcattattattattaggattttaaaaatcgaacctaatcattctttggttttctatttttatagtatgtagaagtttcgctagtgcccatctcttaataatacaatacaattcattttatcttttattctacttagtagttttctctaaatattttttgtttctgattttagttatttttaacatatgcccaccataaattggtgcatatttttttctttttctttacttattaatttggtaatttctagatctccttgtataatatttggatatattattaattgtatgagccattgctgctgtagcgggcagactaccgagcaagaggatagattttcttttttactgagcttctttgataaaaagaaaggaacgtgcagcattgcccggttggggcttgagagtccgaatataacttggacttttattttttgctgcacggttttcttttttacaaagtttgagtaggactcttatttatatttgtccaatcaatctcaatggttaaattatagatctatcataattcaatggtatagatttttctctttttttttcgattaatgtggtaatatgtagccttcatagcaaatatggtgcctcctttcaaagatgcttcgggttatcattgagattttaaaatcgagcatgattatcattgttttttttactttttagaagttccgaacctttaaaaataagaccttgtagtttatagagtttattgccttgttgggttttattttttataatttttagaagtcccataaaacgatgcctctatcctcctctacggcacatccgccgcctactctttattatcattgtgattctagaaatcgaacataactatcgttagaattttttttttattttctagaagtcccatcaaccgttggcggctctgcaactatactcctatacaccccgctcattgcttctccttagtcattgagattttaaaaatcaaatatgatattcaacgggttttttttactttctagaagtcctggcaaccgccttgctcgtttgcttcacggcccgccgatcgtccctccttttaatcatcattaggatctattggtgttttattaacagttttttatatgtcgtatcaaccgccaccactctactcctttataggcatgttacttaatttatctcgtcatgtgttttagatggtattttctttcaatagtttttatttttatcacaaattttagttatttataaattatattcctaattgaaatcttatttttctttctctaatttcagaatttatttttttcaaattttaattaatatcgtattgtgttctttttttttcaatttcagttgtttcaaaattgtattcctacttgaactctcttttaatttttctaattttgaatattattttattttttactttgaattttaattaatcttgtattgggttctgttgacagaaaacacgaggcctgggagatctgcttaactccagtgcaggtccaaagctcgccttcggatgtatgagcgtgctagttgatttgatcttgaaatcaacaagaaatagaacaaagaaaccgcaattaatcctataaatgatagccgatcggctaagtgccgatgacacatcatttatttcaagccggtgtcatgtgtacatcgatcgacaaatatcaataagcaaaccagaactaaatctactcgatcggctgtagatattaatgatatataatccttatatcgatatatacttaaatcaaatgattgagatagatcggtcgccttgccgagacagtataaatcacttagatcgaaatatatattaatagtaggattatatacattcatgtaacatcccggctagggcttaataggattaatagaatactcatatcaacaagttgcaacttcttttccggaagccaatctccaaagaactccagctccagggttaagcgtgcttggcgtggagcaatttgggatgggtgaccgacccggaaattcttcccgggtgcacacgagtgaggacaaagtgtgcagaaaagacatgtgttggtctgtgagggtagtctatgacctatgaaagccaattcatagcatagccgatcaggtagatctagcatgtatcggcaatactccgatactactctatactaagattttaaagcaagtaaataaaagtagttaatcagataagatcggctgaaactccgatactaccctaatcagcaaccagaaagcaggctagagattgcaattctaagcacgactactctatactaagattttaaagcaagtaaaatatactaaacataagcttaatatacttatatgcgacaagatcttaacataaagggcagatttaacatgtcaatcaagcatatagaataaaagtagttaaatcagataagatcggctgaaactccgatactaccctaatcagcaaccagatttaacatgtcaatcaagcatatagaataaaagtagttaaatcagataagatcggctgaaactccgatactaccctaatcagcaaccagaaagcaggctagagattgcaattctaagcacgacttaatatatcaaacttaactgatgcagcattaagtatgaaaagaaaaacaatatctagacaatcaagccgctggaagtttcatagagtggtagatatatcacatagtctaagttaacatcattatctaacctaatcgactaccttccattaacagatgttagccgattataggttagatgaagatattatcaaagattatgtgagatatatgataactcgacgaattatatagacaagattagagtgtcataaagatggaagcactaatcttgagaacataagtctcatgacaagttttacctcttgttgaagatcgaaaccgatgcagctcaacccgagagcacgaactcatcgaaataaaagtaaagcataaagggtggcgatgcgccgagattgtattggatgtctcctttttacatagggctcgggtctattatacccgagaaaagatacgtccataacagacatgactattatctctaacaaactctaagataccataagtctttacggcagacttttgcccaaacatatctctaaggaaattacatagaatatcctaattaatagatataattgccttcccatgactctatccatgcatggcaatcatcttgaagcacatcaacttgaacccgatgacgtacaccgagtcaaattatcggaatcggctgtatcggctaaccccgtccgactcgaactctgccaacctgaccttagccgatttggactgcagtcgattcttactctgtttccgcaacgatcttcatcttggattccactttgatctgatcttcacctccgatgccaatagtgatagaatttaccaaatttggttgttaacaggttcttgtatggattcttctttcaatattgcttatttttaattccgaatttcagctaattttaaattttattcctacttgaactcttcttttattttcttttgctaatttcgggttttatttttatttttatttttaattttaattaatctcgtattgggtttttatatggactcttcttttaatatttcttatttttaattctgaatttcagctattttaaaattgtattaactatccttttcttttctaattttggattttattttatttttattttgaattttaattaatctcgtattgggttctcatatggaaacttctattgcttggactcttctttttttttctaattttagattttatttattttaattcgaattttgattaatctcgtattgggttcttatatggaaacttctttcaatattgcttgttttaatttcgaattttagctatttttagattgtatttctacttggactcttctattcttttcttttctttttcttctattaatgtgggaatttctagtccccacagcgaatatggtgtctcttttcaaagctgttttaataatataatagatagatagataacctccgggccaattcaagcgagattgatgggggcagccgccgatcctgtgcggtgtgaagagtgaacgagctctaatggccaatggacgagcttagcgcggtggagtgcgaaggcgcgagagctcgtgcggcggccggcgggagggtagtattgctggcaacgcaaactcgagccacgttgggcacttgggcgtttgctagctgctaccgctagtgtagccggcgaccacagagagagcgtgcgaaagataatcgattgcggaagccccaccccctctgttctccttggcctataaacggaatatttctcgtgagtcccacatgtcattgtctggacgagcaccctggtgctctgggccctcaacaccgaggacgaggagatgagatcgatcgcgtgtgggccggcgagccgcacctcctttaggaatttgtttctttctcagagtcctccgtttcttcgacccgtcgttctctcgccgcctgcctcgccgcccgcccgacactttccaacgtttaaaacccgtcttttttctccaggttttcgcaaggggacgacgacgccctgtgccactacggtacaaggccgcgccgagccatcggcccatcgctgcgtaaaggtgacagctagcgccgggcgatgcagccgcccaactcgcgcgtaaagtgaccgttgcgtttacccacccggccgaccgatccgcgaacgccaccgtatgtactggactagctagtctctctgttccgctctactccaagaattcctcggttccatctgcatcgacggttctgtgagtctgacacgaagaacgtaacgttcttctctgtaactaacgcacttgttcggttgttccagaacgaccaggctgcagagctagtgcaactgcagacaacgatgccctgccgccgatgcgtttggcgttcagaaatggacgtagtactagcttggagcgtgaatggcaggatgggtgtacacgatacggatttgtcaaagccgagctgccgatccgatggtgcgtaccttctcgtctctgaatttgcactgcgaaaaaggtataaaggagggatgaatcccaacccaaaagccaaggtttattctcactttctcagagtacatactaccagtacacgctacacctccacctccgctgctttaggccccctttgaattagaggaaaaatggaggaaaaacaaagaaattgaaatcatacactatttatgcctttgattcataggaataaaaaaaggaaaaacgtaggaaactttcctattcctacaattctagagcaaaaacgtaggaaaattaacatccactctaacctcttagaaaactttccttgagtctatctctcttatctgattcctatatttttcctgcggtctaatcaaacagtcatttctatatttttcatgtgtttttgtaatcctctgttttacacttgcattcttaccaaaatcctgtgttttttctggtccttcgtttttttctatacaatttaaaggggcccttaatttttagcaacaccatgtggtcctcaaactcatcagcagcagacaacaactaaagagccgtgtaatatatcagacaatgcaattagtagggagaggcgcccataacacacagaagagaacaaggatcagagacgaaaagggttagccttttaacgctgtgatctactcgccgctacaaagagaatggacggattgatccaaagtgcctcgactttactacttgcggcggggtacaccgtgccgcccggcgtgccgcgcgctcccaacgcgagagggggtttcgacctacctgcacggcacgcacgcacatatgctctgcatgtgctgtgcaacgcatgggcgcagccgcgagagcaagcgcggcatgatgcgcctgtacgctaattcttggatcattcctccctgcgttagtttaacttaatcctaccggtacactgcagacacccagctaatcaattaggcttcttgcattagtatatatagtgatatatactatatactccgtaccttgtatatgtcgttggagtatcatgcatgctgtgactgtaaaagcctgcagctaaccgataggaaggtagcagagggatcgtactgttctatctcgtgcgtagtggtggcatctctcggtgtccccagtttgtaatctagccaagtttcacggcatattaatttgcagcgaagggagacttatggttggccatgcatgctctgatcacagttacgctcctatccatgtacacgccgtgtctctatccggtgttggcccacggtatatcaggaccatcgctctctcgcgtctagggattcggaaaagctggtgtatatgtccaacacatattttgatgcaatgttgatacgcgatgtgactcgggttttggtacgcagatatactcagatgctacggactgaaaattgtacttggggtatacacaaaagctagctgggcgacgacattttggagagatcggtaagtctattgtgtgtttagagctccgtcgatgacgttgcaattgttctatgacaagaaaaatgttaaaatatcagctaagtgcaggaactcaacctggtatctcagtgaataaacatatggacgaggtatccgtacattgtatgattttgatatatcagtcatcactcatcagtgtccgtaaatatctctctttttctgaaacattaacgcagaattattatacgttagctacggtagctaaactaccaggtgaaagctagcgatcgaaagcatgctagctagctgcatgcatgaccgttggcgtccgaccaaagcagaaattccaaaccggggccgcagcgccagcagctagcttaacttttggagtggtcccgtcgggcggtatagcttaactcttctcctccattatttgcatgggcggtttcttccccctcacaggcctataaattccgaccccctgcctcacagtctcggtctctctcaccacatattccgcgtgcatgtgaagagagagatatagagaggagagctagcgaaagtttgagtgacaaagacgcacgtacgcgcgaaaacgttgtcacgcttttgagtgatcgatacacgggggggatacacacgcaaaccgatcgatatggttcgtgagcgggtggtggtggtgatggcgttcgcggtggcgacgctcgcgacgagcctcctgccgccgctggcgtgccaggcggcgccggcgccgtgcgagcgcccgacgcgcgggcaccaccagtacaggcagccggtgggcgtgcggcggatcgtggtggacgcgagcggcggcggcgacttcctctccatccagcaggccgtcaactccgtgccggagaacaacaccgtgcgcgtcatcatgcagatcaacgcagggtcctacatgtaagctatacccagttagctcatgctcatgctcatgcatgcgtgtgcagagtttgcgtttctgacgtgatatatgtgtgcgtgcagagagaaggtggtggtgccggcgacgaagccgtacatcacgttccagggagcagggcgcgacgtgacggtggtggagtggcacgacagggcgagcgaccgcggccccgacgggcagcagctccgaacctacaacaccgcctccgtaaccgttctctctaactatttcactgctaagaacatcagcttcaaggtgagctagcaaacaccgttcgcgcgccatgccatgcattagccagtggtccgtctccatggacccggccgccaacgtacgcgactcacaagacgcacagggagatgcggtgcagtacagtgccgactgccgaggcagagaggcagacaaagtgacaaaacccttcagtgtcacgagccacatcttgcaaatttgcaaatgctgcatgccgggcgtctcttcttctctgtgtatcccttgttcttttgatattttgaatccgtttgtacagggatgtattttcgggttcttggagcagccaaagcagatggcttcttccggctacggcggagagaggctacagcctgatcgacgcggccggccaactttttttttccagtgaattgcatgcatgtaagtagcaaacaacagctgacgctgggttcctgaatcctatggcttggcagaacacggctccggcaccaatgcccggcatgcaagggtggcaggcggtggcgttccgcatctccggcgacaaggccttcttcttcggctgcgggttctacggcgcccaggacacgctctgcgacgacgccggccggcactacttccgcgactgctacatcgagggctccatcgacttcgtcttcggcaacggccgctccctctacaaggactgcgagctgcactcgacggcgcagcggttcggctcggtggcggcgcaggggcggcacgacccgtgcgagcgcaccggcttcgccttcgtcaactgccgggtcaccggcactggccgcctctacgtcggccgtgccatgggccagtactcgcggatcgtctacgcctacacctacttcgacagcgtcatcgcccccggcggctgggacgactgggaccacgccagcaacaagagcatgtacgtactgcttcagctagctagctagcctgatcaacttgataaaaaaatgaaactatattattcaattcccagccagctaacgcctgtgcaaatgttgtcgacggcgtgcatgcgtgcaggacggcgttcttcgggatgtacaggaactgggggcccggcgccgacgcggtgcacggcgtgccgtgggcgcgggagctcgactacttcgccgcgcgccccttcctcggcaagagcttcgtcaacggattccactggcttacacctgacgtctgaaagccgtttttcggcaccacaattaatttactggagacaagaacgtacatttgttagtacagcaaaagcgaagaatagaacattacgataaatataaagtattgaagtgactagtgcagtatatagcggtagattcattcgttcattcgttttgtctgatccggcttataatgatagctgctatagaattcaagcacagctctttacaagatctatagtagctatgtagtactgttttaaaagctttgtcatgtagacatgtacccatgcatgtgaggtgaatagtgaatatataattgattttgttgttactttaaggaaaaatccaaatttgatcccttaactatgaccttagtagattttgatccctcgactataagatcggtctccattatcaacttttgaaattgaccatatttcatctatgggcgccaatcacttctaagagttccgatttggatcagggatgaaatatagacagttataagagttgggggatgaatagtgaacattttaatgttcttctaattgaaggacaaagtcaaaccaaggccagataaaatacagacttttctctcttcataaagataaagattttatcttattttccgttagcacgcttttcaaattacaaaacggcgcgttttgtgcgaaaactttctatataaaagttgttttaaaataacaaatatatctatttttcaagtgttataaaacttgttagattttgtatatctcatatttatttattttttttacatattttccgctatctctctcaatactgttgctataaatcggttgtggagataacggaacgtacgagcctatatgtacaccgctctattggtattacaatcgattgcgctgagtcctatcacactcttatgatatcatattaggtttcttattttcgcatctcaaaccctaacctggcaggccgacatctctcgccgccctggtctcctcctcccaactccctatagactctgtcctcgacgacacaatcaagatcatcgccaacgcagtccgctcctccttatgactatgatataaaacgcattccgctcctccttccagacggccctaggtttgcaggttgatgacaccgtcattgctaccatcatcggcgatactgttgattgtgtcacaacaccggtaccctcttcactactcacagctccaccgacaataccccctctcatattattgttggcagtggctgtcttctccctattacttccgttggacgtgcttacttacactatcctacactactatagatccgggcttcagtgacgggtcatctgtgacgggccaacgcaactcgtcaaagataagtaatctctgacgggccaaaaaaatatcctcttcaatatatggctaccagggaggacccgtcacagatgtgaagtcatctgtgacggcttgcacttgtaacccgtcacagatcgtctgtgacgggtcacaaccatggctcgtcatagatgacatgtcatctgtgacgggtgtagtattatgaaccatcacaaaagagaccactcatctctgacgggtctttaactaacacacgtcacagataatgttatctctgacgggtggtagttatgacccgtcagtgatgagtgaaaattcaaatttttaaattttgcaaaaaacctcgaattgaaacatgtcctatataaaagttgtagctctcaatgatatccacaactttataactaacaacatttctattagagatcgtttacatccccgaacatgcattacaagtgatcagatctacttttaaaaacaaaattttgagttttttttcaaatgacatggatggatacatgccccgtatcaaagtcatagaactcaaccagatctacaacattataattgaaaatattttcatttcacaaaatttacatgttataaagtgagatatattttgaaaaatgaaattttgaattcttcaaacaacatcggatgaagatattttctatgtaaaagttataaaacacgataagatctataactacttagttgataatattttcatttgaagtcatttagggtgttaaatatatgttaaatgattcagacaagcatagacaaaataataacattggatgagtaatcaatatgtgttgagtaggtgagttggtaagggagctctatatggaggttgaggtcttgagttcgaatctcacgtgtagcatacaagttatattgcgtgaaaaattgtgaatttgtaggtagtgatgtgtaaccatgtataggatggctagtaaaattcaaaatattttttttaggttttttgatacgtttaaaattcaaaaattgtatttcttgctttgtcatcagtgacgggtcgtaagttacaacccgtcagagatgagtcatcagtgacggttaggtagttacgacacgtcactgatgactcatctgtgacgggtgacaagttttaacccgtcagagatgacttatataccggtcagagatgggttatctgtgacgggtgtttcatccgtcacaggtgattttgtcatcagtgaccactaatcactgaccaagaccaaacccgtcaaaggtgagggtttgggcccgttagagatgacctggtccggcgtagtgctaattgctgctttgttcttaacaatgttctaatctctcttgacattattaagagctttatttctgcacaccatttttcttatgataattggtgttccattgaacttgacccgtttggcctctttgtgaagttctcaaaattatatatatatatatatatatatatatatatatatatatatatatatatatatatatatatatatatatatataagcaatacacgtcctatggaattaaaacttttctatagaaaataattaaaatgcccttagcttagaagcgagacgtcaagaacaattatagttcaaaaatatctaatcactacagatatcttaatatcaagctaacactacagaaaattctcacccatcatgccatcatgggaaacaccttagttttgaaaaagaaaacaaaaacctatggttggaccttcaagggggtaaaatggaaaaacaatctattattgatagtgtggcgccaatattttctacaaaaaatatattccctattgtcaagtatagaaaattaatcctatcccttatgagattatttttttatcccccttccttatagttatgtctttgagaataagataaaacccatatgaaaagaaaaattgtattcaccctagatgttcaaaatatactattgttatacaatggcttagagaccaatgatgcatagtagcactcagcactatgtacctcagtacatggcaaatactacctctgtccctaaagccctaaattacacacgctgtgttcgttagtgtagtttgaaaactaataggttgtttggtttggtgccacacattaaaatagagtaatggattagcacataagtataaatttattagtttaaaatttttaaaaataaattaatatatttttaaagcaacttttctatagatattttaaaaaatatattatttagcagtttaaaagcatgtgtgaaaaaggagaaaatagttgagaaggagcaaaaaggccacaccagagagtactctcgttatatatttactcccttcgtcccataaaaaccgaatctaaaaccggatatgatatatcttagtagtatgaatctgaatatatatatatattcagatatttagattcatatgtattatattcggttttagattcgttttttataggatggagggagtacactagtactactactacatccacgagttccccaatgccaaaaatactgcagaaattggatttcaccttagtgaattatcaccgtattgattctcctcatctttgctccaaagagaaaccgcggggctgcagaggatgcaacagctaggatcatgcggcgaagcagagcgcagagcggagggtagagtgcgtcattgcgaacctttggggattaacctcgccgacgatgaagccttcgaccgtgctgcccgagaccgagagcatatgccctcacggccgcctgaggtagagacgaggccatggaaggcggccggcggccgctgcgtcggacgcgttgaggggctcggggatttggaaatttgcgtttggttttcgcggcggagagccggagataacacagagaaactaaccaatagtgttgccaaatcggcatcaatgcggatctgagtggtggtggtggtggactggtggttgcccccacccccaaccgcgtagaccacgttggcacgcggccgccgcaccagtccccccctccgccgcagcgcaatgcaccaccagatttggcgcctcctccccagcgccctctcgccgatccacgccggagctccccggccgagccgcccgccggcgcggctaggccgcccttcaccgcaacgacggcgggcgctcgcgctcacgcacctcgccacccggcgcacatgtcgcctcctcgctgtctccgcccagtccgccagcccccacgccggcttgaggtccgcacttactcgtcgaatttccttcatcgctattcatggaatctgaggaagagttggaattgtggtttgtggtggaatgtaatacctggtacccttactggatgggaggaacaatgccgcacagctaaactggtgttaatttgggggaagtgccaattttatgccttctagtgctaaagcttgtgaattcagtttttggattatgtgatgtgcattgtaatgccgaattatgtgttagtctttggctaaaacttttgtctatgatcccctgagtagtccggatatctttagatattggatggtatcatgatcaatatacctcgcttgttcaacttttctatgatcctggatgatgccctggatatgaaattgttgttagtccttgtaattttcaggttggatcagtttttcgaggtggagatgaaggtacgagattatgaactcgaccaatatggggttgtcaacaatgccatctatgctagttactgccaacatggtgagttctgttctaccaatgaaacaaactaaaagaacatctcatgtatattaattaggtcagttaatatgattcctatagcatgtttagaatttaattaaaataatatgattaccatggttggttctgacaaaattaaggattcatttattttttaaaaaaattgagcaggtcgtcatgagctacttgaaagtgtaggcataagtgcagatgcagtagcacgcagcggtgagtcgctggccctctctgaactgcacctcaagtactacgcgcctttgagagtaacatccttgtttcccaagttgtgaaaaaaccagaactgaaaaatgttgatgtgatactatgaaactaataacagatcaaactctaaatattgataataggttcatttgggtctaacttctccctttgtttctttgacttgtcagagtggtgacaagttcgtcgttaaggtcaggcttgcgagcacaaaaggtataaggatgatattcgagcacttcattgaaaagctgcctaatcgtgaggtatgcagcacaaataattgcagattttagaataggaaaaggaattaaaagcacagtacgtttcaaattctcaatcatgttggtaacaaatcttggcagcaatggcacaatgccatcagtagcaacgtactagcatttttcgcaacatagtaccaacttatgaaatctatatgttatttcagtcacaaattggtcgtaggatttcctttgcaactgctctttgcatagatcacacttttccatattcttctcctagcagctcattttggaagcgaaggcaacagcggtttgtttgaacaaagactaccgccccacccgtatatctccagagttcctgtccaagctgcagttcttcacttctgaaggcagtagcagttaagtcactgtactcatcgtcataacctgcgataaatcactgtatcccattttccatcgtattgtctttgttcaaatgaaccaattgattgaagcatttgacttcagtgacatttctaatctgtgataaatctaactgcattctttatttgattttcttggagtgagcacgcgttccaacgtttgaatacatcgtccaaattcagcaaaaactttgaatggctatgttgagctcatggatatgatgtgagaaactttttttttttttttgggggggggggggggggttgagcactggttctttctgtgctaggttacatatctatgagacccggctttagtcaggcaagggctcaagttctattcataggagatctgaggtttctgaaccctttccacacaatggatgaacctttcagtcccaggcatccaattactagttgtgatagagtgaatgttcaccaattgactagtataagtagtgaacatctcccaatggaaaaaagctatcgaaattttaactttatgcaaaattttcagttttgagttaaaaatttgcacattcttagttcaaaacatctactaacattgaacatagtagttcagatttttttttatttcactggttagctcacaatggctgctgtgtttgacatgcgaggaaaagagaagatcgaggatacgcaaaacaagataagccattagcattagcgtatggttaattaattattaattattttaaatttgaaaatgagttattaatatataatttttaaagtaacttttctatatttttttctaaaagaatactccctccggtttcattttaattgacgctttggacaatgacacgctctacaagatatacatttgaccttatttttttattataatatatacaataaataaatacatgtttatttttattatagtgttttgaaagacaaatctatatatgtttttctagtttctttaaactaaatatctttaaagttattgatggttaaagttataaaaggttaacattaaccttgtccaagaaccagggggagtatatcgtttagtagttcgggcaatcaatcaaaagctaccgaacgcagccgaatacatatggcgatttcggatagcctcgccaatatgctactacgtggcaatatctagaacgaaattacgtggacaaatccactaggtaacctatgcgaaagcactaaatgaacccacataacaggatcagcgagaacgtaccgtgccggggagaaatgtttccaaatggccgcttgaccgcaaaaagcttagtgcctttttatcccttaacaagaattcctaaatatccactccccggaaaagaaattcaaggtctgccgcactcggaaggtcttgtttgtgttaaagtcggatttcgcaatggatgaaactagggtttcccaaaccaccggggccggggttatcgtgccccggcagtaagcacggtaaccgtaaaaaaccgtacgaaaccgtgcaaaatttatcaaaaattcaaattattttttaaatttatttgaatttaaggaggttaccgcggtttttctattaccgtacccccgcggccggtaaccgcggtaaccgcacggttaccgacggtaagttgaaccctggatgaaaccaccataagcttgaaattttggccaattaagattggattaaattccactagccgaaaaaaaaaaccgaatacatcattggtatacctttttagccgtgtaggagtttgatatagactatatttaggggagtttaaaattcgcaaaaaaaagttagttgatagttccgttcctgagaatatgaaaaagctaaaaatcccatcttcaagtttctaatttattttctaaaaattttttagttcttggagaagttgtatatgcaaaagcttccaaatagcgaagtgagcgttggtagaatatgtgtgctagtatttacccgttaacagcaaggtgttcataataatttcatcaatcacaatatacgtcgaccaatattttaaaagtgcccatccgaaatatatccatactaggtcgaacgaaaacaccccggataaaatcgggcagtctcttgatgcgcgcggtgtagctgcagggagctagcaggagaagctggaggcgcaccgcgcacgcccgaccggagccagccatggagcgggcatggcgcgcgctccgcgcatggagcgccgcaatacgctctctctctctctctcgcgcgcgcgcgcggatggcatgtgccttccctgcaggcgaccttgccggcttgccgctcgtctccccttccgcccgccgatggcgaccagtctgtccactcgttcgccttcgtgccgctgctgctcgtgcgtgcggcgccctatgttgaaccggatcggggggacgggacgacgttccaccgttcacggcgcgcggggttgtcgtaaagccatcacattcatcggaatggggaacctgcctagctgctgccctcgtgcgccgtacccccatcgaatcctagccgtcggttcagctccgcctgatggcccagacggtccagatcagccgatctcgccaggagagctggttggtccaacgtgacggcctctgacgcacgcacgcaaggcaggcaggacgacgagaacgcgtccatgtacacgtaggcaacacacagctggagcttttctttgaagagaaaaatagcaaacgaaggaaatgattctgctcgttttagagaaaaacatataggttacgtgcatatatcggcattttcttttgaaatccacattaacatgcataaatatattgcatggaccttgacaactctcgctgtcataatgcatgctcctgtcagaacctagctaccgactaagtactctaacaatgggataattaatgtcagattactgcgtagggtgcgtcaggtgaaagagataactagccaaattaattgtgcgcgcacgaaactttttcctgtgtgcttgatttccacatcatcatatataggtcaacctagaaaatacaccactcttccttgaattttgctcgtggcatagttccccatttaaaaatgttattactaatctggttgtcaaattgcggtaagtggtgctgtgactaagtgtgaattatcagaatatatgtgacgtatgtggcacgtgcaccagtacatggtaaaaacctttactgtttgagcgggaatttgtttgctcgagagtatctagtttttgaaacatctctctggtgcagaggaattgtcgtgtttatgcttattttttcctccttctgatgaaagataggatcactattgtttgcagcatttttcataaaaaataatcatgtcgaataagcgtgtggctagttttcgacgatgaggaccagcacgttttttacagcagaagtcaaaactcgatcataatgtcctcacgcaccggagtggattttaaagtctcgcgttaattatatcacttaaataattacgatttttttaaaaaatatgaagatgtattaatatgtgatatatcactctacaaatatccaatttagaattcaacatgtcacaacggaaaaaataaatttgactcaacttctacattactaaatttgttttgtcttgcgacatgtagaagttgaattgtaaattttatgtttatggagtgatatataatatattaatacacattcttaaattttttttatacctgttcaagaggcatgcaaacaacgaggggatttaaaatagtatttgtcacggtgcaggccttgcctctaacgaggggatttaaaatgatttctgtcatagtttaccctttgcacgtgtatataggcttagatgtcggtgtcccatgcacacatgtgaatttccttctaatatagacgtataatttttttgcgcgatcgtgaaaaatgcacacatttagcatgtagtatatgcctctttgtgtgtgtgaaattttacagagtgcatatgaatttcacacgttgcaaatttgtgtgttcagattatagtaaggcatggcaattgctaagaatctgcgtgtgtgcagactgtttccgaaagatcaaatgacgcaacctagatacgatatctcacagacccactgtacataccccaacctgacaaatcaacactgtcaggatcggagtaacagtattttaatgcttcccaactccatcaccgcaatatcgtatcagccctaacggtcgacgaccggccggccagccggtgacccccatgggccgtcacttagctgggtgcgccaccagcgacggcgccccaatactctggtcaagaaacgtgccactacactgtggtttgtgcatatggaagcccagttcattctctgccgttgtctcatggtgaccggtccgacgaccaggaaaggtaaaatccagcgcgcgtactctgctctatacaaccgaacagtcttcaacgcaaaaaccgcatgcgagcaaactcagacttttgagggtagagagaagaacggtaatcacctagctagcttacacgccggattggactttccgttgcaaaaactacgtgtgcagcgttgaacagctaatcacctgtcctttcctgtcccacggatcatcacctatataagcgccatgcatgcaccgccatgagggaaatatcacagcaatcgcttcatcagctcgccgattgcaacgtgagttctactacacactagcagttgatacacacacacagttcaggcggcgataagctagcctgaggcctgaatatatatagcagctagagatactagtactgaattcacaatgcagcagcagcagctgtgcagcagccactgcctccctgcccgtgccggcagcatcgccagccccggctccggccgccgcgtggtgcccctcggccgccggcgggcgagcctcggaaaggtcacggcgtacgcctacccgacgactcgccgcgtcgtcgatgccgcaaaatccagcctgcttcaggatgtccacgttgctgcctcgaatcccagcctgcagctgctgcaggattatgctcccgccaagaagtcagcaaaacagcagaacggctcaaggtcctccttcgatcgagatcatttcaccaatctactccattaatcattaatttcctcacttcatttttgaatatatgcatgacattgtaaactttcagacattgatatttaccatcttactcaattttttaatataaaaaatactccatccgtttcagggtataagatgttttgacttcagtcaaagtcaaactgctttaaatttaatctagtttatagaaaaaataataataataatttcaactcaaaacaaatttattatgaaaatatatttaattattgatttaataaaactaatttgtaattataaatattagtatatttgtgtataaacttagttaaatttgaagtagtttgacttttactaaaatcaaaacatcttctaacctgaaacgaagggtatatcatacctaaagtacaattaatgttaaaacaagtccccacagaataaataatacttacttacataaaagtccttttaaataaaataaatgatcaaatatcatgtctaaaatcaccatcatcataaattcatttaaaaatggagattgtaatttctattgttgatcttttgatatttcagagaaaaaaaattaactctgatgttttgggtattatgaaatctctcaggacgaaggacgggttttacgaggtcgagatgacggtccaggacgacgagcttgacgagtacggcgtcgtcaacaacgccatctacgccagctacatccacagtggtaagctaatacatctccaaaagtaactgaagcatctgcatgctaaacctgttataaataatctgaaccgtgcgtttcatgtgtatcaggccgtgacgttttccttgaaaatgtcggcgttggcgtggactactggacgtcgacgggcaacgcgctggctctttcagaattgaacctcaagttctacacgcccttacgggtacatcttctttcttgttttacttattactattttggacatctatctcccaatcttgatcaacttcatgtttttatggtcacggcacacacaccgagaaaatctaacaaacatttgccttgcgttatttccagaaggatgatagattcgtcgtcaggatgaaggtcgtgaagatcaaaggtgtgagaataatcgtcgaacatttgatcgagacgctgccagatcgtaaggtaagcatgaatacacagggattctacagctaattcattctctgttaatttagaggtgattttattaagaggtattatactttttagtgtaaagcttgataccttgggataatttagtgtaaattttaattatctttaggtacttttcaagcatagtaaagtttctctaattttagctaatggtgatcgatcgatctcacacaatgattttactgctgcttctcccagctcgtagtggatgccaaagcaaccgccgtttgcctcgacaacaaataccgcccaacccgtgtgttcccggagttgtcgacaaagttacatcagttcttcctgtcataaacggctctttgttgctctcatgacaagaagtggatgaaccttatgtgctctaccggtgtacagagcaaggcacaatttgtttgatctacattttttttaccagaattatgaagcatactgtagtaaataaagagtgaataagttagtgctgaccggcttagccgtgagccgctttatgtgaggatgagatgtagatacgcaatacaaatgtgcacctgttcagcagctttcatttcaatgggcattccattaaaaaaaaattatgatcttccatcgtgccttggatttacagtttgcatgattgtttctcaacaagtgaaaagctgcgtatttttatcacgtataaccgtagactacactcgagtacagaacagataaaactcgatcagatgtataatccacggaacaagtattagcacttcagcaggtgaacccacaaacgcacgtgttgctagatgagaacacaagcaacagcaagagaaacaaatgtacggctgcttgaccgtttctaccacatggcaataccagtcgttttcattcaaaaagatcacatcaatataataccacaacaaacttctgccaggtaatgacaatagctaaaatataaagaaacacagctagtaagtagtaagacagttcctgtgtgcttgaattttggcggcggctgtgcttttctgaaactgaacatggtctacacatgtcataggtgcttcgacccttgccagttcaaataccaaattcagaagtcagactcaattggagaacagaaacagtttttaatgccaaatgattattcaagtcactggttaataaatttgagaagtgcatgttccacaagcattagattgaaaatctacctacacaaacattagattgaaaatctacaaggtatgttgaagaacctggtctttatgatttcaaccagtcacttatatataggtatgtgacgctgagagccagttttgccaccaatgatcaatccaacagcaccaatattcaccatgatgcagataggcaccgtcattcttcgtgtcagtcactgctaccctggcctgggcacacatgatggagatacagtgtataaattcgaaacccaagtgtccatagcttcaaaatttagattctttcgaatttgaaacttaggtgtccattgcatgaggtgtaaagtactttaggtgtatgatataccactagttaggtgaatttgaatttgagactaagtttcaaagtactttaggtgaatttgaaacttagctgtctattctggtatatcatacatttaggtcagactttgaaagagccattgcataagtttcgaatttatacactggtatatcatgaatttaggttatggattatagaattggtgtccataccttcgaaatttaggttctctcatgttgaaaacgaaactatgttcctcaattatttcaatgcataagctaactaggtccagtgtataaattcagagatgtgttggggcatgcaacccacatttcaatcctagttcacataaagttaaggttaactgtcccccaaagcaaacaaaattgatccagtcaaatccatgtcagataacaatatatcagaaaagttcacaaaattgttcctatcaattcatcaagtgaagcctgaaaatcaaaggtgcaagaataaaagcagaccacatgattgaaatacagtcaataaggtatggatttacctcacatgctcagatggcttgccaatcctgcgtgctgacagggtccctgcatatgtcatcatataatagtgaaatatcattatctacggtgcccagattcatggtctatgaacagttaatgatcttgcttaccatcttcatgtatctagcacttttgtttcacttgccagctcatacagaaagtcagaggaaccgctgttcgcctcaacaaacacttttgttttacactcatagatttgttgacaaaaagtactgcagttcttctcatccaagaataactaaaaagctcagatagcaagattgcattcactgcttcgctttcttaataagactgagcttatgaaacttgtgtgctctcctacattcactgcttcgctttcttaataagaccgagcttatgaaacttgtgtgctctcctgattttttttttgggtgatttttctctaaacaccatggcaagcaatatgtatcttacacccgctgcttaagctggtcttaaattggactgatggagtatcagaatttaacaattcattagaaagccaaaatagacatatgtagtgttatttccttttctgaagtaatagtaaagttatacacgaaatagaagcaaaaagttgagcaataatttagcacaacacacaaaaagcatagcatcgacttccaatggatgccacaagaacattgattcatttcacctgagagtggctgatgttgaaacgccgaccacttcgagtccactacaccatacatgtcaatgtacaccactacactatgctgcgatgaagccaaaaggtttctctgctgcgttcctgcttcaacccattgcatatttgagagaatcaccagctccttggaagaacaggcatgatagagcgaaatccgcaacgaaaatcccaactaaagaaacgaccactgcagatgtggtggactctccaacgcccttggctccaccatgggtggtgacaccccaagcacagctcacaacagcaataatggcgccaaacacctgagattttagcaaggaactgatcaagtcccatggccgcagcgcccttcgcgctgactccagaatgatgctggtactgacaccgaagatcgaatcagctaagaatgccgaggacgccagaccgagcgcgaagctcatgagggttagcacgggcagcgcaagcacacaagcgacgacgcgagggaccacgaggtaatcgacgggctgcgcaccaaggacgcggagggtgtcggtctgctccgacacctgcatggtccccagctctgcagcaaacgcggagccgacccggcccgcggcgacgacggcggtgacgaccggggagagctcgcgggagagcgcgagggcgaggacgccgccgacggagcggtggaggccgaggcgagtgaactcgcgcacgaactggatggtgaaggccatgccgacgaatgccgcggtgaggagcgagacccccgcgctcccggggcccacgcggcggagctgcgcgaggaggttgcggcggtggacgcggccggtgaggacgcggtggaagacctgccccgcgagaagcagcgccgagagcccccgccagatcgcgcgcggcggggaccacctggagaagggagggggcgggggctccggggacgccggcggaggcgagggcggagaattattgctgccggtgggggccggggtgagggagaggcggggcacgggcaggcggcggcacgaatggtggaggcggaagaggaggtgagacttgtggttcgcgctgtcgccggcgccggtacaggataagctgatgagagggtgggtggtagcggagattggacggagtaggaaggcggcgccggcaccggcggacggcatgacggtggccggagatcgggacggtggcggtgggtgggtggtgggcgattgggtgggtcggacggacggaggtgatggggatggcttcgtgctgcgggaaggtagtggttgttcttgtgggcttcttgatgttgggctttctgagctctcatgtgatgggatcactgggccaaggcccaagataagtcaactttgacaaaagttaatctatgttttaaaacttaattttagcatgatggttttgattttgtttttcgtagtttattttttattgctgacttttagttgtttagaaaaaatattatttataaattatttttattggaaaaatattatttataaattatttttattggttcgtttaacttttcatgctttgtaccatagcggcgcaacaactaatcacaaacacaatacggaacgggcgcacacgcagccacccgatccggaacagaacaccattaacacacgggtataagcctccattaatccttacttgcatcttcatcctcccatgcaaaattcaacctgagaattaattcacgtacacgaaagattagtggcagtagtgaagctgtggctatctcgctattgacttactatctcaataatggggcttgcatgtcagggcagagtcgcacatgcgttagtttgccgtgttcaactgcttgcaagttgcaacagcgatcgatgccaagctaataggtacagacactgcaaatctgcaatcctttgggcaagtacaggtacgtacatcatgggcatagggatggcaatgggtcgggt

SEQ ID NO: 9998 - DNA, 49470 bp, Oryza sativa
catgtcatgcccctcgggccctcgtgctgccttgccccgaggcctcgcccaactgcatgtggcagggggagcgagcggagaggggacccaggctaaacgctatcaatgcgaggcgccccaactgcccctcaccgcatttaatgcggtaggggcagacgtgcggtgccgcccgactgacgcacgttagtcaggactgaccaagtctgtgacgggcccatcgccggtcaagaccgattggacaagcggccgtgcccccacgtcgcctctgtatccggcggagtggagataggtatgacccgtcccatcggagcgtcattcggagctccctccacgagaggaggaccaccacaagtcttcacccatttataaggggatgacagggttgtcccccgtgtcaggcggggggcggcgctgggtcgcgctcaaggacgggctgctgcttagcttccgggcgaaggcacggatcgtggcccggacaaggtgaagtgggtccccctcccatgaaaagttaggtagaggcggtgcatgtggtatccccttgagctataaaaggaggaccttgcccaccgagaaaagggacgactctcagcaagcctggactctaggaaaagaagagcgagagccctctccagagtttaggagcccttgtaacactcaaccttagtcccacacacaggagtagggtattacgctccatagcatcccgaacctgtataatctcgtcacccatatgtgacttagtagcattcagggcggatacacgatctctggaggcgagctctttcccccagccgaactcacaaaaaggggatctcacgatttcccgctagagaggatcactcctcgacagggacggagggagtatatggaattatatcaacagtagatatatatgaaccagtaatatcaaccggtgttagaagaagaatgttgtattgcatagtgcatacatgatcccgctgaccatcttagatacttcctccatttcacaatgtaagtcattctaacattttccacattcatattgatgttaataaatctagatagatatatatgtttagattcattaacattaatataacagaaaacctacaccacggcatcccgtggagacgggatcccctcctcctacctcactcctcttcccccaaatcatccggatcccctcctcctacctcactctcctcccccaaatcacacgacactgcagccctccccgtcacctcctcctacctcactctcctcccccaaatcaggcggcactgcagccctccccgtcgccgtcacccaccgctcgccggagccggcggccgccgccgcggggaaggtggcgatggcgaggagctcggcggcgggagcggggcgcggtggagccggaacggggtgcggttgcggcggcatcctccatggccggcaacaagtggatctgctacagcatcggtgatgaagaccttcatggccggcggcaggggtgcgccgagcacgtcgtcgtccacagccggttgaggaggctgtggaggcatggtacaaggtaggcaccagatctgtcgccttctcatcctcggcagcggcccccaggcgacgagctcgtcccgctgctcgacctcccggactccgcaactgctcctcctcctctctcttggggtatcacgctgttatcatgtaccaaggtttgatatctagataccagctcgatacctagggtaccagttgtcaaagtatagcccgtaccagggtaccaggtactgttacctaccgataccagggtacaggtacaaggtactagcccagtgtaccaggtaccatgtattacccggtactagggtaccaggtattggtacctgccagtaccagggtactaggtactaggtaccagtcgctacccaaggtaccaggtaccaggtactagcccagtaaccaaggtaccaggtaccgggtattagccggtactagggtactaggtacttgtacttgtcggtactagggtatcaggtatcaagtactagtcactacccaaggtaccaggtaccagcccggtaaccaaggtacaagtattaggaaagagtcattgaaattatcccgttgcaacgggatcccattgtatagcagacctcttaatataaatgtgggaaatgctagaatgacttacattgtgaaacggagggagtatctttcagtttattatcacatttttcctctatgtagatcgaatatatgaccaaaatgccaaaagcacgcacgtagtatttcagttgagaacgacaaaaaaaactcttttctccattgctataaaagttttttcttaaaaaataccgtttaccaattcggaaaatgtgtgtataaaaaagaagagagtagaagctaggaacctatagttctcagcttcaaccattccagcgtcaatctagcccgtatgcattgtcttcctctcagcgatccatcactcaacatcatgcacatcatgtactcagggtgtgcttagttcctgaaaaaagttaaaagtttaaagaaagttaagagcttaaaaaaagttaaaaatttatatgtgtaggaaagtttttaatgtgatatgatatgatggaaagttgggaatagagggaaactaaacatggcctcaaggaggtggatctagcgtggatgctgggggaactcaagtccccttatcctactgagggggtggatctagcgtaggtgttgagggaactcaagtccccctatcccactgatcacttttgatagaaggagagaaggaaagagaaaggagaggggaagatggaacaatatggaggttgaatgtgggagaagaaaatgagtcttctctttaatcccattctgggatctgtccctgtatgtactggacacgcacaccataaatcggcacgacggatacagagaaaatctagtatcgcacaatgcctgctagtaatagatcatttctccaccgagtcactcatctcctaaaacgtgtgcattgccgacagcccaggaaaggggcactgggcacaatgtacacgccagcaagtaccagcaaggcagaaagctaccctgtgctgcaagcaaaaacaacatatgagatggagtaaagttctgttcgagcatcagcatattgtatccaatcatccatggttgagctcacgactactccctccgtctcaaaaaaaaagacaaacactgtatccaactttaactatccgttttatatgaattttttttataatttatattttcattgttgttagatgataaaatatgattaatattttataagtgacttgtctttttaattttttttataattttttcaaataagacggacggttaaacgttggacacggaaatcaagatttgtttttttatacggacggagtacatgactgcatgaggatcgaggaacaagattctacagtgaccagcaggtccctgccatagccggagcgatcataatatgttcgagagtttagactaaccgtcccgtgcgcccgcagagctcgcgtccctactgctgccatgcacgcacgcacgcagagcggctctccaaccgggctacctgtcctgacctgcatctacgctactctgtgtcacgctgcatgcagccatcgagtgcaaaaggccacttggaattgaacttgagtatgattgagccgagagaacaggcgcaagaccggatgaccaacccatcccaatccaaccgccggaacaagatgacaagcgcgcaaatcatgttcggaattgggtcgtttactcgtttcgtgcggtccttggccccgtccatccgaactgccgcgcagcgccggcctccctcctttccccccgaaaagccacggtcccctgcacctccccctgcacctccccccgcacagctgcaccgcgcccggcaatttcactgtttcaccgggcgagaggacggcacacggcacatttgccggggttgacgggtggattgatcggcgatgaccgacgatgagtcgagacgagttgcattgaagcggtgggaggtgacaggtgaggcgaggtgaagccgcgctgtgcctgtgcctgtgcgtgcgcaacagtggcgcgcagatgtggtggtccctgtcacgctttgggtttggagtttggacccccacacattgcgggggccggggaggggaggcgcccgagaccccgagtgtggtgtggtgcacgactcggcgtcgcatgctgcgccgtgtggccgatccccgggtgtagcggaagcgcgttggttgatgaatctgacggtcattacaacactgcatctgttactctgatcgtgcaatcccgtttttggtgcctggtgccgctccggaagcgagaatttttcgtgcctctcgcggaaattgaatagtttgttgtgaaagaaaagacattacgatgtttagggaggttaataggcactacattgacctgatatgtttagggaggttaataggcactacattgacctgatagcttactcctacgttttgttcagagaggtaaacaagcgatttcaaaagcacttgtcgaactgttaccatcaacctcttgtgctgctgctgttgtttgctgctcctgctgctgactcgcgttcagaggaggacggacagcttgtccggttacttacctccggtgcaccccctcatatcagcatcaggccagttgtgcagagcgagagctttaaaagaataagcacaagtgttggtcagtacataaccccctggcttaagaaaagtcagcagcaataggaaggcaactttaacccctacggaccccagctttggtgtcctgcaggctgcagcagccagcagggcagcgaggagaggttgatccgttgatgcaaatgcagtactagtagtacacatgcaaacaaggtgcaaaagcattggcagggaaaggtacatggcagcataaacaaatacagtacgggctacacgagagacttgccatcgcttgcgtcgatcgcttaagaaaagggagctgtcagtctcatgatcggatagcacgttctcatgcagtttgtttagtgtcgtagcttaaagaaattcgtaagcagacatggaactaactcatccatcaggccatcacacctgtaacactttttcaaatccaagatttgtttgcaagcttcaagagaaacaaccggcttctgagttgtttaagctggcgctcaaagcgttcccttttttttttctaagcagaaaggggccaatcaagggacaggagatcatgaaggcaaagaatgcccaaatagggctttgcagcacgctggagggggacacaggccaagtgagaggtcaagggattaaataagccctggaaataaaggaccgttgtactgtgtctgtccaccattgatcaattttactaatcaacaactggcctctgtacttacgttgcaaatgaaaagcatggatatggatgaacactgagggaccacacgcaatgggtggtgggggtggtcgacgggcgaccggtggccgtgcatcagccactcgatctccgatgttcggttgcggtgccactgtcccaaatggtccacaagtcaggtctgtagatttgcaaatagtatagcagacactacagctgaacgagcacgattaataaggaaacagcacgagtggggcatgcatagcacatgagatgggtcagaagtacatttggtgcatatgaaacggatgagagcaaacaacatcaagtctctattgcgcgggtgacgagcaattttaaaggtgattaccagctgtgcctacacgcagcgatgatgaaatttgggtaatcgatgacaaggcaaaaacactttactactatgtactattccctccgtcccataatataaggaattttgagtttttacttgcaacgtttgaccactcgtcttatttaaaaaaaattagaattattatttattttatttgtgacttactttattatctaccgtattttaagtacaacttttcgctttttatatttgcaaaaaaaatttaaataagacgagtagtcaaacgtggcaaacaaaaacaaattacttatatcgtgggacggagagattagtactctagtaggacaggaagagtactaaatactgtagtagtactaatagatttgtgttctgagcaaaagcagaatacagtaaccatatgcaaccaaggaaattcgcacgttgctttcgacattagtctgagctgtgtagtaatggtagctgaatgaaaagtctgagctgctgtgcaattctgctgctctctagtgtgactgtgaggacatgtttagagctatattttttcaaaagcaaactatagagataatccagatggccgtttttatctccaaggtttcggatgaacaaaaagaaacagccaggaatttcaaactacactggcaaaagcacagatgaatcacaaaaatcgccaattttgagctattcaagaccaaaatacaaatccctatatacaattagcagaacacaaatatgtgcatcgtctgcatttgcaaactctgaggaatatgaagtctatgaagtattagtgagtataggccttaaaaacataaaagtataacataatcttttttttttgcgaggaaaagtataacataatctccgccgtagaatcagtgtatacatcgattccttgtcctccaattgcaggcaactattcttgaatcttcaacaaaagctagcaagtataaaaggaccaaaataaaatctgattctatccgattcacctcttcttgtcacaactacttatcatccatgccctccttttattttcagtagtataaaccattcaaacatacacttcactgattagaacttaaaacaaattaattcatcatgctatatattactaatgttgcatacctcagatgtacacaggaattttccaatttggtctattgtacacaggaattgctaatgctgcaaacctcagatgtttagcagaacaaactaaccattgcacccatccctggacaccctaaccattctttgtttccactaaacagaaaacctttacaccggcgtgcattttgtttcaaaatcatggcatatacctttttttcagcaaaatcgtctagtgtgacaataatcaataatatcccaagctatattatttgtgtaaaacaataaaatttgctattgtaatattcagttatggttattccagcatgtaagtgtaatgcatatttgagtttagacagatccatacatcaaattagcaatcattggatcaagcaatttgataatgcactccgtttggatattatgacagcctagcccctcctactattaaaatgacaggctaagctatgcaatgcctcgtgcgtgtagatatcagaggctgagtgaatcaacaactaatctaccaaacatcaccaaaagaactaaaaacagcaccgtatacacactaatgcttgtcataaggacattcaacatgccaaattatcttatctattcacaacgaaatgtttccaagaacatgaagtggccaattgagcggagagcaacaacatagtggtaagaccctagaggccatagccactggtcacacactacagagacactcataccaagattgccaaatccattaggcctacctaataaacaacagagtgtgcaacaaccatgataataatttctttgcaatgtttaaattgcaagacaaaattcatattactggagttaaacatgcctgcaaatggtgtaggaatcatgatggtcgaggcaggtgtgatcagcatcgccatgctgagacggatacaagctcgccacgctgccaatagagtgcaaggcctgctccacgcttctccacatggaagcctcggacctgcacccgcttcaagaggcagtcagcctgtgcctccgcaaggttgctgagtggttgaggtgcaaaccctgctgatgttagcactgtccgccaagcgatcgctttgtcagctctacgccgcccaagaactgcatcctccactctgggctgaatcagaaacctctcgatcttactgacagcatccgcatcagtgccagcagcatcaagtgattcaagaagacatagacaagactgtaagcaattcaagaagtgttgggaaaatgggaggtcgctccgatcactgccatagtcaatagcaaccacaatcttaggagcaagctgtttcaccaactgaagcatagctgggagtggagtgcgtgctgagcaaccaactgggaggcttactgcaacaacctcatcagctgtaggagcaatgagttccataggatcaaatgcgtcgagattaatagcattgaactcaaatggaataccaagatcagcagcaaactgtgagaggttatcctgagtaagatgcagctcaagcgggtggtgggaggcggctgagacgaaggctgtgagcttcaacatcggcaaggacacaccgccagagccacagcggtgagcaagctcctgcaagaacgaagcccactggccgccgacaccgaggtcgaaatcaatgacgcggatacaagacgcggttgtgctggcgatctcatccagaagcgcctgagttaccgtgaagttggcaaactggagcacgggggagaggtcggagaaggatttgtaagcggtgagcttcagggcgacgtcgagcggagacgtgagacgggtggcggcgtggtggccgtcggcgagcgcgaggaggagggcgtcctttaggtaggaggcggagcggaggaaaggcttcccaattgggggaagctgctgattgagccgcgccaatatctctcgcgcgcctatggagttgccgacttcggttgccttcgccgccgctgcaagctcgtccaggaggtgttgctgctgcgccgccgccgccgccgcggttgacttcatcgcgttgcgcggatgctgcatcgaaggctggagctggaagggtaccgcgctatgtagcgttggaaacgggaggcattgcgcgggcgccggcggcggtggctggggctggttgtggaggaggaagagattgtcgggcacggagtggtggcgcttcggcggtggctggagcagtggctgttgttgatggtcggagaaggaggggaacggcatgaacaaggtggaggccggcgtcggctgatgctggttgaggagtagtgtgggtgatggcaagccaaggagagggggcttcatgtcagcgccgttgtggaaaggcgcagtagtcgccggcggcggctggagcgccgcttcgggcgacaggaggccgaaagcggaggtggccttgctattgctgccgctgctgcttgtgagcgacctcccgccggaggacgacaggtcggaggcgagggcggctggcgaggagacgccaccggggtgatgctgcagcgggaacccgaacccggcggcattggcgagagctgctgctgcgagagccccggcgcctggggttccatgtcgccgggggcagccatgatccagttcaaaaatgtctgctcctggcctgccgccgccgcggcgtcgccgagcatggcgtcccagctctcctccgcgacgaagcccacatccagggcccccggtatgggcggcagctcaccgccaccgccgccgccgtgttcgccgggggccgcccatctggtggcttcggcggcggctgcgctgctctccgaaaccgccgccacgccggtagatatagaatccgccgcgccgctaccatgggacgaagacagcgtcgatgtggagttgggcgggctcgggctccccctgcagtccagcaccgacctcggctccaccagcaacgacccccccgcgcccccgccgccgccgcctttgtcctccggccaaagcagcgccgctatgctccccgcgagctccgccgccccgttcccgtcggcactgaagggtgccgccctcatctaccaacctactcgcgcatgctcccgccgcgcgccgccgcccgccgcccgcccccctctcgatcggcgcgagagagatatggagggaaggggatcaagaaaaacaataaaacagatgaggccgcttgcttgtgtgcgtgggtgtggactgtggaacagcgaagatggagagaagaaagccttgtgcgctctcggtctcgtcctcttgcccgtgcggccgtgctactaccagtatagttatgggttgccgtggtgggtgcctgccttggatttctctctctctctaacggtgccatggtccataggagtaggagtagatgcgtgcaacataaaaaaggttggaaagtgtactcccctctccctatctctctttccccatctctgcctatagcttttgtttttcttctctttggtttctcatcgttattattactccctgataccttatctgggttttatttttttgcccccgcgagcttgaattgtggacctcgaacgtgtcgattggcccagctagctttgacggttactagttcgtttcctctcagttgcaagtggagcagtacgagtacctctgtttagattttactcctacataaggtgtagatggatcataacaggagctgaaacgaactttcggtttcggattggaggcaaactttctcgttggtaatctcccctatacactgtagttgttctcgcgtccgacgccatgaatcgccgtcaatgcatactccgtaagtccgtatggtgtagagaggtatgtccactacacactaccgggctgtatttggacacggcccgcgtcttccagtcccaaccgccgagcctacgtaattgccggcccaactgacatgctgcgctcaacttccacattttcccggcccttctttgggccaactcgcaaaccgcccctgcgcggcatggaacgcagcgaatgctcacgcagtcacgccgtcatgcgtcggcgttggagtaacagcgacgccaagcgggcacgcaccgccggctagccgctaaaccaggttttgaaaataaattattgatgagtttattttaaaagttaaaaatgcttaaaaattattttaaaaatccacattctgctcctgcctttgctcgacgatggttttgagcaaacagttttttgttagatttctctctgtctcaaaaagaatcaaactctaaagataaatttagatttgtttttttttgaaatagagagaactaaagaacggtattactatatctttgaaatggtatagccatgatatctactccatataatatcattctctagattctctattaatagtatttctagacgatatgattagtctcttcctttatctttggtttttctctcttccctaagtctcttcctttatcctttgtttttctctcttttctgctataaatcggtctgactgatttgcattgtgtaaataaatactcttttcttctaatacactattcacgtattattattttacgtgttcgttaaaaaaatagtaggtgcaagtgtaacctgatgataatgtagctgtagccctgcgtctgcatgcgagcctgctaaggattgtggtgatagtgtggtgacacggccacaaggacgtttcttcattgcttgcacatgaatctggcctatcttctgtctcaatagccactttgctagggaaaatcagtcaaggtcgcaaaggacgctggtaaactttttttcctttcaatgccctgtcgtgttgacacttgacacaatgaaaaccctccaggacgagttgccacgggggtaggcgagagctgcagcacaaggaccgtgcgcaaatgtatgcatatgagatgtgatatgatatgacctgaccaaactcctggtcctgctttactgggacaacatctacagcaccgtaataagttctcattgctccaacgcagacagtactgggatatcagattggaccaaagaacagtaggcacaaggtcttccacaaattcaaccgctgtcacggtgtcacctaccacaacttgcaatattcagaccaaatcaccaaagtttttttttcctactttacacagggacgaggatgatttttttttttcaaattgtttgatgatctgacgttgcttggctgttttttcaggttttatctctccggggaatctccttatcatccttgtcatcaaataatgtgggaggttgaaattagttcgaatgttacatttcattccaatgccaatctgcctaacagccccaaagctgatgcatctgcccacttacttcggagcagtggagcacgcaattacacaaagctgcgttctggattccaaatgattacttcctctttatccatgatcatgtttttcaaactattacgtcccatgtaaaacctgtttgtatgaaagttttcgtaaaaaaatatatttttttcaaattcataataattaatcctatattatttttacttatagcttatcttgtttcacgcgcaacagaaaagacgaggaagagcagcataatctaaggtgactagttttcacttttcagaaaaccgtagaatctctcacacaacggttggtaccaattagggaaggacgtaatatcaaataaatataaggggtgagacttcgaacttagacaggctagctcaccaccttgtagagctaaccaaaatacctctgggcatttttcattgcagactagaagaaaccatggacattgaaatggtcagatcttaggaggattacgtagaaactaaatttctgaattaaaataggaaccataaaacattctgcatttatgcagtcgtgcataaataagcagagacgcgaaagggcacatagtcaagtaagtaattgtagtgacttgagtagcactacaaggttcttaattcaaatattcatagaagcaaatttcagattgaattatttaggggactaacttcctaatttaaaaacgttgcatatatccgatttgatgtaaagactgaataaaaaatatccttctctaaaaataaatgtaaagaataaataaatgagcagagacgagaaaatttcccgatcaccttcgcaacaggccgtgaagaagacaatcttaattggcaaaccgagacgagactacagcctggtctaggaataagttcattttgactcttttaactagtgaccgaatttgatgcgtatcctgaaccacagtaccggatatctcgacccccaactatttaaaccggtgcaatttaaatttcttggtggttttggagggcggtttcgctgacatgacgcatacgcgacggtgttgacctgatctttatcctacatggcattgacatgacgtttatgtggcactagaattaacaaatatacgtgggactcattgtcatttacacaaaaaaaaatatttgtggaccccacatgtcatcatctctccgctttcccttccccttcttcctcctccctctctctctcccttatctatttctctttctctcccctttttccaacttcggccggccgcggggagtggggctggagcaacggtgacatcagcgggcgaggtcggccgggtgtgcaaggttgggagtggcaggggcggtgggcgggggcgcaaggttgggaggagctccctacccagcgggaggctaccggcctccggttgaggcggaggataaatgggtgaatgacaaatggatcccacatatatgttttcacctaagcaccacatcaatgctgcagactgatcaacagtgctacgtagacgccacgttagtaaaatcgccatccaaaaccgctaaaggagtctaattacatcgttttaatagttggaatgtagatatccggtattgcggtttaaggatacgaattacattcagtcactacttaagggagtcaatgtgaacttattccgcctggtctaacccattttctgggcctctcctgaaacttagcctatccaacaatttctaccccctacggccctaccggcccatcgagttcctcacgtaacaaaccgatccaagtatatcgatctgcagatacgcgtgcatggtacgcataaggtgggtatactatacattcgcgtagccggtagcaatgggcacccgtacgtatgtacgcccgccgtggggacaacggagacggggggaaacggggcgcgcgctccgctgcggcagctttatccgacatctctcacgatcaccactccgccatacaaaaaaaaacctcccttgccaaacgcaaatccccacggcaactcgtcgtttttcacctccacggatcgcatggcattgcgccccaggcgaagtggtggtactaccagtctaccacacaatcactagtgtgtggtataaactggtagtacgtgctcctctgctccgattctttcacgcaccgattcccactcgtttactgtgtgtgggatgctcgtacaaaaaatgtagcataagcataacgccagtatggagtatgcagcatttcagttcaaacttgcatccgtgatagtggactaactgaagattagtttctgaaggaaggaaacatggatcagcgttgatgtgttcagcggctcatgtaattaaccgagggggtaattgaatttgaaacgatactcaatccgcgtgacgacgcttcctacttaagtattccagtacttccagaacagatggcggtaaaagtgatccaacttttcagctatcattagcgggctggatttacatttgcttaatgtcttggccttcagatcgtgcactaatccccacttaaccaaagagaaaatcacagctcttgtccagttctgggacacagtacatttaggtcttctcggccttctcaccgctcctatacaaaaaaacaaagacaatgtacatagcacatagctaactgtgtcatagaacttgggaaacaaatactactactgtactatgaacagcttttaagaaaccatcgggcttaacccatgcaactttctgcccttgtatatattcccaacggcaacccctccgtgtggcccttctctctgtttccctccttgcacgcttgctgctcgatccttggctcattacactgccatcaagatcacctcatgtctcccttcatatccatttcttcttgctgatcattatcactactcgtgtgcctagctagtgccttgccatgtcttgcttgacctctcctcagctggctcccaagatgcagcttaagctcactgccgctgtcgccgctctcctcgtcgtcgtcttctttgcgctcttcgtcggctcatgcgaggcgcgccgccttcgtgcccttggcagggtcagctcgctaaaaccatcgtcgtcacctcctacgccgtacaaggttggtgcagttgaaggaataacttggtatatatcggaatataaagtgttccttttttttggctgttctaatttttccatgcttctcccttgtgcaggatgcggcaagcatgaagcttcatggttctgatccaacgaaccagaagaaggatttatcaagtactagtatggatcatcacatggctagcggggacgatgcgaaggcgaaggacggagtggcaatggcatcaccaggtgcagttcagactacgattgtcgttagggtttcgaaccggctctctcatcaggagcgaagggtggacacagcgtttcatctggactacgctggccctagaacccatcccccctctcacaactgatgagtatgtcgttctgtggcattctctgactctgtctgatgatcttaattactaatatgcaacttaagtgatttatgtatatgagtgttcaatctctaattctggtgcatattcttgcttgtttgctcttatatatgctcaatttgctaataaattaatattatcggtataaatagatcgtagaatgtgtagttttgtagaaagctcgccggctagatattttgcttgcttgaaatatgaattgaagttcacacacatgtttatacatgtaagtttgatagccgtgtgagaactatatgttgacatctatatgttgactatatacaaaacttgatagaaacatgaatcgtaaatatgcattctacacgtcgataagataagataactttatgtgccaactactcaagtaagtaataacagatcgatcttcaacatttgtcagcctattattatatatatatatacccagctacaattctacatacactaattattatagccttattcaaacagcggatgatcacatatatatgcaattagacaatcattttatgaattgcaatattcttatctcttgtttaattccggccgccatgatcgttaggtccgttccagcattcattaggagctccatctcatgggcacttgtttctttgggaaaatatatcgatcacctattttgctaatttatggtcttttatcgtcatgtatcaatcagtctaaattttaatttttaattttggagtccttttatatattctttaatcgtactctatttgctagcattagatttcagaccataactaatataaatataaaagttataatggtaaactatctttaattaatccttttttattgcttatcagtcatggctcaaatggtcatagcaatattttaatttgtgtgcaaacatgcattcttgggcctagtaatatgtaaaaaattttagcctataaatcctaagggttggactgaattttgtatacgtgtttgagaaaaaaaaagaaaagaaacaactaagttggactgtaaaaagaaaaaagaaatcgtgggctgtagcccattaacgctcctaattatactagctagcacgatactaggtagggtaattggagtgggacatccggacaagtgaattcatgcccgacgtatgggcgcgatcaatgatgtgatgatggtgttgttattacgtacctgtgtgtagcatgcatgcaagattgcaagtaggggccaaggcggcaacataaatcgcgcccatccggaatttagaaatcacgtgttctactaccatctgtacactgctggtgctggccatcaatattgcagctatcagttacgcatcggttctactagttcttgctgaactctcacgttgaccaccagtccaccacatatggagatgcggtgtaatttgggaacaaacctccctgatcatcagttccatcccagccgagatttcaggccgcgcatggcaatatggcatgcatgctttgttgtttgttcctctgcgttttgtgtgcttacctgggattggagcgctgtgtgcacttttgttcattccactggctattctgcttgtcaaccaaagaaaactcggtgggtccatacaacaacaagcactagccacaaatccaacaccctgcaactctgcaaagacatggagtcttcacaagagtactgttggcctcgtgcgtaactcgccatcgatcctggtaatcttgggttggaaccttgcttcaagtaaacacaacagtacgtacgttcgctcgccgagcttgttcctcctgagcatgctctccgtaagtcacggtgccctgcttgacgcctctgtgtcctgactaaagaatatattcgcttcaaatccccaagcttattagagcaaggttaatagtatcgcttactgcgagctatacttttatccacatcatttataactaacagagtagttaatttgtataataaacaggctttaacattagctaatgcaaacaatattttattcctcatttatctggttctctctcttcttgtttcctctgatttgtccgtgagcctttcaccatcttgaaacgcgtgtgtagctgagcgactatttagtcgtccactcatattctctctcataccttttctccgccagctcatcgttgtagtttacgtggttgttttagcgccggtgtagcgcctcctattgcacctgctcttagtactgctgctgctgcctctcagtttaacatcattagaggaagattagagattgcagttttgcaccaaaagcaagcaagcacaagtactagtctcatccaagagaagctctatggaaaatcgtcgttgacttgacaaaaataaggtgtgcagaaacaagcttcggtttctggaacaaccaagcagtagtgcagtactagtacttatagttaaagttgccaacccgaggagtgatccatgtgcattggggggcatatgccacacacgagtccaatactgtgacaagtatctcaatcttcccaagaatgtcccccctccacctcaatcttgccaacaatcggctagtaaaataaggcaaatgtgatgggcaggagaaactggctgctccagaaaagacagacatcccaacccagatccaagctaacaacaacagccggtgcacctcgcagccggcccgtcgatcagggctccatcatcccgtcggagaggcgggaactcttcctctgttcgaaagcctccccagcgtccaggcctgaccacgccttttcacgtacaacagatgatacagcgaaacgcccgggtaagaccgtaggaaggagggaacaccgttgagtttgggaatcggcgtacgaaaaggtcttgatgtcactgcaccctgtccgcgccatgcgcgacgccagagggagacttgacgacgcacgctgcgcgtatagcggcacagaggcttgcggacgggggaggcgccgcgaccgcgagggcggttggagaagcggacgcagagagagtccagagacagtggaggattggggttgtaaccgatctgcgtacgggtcgttgcggctccacacttgacacctgcaagcccatggtgacaccttttaggtgacccaagaggtttgggcctgattggtgccatctgctgggccgatgagctccgaacacgacctccttgctgcttttttcctgatgggttggagcatctccgttctccaacaatcactccatcagtcttctcaagctaaattttgataatttcagttaaaaatcgtgcttcaacaacctctcccactgaatggtcaaaccatccggttgaccaaatccctccactgatcacttgccaaatttgatcaaccacactcacttattaattgtgggccccatatgctatccccctcttcttttttgctctcacgcatctctcttctctacatcgctattgtccgccgacgtccctgccactaccccttctccccttgtgccagtctcgagggaacagtatacatgccgaccacgagaaagtagctggtgtaggcttgggtgcgtttgcggtgatggccgcagtggttgtatggaggagatggaagcaaaggaaaggaaacgtgcgggacagcaggaggcactgcccagaggcaccaaccatcaccataggaggaggatggagttggcatgggctcgggcacagttactgccgtccttttctccagcatcaactgccactaccctgttcggcgtcgagctcatccttggagtgctggtcttgaagtagcgggggcggacggggatagagctgaggacagcggaagaggcgcctcaccttccgccgcgccgtcttccgccctcccgcaccgtctaatcctcattggtgttgcctcgtctagcgctacccccttcctcgtcggcatctctagtgggataagacgaagatggggaaaaagaggagggaggagaacatttatgaggctgatatatcggtcccactattatagatctagagtgaagaggctgttggagtgagcaactagttttacttgccaaatcaattagagagctggctatatagatgtttgaagagtctaatttgtatggtctgttggagatggtctaagagaggtctccaaaagttaatgagcatacgtgcgtctaaaaaataatgatgtcatctattaaaaaaaacatagggagtacttgtctttttctttcaacaactctttatttacatttctcctcactatatctccaccaacctcccgctactcatatactcctaatttaattggaggcgtcatagtttttttttccttcctccttaaaatcttcaaaacaaattagaattctttagattatggaatcaaggtagtagtaccttgttgatcaacatttgatactccacagtcactgatatgatatgatatgatatggcaacggccacggtcccagctctcctcctccttggcttaagattttttatctgtttctaataatctgatgtgacgaccctcagacctcaattatcatgtgaagttcaaaactttgatgattaaatggtgtataaataatgtgttcttcctattcttcagaagaataataattctgatggtggtcagaaaaatctaagattctcaagtgattaattgacatttgattaattttagattcccttgtgtatacacatcttcatacattttctgctttatatagtaccatttagactacaatacagaaaaggatactatatagggaccatataacacctgcctttcatgcaaagcacgagaaaaatgtctttttaaaaaaaatagaagaaaattaaatcgaatgaaaatcgaatgctacttttttaggacttactcgagtgctactgggtcattgatcaataaaaagcaaccttttcctcaaaatgaaacaaagttcatgaaaggaacagtagcatatataagaatattacctgagatagatggctttgttgaattttctccaaaagacaggacaataagaaaatatattaacgattcacaactttcaaattcgtgctattacaaatacacgatataatgactccaacttattgcaacctttgtaaacagaacaaacgatcaaacccgtagcaaatttatgaaacaaatacacaccaataagtgtacactcgatcgactggaacggctctagttctgcagaaccgcggtggaacgtttgcgacagaagatcaacggtggtatagctatatatgcatgcatgcacatataaatgcagcgtaaatgcaactatgcaagcgtgcacaggcggcggcggcggcggctacgagtgtagatagccacgcatatatatatgcatcaagtttgtttaagcgcaggtgtagccactggggacgcacttgccacagtagttgacaaggaggctcagcttcaccgggatgttgacgacgacgccgagcacgttggccttgatggccgtgcagaggcagacggcggcctcgaggtcggcgaggccgctgatgaggctgcagcacggctgggcgggcacctggccgacctcgccgctgatggcgcccagcacgtcggcgcaggccccgaacttgagcgtgttcacggggcacttgttatggtaggacggagtagttggagtcgaaggcggcggcggcgggagggccgggggcggcggcgtcgggcatttgccgcacgcgcagccgcaggcattggccgtcgtgaagaagaggaggttgatggccaagagaaacacgaggatcttggatgccatggagcttatccttaagggtatatatggctatttgctaaggccggtgtaggatatcagagctagctagctagtgagagatggggatggtctagtgagagggttatgtgggtatatttatagaaggtaaacctgcaaaggacaaaccctaacctctctctttcgtggttatattgtctagcagtaacacggaaagttgttttcatctttagaggaaacatcatatcatttctcccatcttacataaaaactgcattcatcctaaaatacagcaactagtatgagatttgacacaacctagaagtctatcaagatttgttttactagttgtatctaatccggtactagtttgctatattttgaaatagtaagagtagtcattattttttttaaaaaaaatgaataataagataagttaatatgagataatcactccacaaacataaagtttaatttcgacttctacaagttgtaacaaaacaataaatataattgtgaagtgttatagtaaaagtcgaatttgaccttacatgtttctgaaatgatatatccatattaatttatcctatcatttttctttaactatttaggtaatatacaagaaataaggggatgtcccctcgtggattgagaattcatcttcggaataacacttttattggagtatgagtgaattgtttgtacgtcttattacttagcttaggaatttatgtgaaatagttggtatattcagcttgatatggtattagaattagaggtttcaaattataagctgccaaacataataaaataaactttacatattaaatgttaccaccagtatttttttaatatatgacatggttgacttttttaatccacttgacgagctaaggttgcagattataaggttggtaggggtggatgggggaggtgaaagggcgggctttcccaagcttggagggatgaccgcaagtggcagaggactagcagtgggcgaaggatgcgaggaggtcgctaggcaatggcgatgtcgattgagccatcgagatggatgagagctatggattggtgttggaggcaagacaaggaaaacaatagggttagaagctgtcagagaccatgaatacagtagggtgggggcacctaactgtcgcctagcttggaacaatggaaaacaagaaggctggtggggccttgcctgcgctagcaaggctttttttttttgggggggggggggagggtggaggggacgttggctaggagaggtggcggtgcagaaggaggtggcatgtgacttgattgagaccactggcgatctagaaaattggtttactagtgtcataacatacatactggtatcatagcatgctaatcatgcttaagcaatggcgttatcctatatgagtaaacaatttaaccataggttttgctaaaagttatcggtatcaccagacactgaacctaatactttatattcatccctgattgtgacttgtgatggaaacaaggggaggagggaagaaataacattggaggtggtattgtagctgcacgaaccatggcacgatccgagtcatttaaaggtgacttgaatgagcgagatttttcttagaaatattatagcaagcttaatagtacagcaaaccgctagctctaaaattgatacattatctacaatcactctaatgacctactcatacaatagttttatataaatatatatcgcaccattaatacttaattatagccttttttttcctctctcctattctctctttttatatgtgcttgtagttagaatatactccagcatgttctttttctgagatagacagtctcttaaaaattagctacatgccttataatattatttttcctctatatatttattaataaagagtaaactacacgggtggtccttaaacttgtaggggtgtgtcatctaagtcttcaaactctcaatatacagatccgattccataacatgtcaacgtatgtcatataggtcccaaatctccacaacttctctaggatcctacatgacactaatgtggcatgccacacggacgtgacatgtcataatcttgactaacaaatgggacccacttaaaaattttcatttcctttttcttctatcttctttcttttttatttttcttccttttcttctctttttcttctctttcttctttccttcctctcagttcagctgtaggccaccactgaacggggtgctcgagtcatagagaaaggagaaaaaaaaatagatttaggagaagaaaaaggaaagaaacggaaaatgaaaatttttaagtggatcccatttgtcaatcaagatgatgccatgccacgccacactagcgctacgtaggatcctaaatgggttgtggcggtctgggacctagatgatacactttgacaagttctgatattttaatctacattttgagagtttagggatctagatgacacacccctataagtttaagaaccgcctatgcactttacccattacatatatgtgtttagattcattaatatctatatgaatataagcaatgttagaaagtcttaaaatatgaaacgcatagagtaataaataacgtgttgtactaatttaagcataccacttctaaagaaagtaaagatgagcacatttattaacacatgccatgcctgactatccattctacgctactccttctgtcccataatataagtgattttgacattttgcttgtaccgtttgactacttatattattcaaaaaatttgtgcagatataaaaaacaaaaagttatgcttaaactactttggataataaagtaagtctaaaaaaataataattctaaatttttttaataagacgaatggtcaaacagcgcaagcaaaatgttaaaatcccttatattagggaacagagggagtactttcctgtctttctgatcaatttacagaacaggcattagcccttgtttagttcccaacattttcttcaaacttccatcttttccatcacatcaaaactttcctacacacataaaattctaattttttcttcaaactttcaattttagttaaactttcaattttagcgtggaactaaacacacacttagaatcaaactaaaaaaattccctactcttcggtacagatggaaaaagatatggctggtagctaggcatatcaaagaaacccatgtggaaatgccagggccagggcgagcagcgagctcgtcctgagctggctggcgagagttggcttgggagctagccggcgcggcctgcgtggagcgcgcacacatcagcatcgtcgccagctcggccgcccgcacgcgctggtcaccacagggttgatcgcgcattggctccatggaccgatagaaagcgaagtatcagtcgcgcgcgacctcacggactgcacagtagcactagcgtgtggcagaggaactctctgtgatgtatcggccggtgatcaggtctgcacagtactcatggtcttggaagacgatgaactctgtctgtatttggccttttgttggcctgcttatgggtgaagcgctgcaccgacgttacgctcctgcttggctacagggaacttctggctgaggattgatccatgtaaaatccgtggagaaactaatgtgctcttcattcattcttcaattaatcatgaccgtgtaataaagcatctttgcatggttaattagatcgatctgtcgacgggctgtaaactggttacgggcacacatgcatgcccctctgtcaacggcagaagtacgtacgttcatcgccatcaagttttccaggatgtggcccaacggcagcccacggattggagcccattgcatggagggcggcacactgcacagttagcgcgtcccagcctgcggctctgtgccactgcaagcagcgggcaagaaagaacaaggaatcagtataagccacgcgtacgatatgaacagaaatatctggcgtaatcaagttctcgtgtctcatgcaacgtcgtcactttcaccggcacaaacagcgtcccggccggccgggaggtcacgggtggacggatgtacgccttgacgatttgatcgatgcgctacccatggtattgttgccgtcggcgacgagagattaaagtatgtttcgacagatcggttgcagtgggaatgttccactgtaccaagggcagggtttagatctggatctcttgaaacaattatttggggttagtgataatttcgcttatctctttgtacttttataatgcaatcaagttttttgcgttgggcggacgtgcatgtacaggcataccttacaaattaagggatgtacgtataagctgatgtgcgttttgtagccggatatccttgcgatattggacggcgaatttctttggatcctcctatactttgcgggtcggtcacggcataaataatcaatacggtaccgaacttgtttctctgatggatcgagaactatatacgtggtccaccacccggctagcgagccaaggatggtcgcgcgcggattcgtggtgcacctacgaaatccaccgcagccgacaagacctccccgcggtgtattagcccgggcgcgcgcgcccctgcggtgtaccgagagccgggtggacgagtaggtcagtaggccactccggcccacgtgcttagagcaagtttaatagtacagctaactatcaactcgaaatcatctataatcaatgtaatagctaatttatacaatagttgtttactatactactaatacatagtcacatatgtcatatacacattacgtcttgaaatccgtgctgcaactgactacaaatctgtagcccgctgctcttctctttctttctttatatctttaaaatatgtttatagctagcttttagcttgctattgtacctgctcttaatagtatagctaactatcgctccaaatcatctatagttaattttatagccaattcatacaatagttacccataaacatatactacacaattaatatctggtctctcctgtcatatatacatgcatcttgcagttcgtgttgtagctggctacagatctgtagcccgttgcttctctctctctctcttattttatctccttaaatatagctggcttatagtctgctattatacctactcttaaccagaagaggtaagtaggtaacgtgtgtgatggcttcgttgcccttgtagttgcagccgtccactattagctctaatttatctatagccgatctaataacgaatttatacaatagttgcttactatactattaatatatggtccgacctgtcatacacacactgtgtcttggagtccatacaaatttgtaacccgctgctcttctctctcatattttatctcattaaaatatgtttatagctggctaatagtctgctattgtacctgctctgaatggtgggttcaccgagcgaatgttcgcacgcggtctaggtccgtgaacacttttggttcaacccacgtatgttatctttttgccgaacatgagaatctgttgtgagtgaattgcatattgggccatataaatttaccagagcttcagcttagaccactgaagcatctaggcccctggtgttaattttggtaattaatgacaagcactaattatggactaaccgttgtctttgagctatacattttaagttaggtccacgtcatatgtgcgcatggatgattatcgatggattaaaattgacggcgcaaagcaaagggaaagaagacggtaaaactagcgctttaatttagaattgatcgaggtgtagggcgatcaaatttgctagtttaattttagtttcgccgtactattaagaggggtaatgacctagcaaagagatgattttaattgccacattaggtcattgcattttcatttgtgctctctttttcattacacacacattcatttgcaaattcactgggttcggcctgaccaggggcggtcagaccggccacatagtggcggtctgaccggcgtgccctggccggtctgaccggccccgcgggcggtctgaccggcggcactttcccggtcagaccggccccctggaggccgagatgatgctgctcgggatggccgatacagagccgacggagccgtagtcggtcagaccgagctgatggcggtctgaccgagccgaggccggtctgaccggccaccccatgtcggtctgaccggtcaggccgatggggccctctgacagcacttcaacggctagttttctagccgttgcagagtagcacggtctgaccggccacataccttcggtcagaccggcagagcacaaagttgggggatttcgccaccaacggctagttttggtgggtgggagtataaatactcccccaccagcagcaagggggctctcttggcacccaattcaattgcatacaccccttgcacctctctcacactcacttgagctttgtgttcatccatctagtgtgttagagggttgtttagccaagagtcaagtgcatttgcttccattgtagagctagtgtggcacttgatcatctccacaccgggtcattgcttgttactcttggaggttgccgcctcctagacggcttgtggaggagttgcccggtgacctctccgagaagattgtggaggaggcccggcgccggtttgtgagtggtttggagttcaccaccttcggagtgaaggaagaactaccccgagtgatcgaggcttgggtagtcctctccgtgggccggcttccgccttgcccaccccttgacgaagggggcgtgcggtggctttgtggttgagcggtggagttgggctcgcctcaatggggagtaggaaaccagcgagtttccgaacctcggtgaaaaatctcttgtctcattgtctcatttgattgtcgcatttacatttgtgcaatttactttcctagagatataattgagccactatcaccctaggtttgcaaaacataacttagttacttagttagagttcaccctcaccaagtctagcaacttaggttagatttgattaggtgttatttaatttttaaatcgcctatttacccccctctagtcgacatctcaatcctacaaccacccctaatacaaagatttcactttagaccatataactttactatttttttcactttggaccacccttgtccaccatctccaacttcagcagcctgctgccactgttggtgtgtgcgccaccactgtgaggatgccaaggtgccgtgagggcttccacacgattgttgctggcctctgtccactcatcccctccctttcagtttgtacaatcgagctgccatcgagcatgggtggcttcctcaaaattgatcaacagaagcttagagctggtcggcacatgagctccaaccgttcttcgcctgctctggccgattaactcgagctcagctgaaggctgaagctatctctacgcgaactggcccgatgcacgtgctcgcagcctcgcactcgactgtacctccttcctagcgcgctctctctctctcggatgcattgccggagttggtgaatgcccgaagaagcaacggcttgccgcttgcgtagtgcagtagtggtggcagtcagctagcaaatggaaacggatagactgacagattgatagaatagtggcccaatgtgcaaagatggtaacaaacccttgcctaaagtgaaaatattgcatatggcctggtccaagatggaaattaggcaataatacttggcccatgatgcaattcactcaaaactttatgcatagctaagtgattgtccagtactctaggaggtattagaaatacatcataaatgtgtaaaatttgataccctactattaattaggagatatgaaaattacactaaaacttttttttaccacttgttatctttgagctgaggcactgtaaaatttctcttacacatataaatgatttattaaaattttattgtaaaagtatttcaatccgaattcgaattaaatttgaaaatatactgtttatttaattttttcttataaatattcgggatgtaaaattttttgcgtaaatataccgtcaatctcgcacaaccgttgcgcgagaataacgtgggaatgacgtcgtgagcggtatccgcggcgaaagcgcgagaccgctcggtctcacggaatggtacagcgagacagaacggtctcgcgcaaggactgagcgagaccggtgccatgctgattcaattagcgactaattatcttaattagcaattatttatttattaattaatcgctaattaagataattagttgctaattattattagttaattgctaattaagtaattaagcactaattaaatggaaccggtggacagtttcgctgtttgattccgcgaaaccgaacggtctcgctcttccattgcgcgaaaccgcgcgctctcgtgccttcaccgcgcgagaccgtgcgctctcgcactttgaacgcgcgataccgcccatgacatcacacccacctaggtttcgtgcaacggttgcgtgagatcgacggtatatttacacaaaaaattttgcatcccaagtattcatgagaaaaaattgaatgcatagtatatttttaaatttaattctccgaattcaaggtttaaatcggagtcgaacatgtaaactctttcagtgcataaacttaaccaaaaattaaaaaaaaacatgtgctgtaaaaggaaaaaccataggcatattcgcatgtctaggtcacgcgagaatgttcacgcctgcaaccctgcaccccttgtccgattggcctcttgttgacttgttgacgtgtagcttaaactccggctcgcacctactaatagattgcatcctcattaaacatgcattttttaagaaaaaatggttcatgtactagatttactaactatatatctacaatgcagatgagttattttcccaactatatatttatgatctcttcttgttaagaatatgtatgtgctattacaccaattaaacgaaatttgtgttaaatttattgtgggatatatatgtgtagaatttagtacaagttacatgtttttttacgtgtgcgcacgcttatctttgggggccggggtatataacattgtcatatatttcctccgttttatattgtgtgtctagatttattaacatatatatacttttttcatctcaaaatatagcaacctagaatcgaattgaacatatcctagtactacgaatctggacatgggatacgtcatatccggtcctagattgctatattctaggacggagggagtatatgaatgtgggcaatgctataaagtcttataatatgaaacggatggatggagtattttagtagaatacatttaaaaaaatcattacattttagacgatgacatgaaagtgatgagtaaacatgcaagcacttcagttacaaataacagagcagagagactttatttttacgtactgaatacaatacaagtgatatgaatcaaacaataatttccaaaaaataaaacaaacatgtaccccgatgcataatctcgcgtacgcgcggagaaggccacaaattaaacaaaatcatatcgaatcaaaccagatacgtacttcttgccaccaaatgcacgcatgcatgaacatgcccatgcatgacaagtgacaacacgctgctagcacgtaggaaccaaataaacccctgttgcgttgagacgtgcatggatcgatcgcgcggctactttataaagcctttagaagcacttgaagccggtgggcacgcgcttgccgcagtagttgaggatgaggctgaggtcgacggggaggttaaggttgatgccgagaatgttgcccttgatggccgtgcagaggcacaccgccgcctcgaggtcgacgagcccctccagcagcgggcagcacggctccgccggcggcacgcccaccttggccttgatgaggcccagcacgttggcgcacacgcccagcttcagcgcgtcgcgtgggcacttgccgaatgcggcgggagtcggggtgggcgtcgacggggtcggcggcgtcggcgtcgggcagtggccgccgcaggcgctgcccaacgagaagaccaccaggttgacggcgaggaatagcgcgatcgaggccttgcctgccattgctgctgctggatcacgcgcactaaaccgaaacgatattaattatctcttgataactcgatcgatttgcttagtgcttgtgatggtttggcattcaatttgacgtcgtatttataggagatgattaaagcaatataatgctgattggttatatgttatgacgagcaaccatgcatgtgagggtgattaggaagctgatctggattctccaaggaaagtacgctggaaatactttagctagtattgaacagaactagctagagaccaagattgctgctttgtgaatgcacgttgacgtttgtacctgcttgaaggttttggtcataattctgcttaagcatattcgcgtatggggtggctgctctgtctctctgtgcctagctaataacgtgcacaaaatgccaaataaagttggttttaattagtaacgatgcaataattaatgatcagggaaaataaacagcgaaagaatcattcgacgaaggacacccgtgttaagttgttttcaggtttcatagtgtacgtacttgcagaagagggaaaataaattccaggctgcagttttgtttcatttggctcacgggatcgtcgtcggatgattctatcgaaaattcgaacatatgcacttgtagtcttgtttggtttgcctcgtatgtaaataatctaatcacgtcgctgtgctacctgatccaatatatataatcacgtcgttgtgccgtcgcaggttttttttggctttttcttcgtgtgggtttagcctaggtttttacttcaaaccatgcttatgtgagggtttttggcttggttttctcttaaaatctaggccaagtcttttcttcttaaataaaaacagacactctttgtcctcttctgtgtttttcttttaaaaaaaaactatgatcttagacgttaactctaataaatttcggctgactttcttcagccagcctagtggaaaaaggagtagatcttgaattttgtctgccagatgagttacttatttattacattgtgtttgattttattcgctacaacataaccgttcatctctgacggttcaataaggttatcactaattattgagtgatccgatgttgattattactcggttgtgagaaatgactcattgtaacatgtgaacatccgtgagtgatcaagacatctataacgggccaaaaaatatcaaatgtgacatatatgaaaatcgacaaaaaaaaaagcaaaaaacataatcacagtgggagcttgcagtgctcgaggctgagggtgtagaaaagagagggagaaacgacagtccgccactatttcattgcttctgctcggatgggtgagggttagcacttaattagcagcatccgtgtcggtgctccggcttgggataggagctagacggtagccgcgttggtgctcgccgtcatatgggccactgtagtggcctctagtcattatcgtcgtcgtactacataagatcctatgttcttgagctcaaactagtcgaatatggcatcctcgagctcgaagtagtcaaattcagttactttattatttgtggagagggttaagcaagggagcattgctggttgtagggggcgaaggaagagacttggggagggaggggggaggggaggggtaagctggcaacatctgcattatgctcatgagtacgatgagcgctgctcgtttcaagagttcaacttgtgcgagagagataatagagatgcaggtcgccagttgaaaatcatatagattagaaagacctgctagagagcttttctctaatggctcgtatttatcattcgttatttatgatgctcatgatttgtgatggttcttatagactctagagatcaaagctcatctttaacgactacccatatattggttcataactatggcccaccataaagggtcctatacctcttatgggtcattctccacaggtatatttcaaacatactactttttagccattagaaatgagttcatctcaatgttttgtgttgggccgttacggcaccttttttttaaaaaaaaatagtgttttgcatgagtttctgaccccttttgagcttacccaccatatgcttacaaccttcttacccaccctaagcggtttggtaaacccagggtggcattcgttcacatcacccattccacgttggacatatgccataatcccaagcggtgtcaccaagccaatagatgacagcgggcatttattgcgcaccagacacaataggttgacaaggagtaaaaattcacaatttagtcaatctttcaaaacaatttaaccgtcaatattatattagaataagttttaaaaatctaacatctttatgatattatgatagtactagtatttttcaaggaaaatttatctatatataccatttatttgattttaaagtaagtattcgagaaagtactatcgatggtcaaaagttcacaaattttgataacttttgtcttaaacgtctaagtacgacgaaaacagctagtaactctttttgcggacagacattgggcattccaaacaaagtgtgaaatttattttattcataatgcaaaagaaataatcaacagatcatacaaggacccacacatgaaacgaataaaaacacggaaaatcgagtagctccatggtacgtgtgcatgcttaatttgcaggtgcacgcatgcatatttgtcgatcgatccatgcatgcgcgcaaatgttgcaagctaagctagcacgtagtagcaatcaaacagtccagataaaatagccagcggaacaaatgcgcagtagcgccgccgcctatcgatgcttagcatttgaagccggtgggcacgcgcttgccgcagtagttgaggatgaggctgaggtcgacggggaggttgaggttgatgccgaggatgttgcctctgatggccgtgcagaggcataccgccgcctcgaggtcgacgagcccctccagcagcgggcagcacggctccgccggcggcacgcccaccttggccttgatgaggcccagcacgttggcgcacacgcccagcttcagcgcgtcgcgtgggcacttaccgaacgccgccggcgtcggggtgggcgtcgatggggtcgacggcgtcggcgtcgggcagcggccgccgcaggcgctggccaacgagaacaccaccaggttgacggcgaggaacagcgcgatcgaggccttgcctgccattgctgccgctggatcacgcgcactaagctgacgagcgattagctctctggagtttcaggagctcctgattactagctcgattgctgtgtggttgtgatggtttgatggcatttgtggcttgagtatttataggagaaattttggtgcaatgctggatgattagtgggtgcagctgtgagcttgcatgtgaggatgatttgctggttgatctggattggcctgaatatattttggtagaacattatagtgacccagatgctgcatttgaggaacatgctgacgtttgtttctgttcggtgattgatgatagtttagcacacaatcttggcgtatggcatggctgcactgtacctcgtaacatgcaccaatggcgaaaaaccgaattaattaggaatgttttttggcgtgatcggttgatagatcacggaagggacgtcgacatgtactggaatcaaagcaggaggaatcatatcatgctaacttgcttgagctttccagacaaccaccactccagcccatatttcggttttttcggaaaatgctagggcaggcgcccgatccggcgggaaaaaaaatcggacgccctctcccccacgcgcgcctctccgcgaaaaaaaggcgccctcctccacgcgcgtctccgcctgcctcccacacgtccccaccactcaatgccctccgttgcaacaaatctcccacatattacggaaactctctgttaagagaatacgtttcattttttttctcaactagtgtacttataatggttaattatgtatggatgaaatgtgaaatgttgcagtgaattgaaatattcttttgcaacaaattacccacatattatggaaacgctttatttagagaatccgtttcaatttttgttccaccaacaatgtttcagtaagtgtactcataatgtttcactatgtatagatcaaatgttgcagtgaattaaaacattatttcgctatttgctgaaatattatttttatataaggtgaaacaacgcctgattttttaaaaaaccgttttcatacgttgtagcaaaatgttttatgaggtgattttgttgtgtttcagctttttaaacgattgaaacattttcgatctatttagtgaaacaattccgatctacttggtggaacaacgtgcaacatttaaaaataattcaataataagctaaatattttttcatcggattatatccatgtgtggtcttgtttttttttaaaaaaaatcgagcacccgatccgtaggtgcgtcgattgttttctaaagtaaatttcgatggtactaatagtcatgaatggattttaaactgttgaggaaatattccctcgttgtttgcaaatcatccaaataattatgaaagaaaatggcaagatatgttaatatgtgatatatcactctgaaacatgttggttaaaattcaattcctataagttaaaaaaaatcaagttcgatttatataagttaaagaaggagttaaaatttggtttctatataagttaaagataaagaagacagtcgttgctcgttagcttggtgtaagagcatctccaacaacatctctatcttcctctccaagttaaaaattgacatttttggacaaaaacacactccaacagactctctatctccctctccaagccatccggctggccaaaccactcctcccgctggccaactttggccagccaaaattgacttgccaatcatgggccccacgccttttcccctctccctctcccctcccatattctctctccacgccctcaccctcctcccagattgctcgcgccggcgccgcccctctgtcgtcgttgccccttgttcgcggcgccgtcgaccgctgccgtccgctcgcatccttcgcccgtgctcgccgctgccactcgctcgcatcctcagccatggctgactggtgcagcgagcagagcggaggaggtagtgcaacggtgagggagggagggtgcggcggcgagggagtagcaagggaaggaggggaggctcaacggtggagggctgtcgaggaagacgaggctggccgcgctcctgtcgtcctctgctgcccgtgttgctcccgccgtcgcagcctccatcctcgcgccacactctcgtcgtcctccaccgcccgcaccgctcccgtcggcgccgccttcatccccgcaccgctcgagtcgtcctccgccgccgcgccgttcccgccggtgccgcctctattctccccacgccacactgcagagaagagaggagaggaataggagagaagtgggtgaagaaaaaggggagagaagtggaggaagaagggttatttgaggctgacatacgggtcccaccgtcatagattcataatggagagtatggatggagagtctgttggagcaactaactagtctgactagctaagtcagatagagagttggctatataggtgtttggagagtctgatttagagaggctgttggagatgctcttactggtaaacgaaacatggaatatttcagcccagataggccccaacttctctcaaccgctatcatgggtcacagatttcagccctgatagcccccaacttctctcagcccagatacgcggagttgcccatgaaactgtgaggcctgaacgtttataagctttggcccattgtaaacactattcacattggatcttgatgatttcttgaggttagttaggcctcattgagaattgcagtggctcctcccaccactgagaaacgagcacagcctcatctcacgcggcacgatgcattccatcaaatcaaatccaatgcacagccgctttgcggttaccgaagcgcccgtttcggcgaagagtcgcacagcacaactcctcttcaaagcccatcactcacacgcgacgcggccgctcaaacaaaagcaaaaaccgcccactactttgctcgatcgatcgagaggaggatcgcgcagacgtagttcgtgcgccaccgatcgacgacgcgagcatggacgtggacatggagaggccgccggcggcgacggcgcagggcgtgcggcccaaccccgtcgtggagaggaagctcggagagctggacgcctgcctcgccgacgcgatgtcctcccgcccgcggcggagcgacgtcgacggcagcctcttcgcggagattcaggccaagaccgacttcctaaagacgcttatcgccgcggagggggagtgccacggcggcgcgctgccggagcacctggaggaggccaaggcgcgcttcgccgtcctcaagggcgcgttcgacaagtgggcgcggcgcgacgacgcggcggcgccagcggaggaggagcagcccgacggggcggccggctcggggtccgagtgctcgtgcaccgagtcatgcttcggggtcgaggtcaccggctgcctggaggcgacgtccgacgtcgagcgcgaggccgtggaaatggcgacgctcggcgccacgttcaacgccgagcgcagggccggacacaagccgtcgccgtcgccggcggctgcgacaaggaacgctgctcggcggcgcggatggaggcggagcgctgcttgctgcggtgcagccggcgccgtggcggtgctcgcgctcgccatcggggtggcgattgagtttgcgtcggtggctcgccaaaacgtttacgttgttccgacctgacagatttgtttcccttgcaatttcgctgtttttttcgttgtggcctcctacagtatttagcaacatgtagagtagctaaatttcgctcttcctgtttcttgtgtggtatccgactactcataaacatgtagtagtttactgtaagaagtaaatcaaggagatattggtattttatagtctgcatacattctaaactctcttaaatgtgtatgaaaaaatttgaaaaaaaatcaacatgtgagataaaatttaacaagataaattaatatgtgatagatcaatccacaaacatacaagataaaatttaacttctacatgttacaataaaaaattaactgtgaatgtacattaactagttgtagtttaatttgttttattttgtaacttgcgtattagtggagtcatatattacatgttaacaaatcttctgatttttttttcatttttatcataactatctgagtcatgcaaacaacaagaatgttctctccgagactttaaaatcccttatttgtttctgcatataagagattataatcctgcataaaacttgtcttaaataggttagtggggttgcttggccaaagctatgacgacttgacgagtccttgtccatggcaatcatctgtgtctgttcattttgtcatctaggctcatctcttcacttcttgagtcaatagaggaagtagtaaaactttgttttctctatctatcacggcattacagatcacaagtacttcaattatgctatacaatttacatgaataaaatgcaaatagctcgtcttctatctgaaaatgtacaacctattgaatattttctatgcgtacactactactctattgcctgtgacagtattatagatagcggagatggtgcgttagcttggtggaaataaacagagatcctttttgcgtaaacatatgactaaaccttgatctgcttcatgaagtgcccaatgcagacagatgacatgaaaactagcagcacaaacattgctgagaagccctgttgagatgatcttgctgccctaagtagttcctgaagcaatattaaatttaaatgttcagacgtttgacaaaaaaatacaactaatacttgtctaagcagtcgttttaaaaaaagtgtgttgcagttgtgataatcaggtgttagaatttacaagttgtacactgaggttgttcatcaatattgagggcataataactcataattagcaaaagcctgtaactgaaattgtagttctggtaacatttaactcgagagatagaaaatgccaagccaatttcagtcatgtttcttaaagaatttattctgtccttatatacctaccactaccggtgcatcattatttcagatgagaagatacaaacaggaatagcattattcctactccagtttgtcgactactgtagctcagtaacgcaaatgttcccttcatggaaactaaaggactagggctcattaaaagatcacctatctatcaccaaacgccaatgcatcccatatcctcattgattaaccaatgctgctattcaacagtttcctggagtcaaaagctcctttgtacatatttatccaataaagatatccagattcggtggttttatgtcactcaaaaataattcgctttgtaccaaactaccaatagatttgattgagtacgtgtcatttttgcagagttcaatccagctttttagtgcaaacatattcagtttaacaatattgttgcctcaggcataatcagggtgaaaaagttaagtattatcactatttccttcaagatataaacattgtttcaagaaaacgatttagaagcaggtactgcagtagaatccaacgctgaaatggcaggctattcaaagagcgtaacatacaggaaaaaggtactgaaatcttaccatctgttgctgaagcttctgattttcttctactggatattctctctctgcaaccagcattgattctacagagacaccctgaacagccacacgcaaatgcaatatgagcaaggcagagcaaactgatagattaaagcgtcagtttactgcaaaaaaattctgagtataacccgctaaatagtattgtctcaaccaaccaaacaagacaatacactgaattataacatacaggttctttgttttaggtatcatactgctgtactgacaatggcatggtaccaaacaaggtcacttatctacccagacaaaacaaactgaagaaagaagttgactactaaacttttgataatgacatcaagagtctcattctgcaggagaagcatcacaaggttgttaggtaaaacacgttagagataactttgacatgaaaatttttagtattacattagctaacatgtgattgtgatgaacctgaaatttttgttttcttttaaaatcggacatcggctcgtgtgcaatgtgcatttttactatagaaaaagcatcagagtacactcaatattttttaaaaaatgtaaaacccggatgccattatgacaatgcaaccaacaagactatgcatcactcatcttagtgactaaaaaaactttaaccgagcaaatggttacctcagcagatgaaactttgtctgctgacctatcggtgagtgtggatacctgagaaggaaacatgtatgatattgttttctctgtagcaccgaataaacatcaatgcatgatattacttacagttacagcatcaaacactgatgtcattttcactccatggctcatgacctctgactgaggggatgcatcctcttcctcttcctcttcctcctcaggcactggagagggaggattagcagcaacatacaccacccgcagcttgaactcctcgatcaccctgcctggcgctttagtaaactagaaaccacaacaccatcagctctaaattttggtaagccccggctagagatatcagatatccatgaagattgctacaagaacttaccaattcagggacaaagtctctcatggtcgccccatatccaaccgccacgctctgcacgaggaacttgtccttgcagtggtaatcggatagcatttaacgggagcctgcattgtaactacaccgatttcacaatttcagtaacgacatgaacacaacagaccgatcggcaagtcgagcaaattaactaattaagcactgtaatagtgtaatcatgtagagcaaatcaagcaaacctcacctgtgatatcgcacgagctccggggcggcagtataccgcaggcgtgccgcacagagtacttccttgggttcgtcgttttcacctacggattgtcagttttgcagaacgaaaatccgtcaccctttcctccaaacgcatcacatgctcacagcagcatcagctcagagcgagaagaagaacagagtattcattcaccttgaacgccacgtactggttggtcttgttcgtcagctgcatgcagcaagacctcttcctcttgtactcatcttatcaaaccaccgcataaacaagaaatcaagaagaaaatcagtcaagaaaagcttgaagccaacgctgcgaacaatcaagagtttggttctggaaagcacttacaggggatcttgagctcggaagggtgcacacgaagcagcgtattactcatggctccgatcggacagagcgagagcgagaaaggaggagcagcaacagcggaaaagattcggccttttgctccctttcccgttccaaagaacctgtgtgacctggacgtcgcggcgcgggaagtggctaagcggttgctgcctcttgaagtaaagtatacgggcaaaatggcgatggtatgatgagcggatggtgatctggaattctggattccgtggagcagctcggggatcggaggaataggatattggcctgaactttatggtgggatcgttgcggcaaatatcatatttaagggataggattagaatgctcgtcatggtaattgcaaaaacctccaatccaatcgcattcgttggatgcgacatcaacgttgccgatgtgagtcctctggattttctttttggtgtcagctttgggtatgcccttttttatatactagtatattactactactactaatctaggatttttttccccctggaatgtgtagcctatttcagttaactaactgcctaatgcagaaatttatagaactcataatgggcacactagtttgttgcaaaattggctaaaatttccatctgcaaagtgcatttgcagttctctactctgaatcaacatcacctgtcaaacaacctccacaaaggataatgtatcatgtagctagaactgggtaatccaagatttggtagagtgtggtagggtaagcctaactaaaggcctcctcaactgcctgcctctgcagctgaaacctgaaacattcagctaattgatattcctgagttttgtttccttcttatcttaaaagtgcacattcggtagtggttgggcaatcaattattgttgagatatcagcttccaagactatacgagtgcgaaattgtttgggcttgtttagatatcgactggatttaccataaattgcagaagcacaacgttcaaatgccccatgtataattcagttgttctttctctaattcagtttatccatcataattcacggccggcttgacaggccaacaccacgttgaggcccattagttgtcagcccaatgctcacgtggactcaaaaggcccaaatagcctattggaaaaagtccactttgactcccttaattgttcaccgaatctaattcgtgacccttaactacaaaaccgggcaggatgactctcccaattactaaaaccaatacaaattgaatccctcaacggttttggagggtggttttgctgacgtggcacttggcccattatgctcgctgtcagcctagtcatgaggcccacatgcaattgattagggaaaaatataaaaaacgtagggccagcttgtcagggcactcttctccctctatcttttaaataaaaacagcagagcaaccgccgccggcagcgatggcgatggcggtggtgcgggcggcagcggtggatggcaatggcgatggctatttgtggcgccgcttcggctcgtcgccctccttctcctcctttgtggccgactgctgcgtcgcgcacgccacccttgtggagcgcggcgccgctctcgccgaccgcctggaggtggcgcgctcgctcctcggcgagaacggctacaccatcacgcgctgcagatgtgggcccgtgtggcaaatcctccggcgcaaccttgtcgccgagacgctgcacctatcgcgcgtccgcctggcggggaggtcgagggaggatacaacagatcaacagcaactcgtgttttctagtaacaactacagagctgagcaggacacaagccgccgcaagatttcatcagtgatattcttcttttgaaaattaatcatcagtgataatcgagcggggcaggcgtatccttgagatccatccgctggaaatggacatcctgcatgcacatcacaagcaaaaataattcagtcatcacaaacctacacaaagcacacatcaagattgggaattcacacgcacgaacgtaccgatgcgaaatggttgacgtcgcggtggtgcgcctcgtcggcacgaacaacaacgacgacgtccttgagcgtggcgccggcggggagccgccagtagtcgatggcgatcggcggcgcggggacgttctcgatcttgccggcctcgatgtccttgaggtactcggtgtaggagtggatggcctcctcctcgaggtagccgacgacgcggtgcgcgagcttgggggagaggaggtagccgaggaagtaggcgttgaagaagacgcgctggacggcgagcacaagcgtgcgctcgtaccacctcggcttggccacctccatgaaggtcatgaggtgcatccgctcgttctcggcctcctccagcagcgcgcgtatccagtcgccgctgtgctcgaagctagtggcgctggctcagtcccgggccttcctctccgactgcctcatcaacgccaccaccggtcacccctttatcttcgagggcgccttcttcctctccctcgccacccgcatcaacttcggcacccccaccaccgaccccgtccgctaccccgacgactgcgtctgggagtccgacatggcgcgcagcccaacttcctcgttgaggtcgcgcccgctaccgctcagacctgaccgaggctcgagagcgaagctcggcatcgcccagatgcggagctcggcggccgtcgccccccgcctgccgtcgcccccctgctgaattgggagggagagagataagggggagattggggaggatgaggaagggatagactgacatgtgggcccacaaattcttcttctatgtgaatgacaaatgggtcccacgtgtatgttgttagttataatgccacctaagcgtcacatcaacagcagaccaagtcaacattgccatgtagatgccacgtcagcgaaaccactcttcaaaaccgccgagggattcaatttgttccggttttagtaattgggggagtcattctacccggttttctagttaagggtcacgaattagattcgatgaacaattaagggagtctaagtggactttttccttacaacaatatcgatcccatgggccaccgtggtgcaggcctagttgaaggctgcaaaatcccccttctacccctccgttctcgatatatacgccgccgcctagatgccattctcctcttctctctccttcctggtgcaacacatcgatctcaaattcttcacaggtttctctcatttcccttcccttttattatgaacttttcgatcttttctcccgcgcgctctcaatcggttcgagaatgagaggattcgttgtcggctcgccttgtgtttttgccccccttattttttttttcgtttccaattccatgatatttcacatccggggtgcaagtttgtagatttgaatacttttaggggaatgccatatatactagatcggaactgttcatggtgtagttacctttctggcatactccgcgacatggtgtattcatgccgcgcacgaatcgcatcgatgttttctgtttctgaacttgattgtctaacatgtcgttattactttagatcgtatttattccatgatagactcaatgcatgtgctgtctattttgtgatggatattccccccccccccctgaagaatcacttccttgtagttctctaccgtcagattgaatttttacagaaattatgcatgattggtttttaaaatcgaagtttacagcaatgcaaattgactttggtgccctcatgattcacttggcaaaagagaagttaggcgtacctaccatgtcattaagggttaatgatcgatactagttacttattgctaaatgttttctcgggtagcttatcactgtggatggttggcattgcattcgtaataactgaatccttctggtaaatggcatgccattttcagattatttgaagcaacaacaatttgattctgcaatgtgggcagatcggtgcatatttgtactttgctctttatttgaagggaatgtttatactttgctccaaggccttttcaaccaaaatattgagataaacttttctgcccacaggataaaaattcaatttagagcgttgagatcaaagtttttactatgccgaccattatgttgttttcattctttcctcaatgacaaggacgctgatgtagcataattactttctgcgggattaatctaggtgcaaaggggattcctgttggatagatgccattatatgagtttgctcatgtacgcatgatgtcatgtaactcatcttgtattttgagatttttcaagataaatgacgcctcttggctcttgcatgcaccaatgctatatgaccaggtatatgcgtagggcggattacatggccttttctatctggctgtcatttttctgatgcacataccttcttgaactggagagtacatgaaggtaaatcacatttttgtgattgtaaagtatatgtgcgtttagttgcgtcatattattatcttgtgttttttttttccagatctctgctaactttctgttgaacaactgtgcacgcacctacaccaagaagaaaacactcaagaagtggtttttcattgacaagaccctgggttaaatctagttgaagaaggcctattccacctcattttggtagtggatatgagcaacggtttgccactcatgaccaatcccatgatcaaaagccagccagtgttggcactgccttcaaatctaatgccatgtttggttacatccaagaagcatccatgttcttcattgtgtgtgacatacatcagtaagcgtgaacttgttgaagtcgttgatggacttgtcggggtaatgatgacatcatcgaaccgtgaaaagccagacattgaatctggttacgacggttcgtctgatgaagattccactgagaattctcgtgcagtaagttgcttctttcggttttctgttattctctttgttttctacaaaggattttaatatgtttatcttttatatcaggaaatttgtccttctgccttatgtttcttcgaccaaatcgtagctagtgcgcaagacaagaaggttgtgttgtttctagactatgatggcacactttctcctattgtgaatgatccagagaaagcattcatgtcctctgaggtaagccagctggtgtaagataaaatatgtattgaaacattgctttatgtatgtgccacttactaatattctcaatctgaataccttccttcagatgcgtgctactgtgaaaagtgttgcaaagcacttccctacagcaatagttagtgggagatcccgcgacaaggtctgaatatattttttacatgtattggtcttcacgttttagtgtgacaattatgtcagtatgaaaatcacatatctgatgtttgatgctggcctctccatgtccaggtgtttgattttgtcaagctgactgagatatactatgcagggagtcatggtatggacatactagcatcttttgcagattcagacagtccatagaaaaggtgagtagttgtaggatcattttaggtttcaggcatgaatacatatatttgttgctcttacatttttaacgattgaattcattacatacacgtcccttcatgtttcatcatttgaaaatattgttgagctctctattgcagaccaaagaaaccaagctttttcaacctgcaaatgagtttctgactatgataactgaggtactctttgtttcagtcatcagaaagcaatagatctggatggatgatattgaaaatattactctatatgctaatgtgcctgtgtacaataggtttccaaatccctgatagaggtcactaaagcgattaagggtgcaacagttgagaacaacaagttttgcgtatctgttcattatcgtaatgtcgacaagaaggtttagttggaacattcttgcctcccttgtggccttgtcgctttgcaacaattgcaagttttctcctataagttttttttttctcgaatacagtttctcatataattttcacctgtttccctccagaactggaagttggtcgcacaggttgtcaacaatgttctaaaagattttcctagtcttaaagtatccactggacggaaggtagaaggattaaaaagatagcaatgtaatatactgttcctaataggcggttcatcatttgtatgctaaacaggtatgctattatgcaggttttagaggttcgtccaatgatcaactgggacaagggaaaagccgtcgagtttttgcttcgatcgcttgagctagatgattctgaaactgttcttcctatctatattggggatgataaaacggatgaagatgcattcaaggtcacctttcttcagaaattgcataccacattttagatccatcttacttcgagcgttagtgaactcaattattattcctttttttttttattatacgaccaggtgcttcgcgagcgaaagaatggatgtgggattcttgtttcgcaggtgcccaagaagtctgaagcctttttcatgctgagaggcccatcagaagtagtgatccttcctgtcatgcttaacttttttgctgcccttctgattatgcctagttaattcaaaattgctttggtcatttcacttaacaattgccatgtaggtgatggaatttctcagttccttggtgagatggaaggaacaatcaacatttgaagattgacagcttagccaatcagttttagttgggatagctagctgacgctagcgtttaagcattccctgggcgacaattttacagtgcccggacgtggagctggatagtagctagatagtttagctcccatagttgcaaagaaccagtcgatgctattccgtttcttctaatatttatcatcagaggcagagttctagtagttttttttttatgaagtgaacaatctttcagttctaccagtgaaaattcacaagcattacggcactgtgctaatcctgatattttctccattagtctccatcttggttaggtaccaggatttgcaataatgtcaactcgcatcccctttctcccctgaaaatgacagggaaaaaaagaagttcactggacccgccgtagacggcgacgtgattctctatatctctaagactaaattgtggggtaggattccgaaaattcatgaattggttacaccagtttacaacaaaaaacttcttgtcttagtaatcaattgaaattagttcgatggcatcgaccccatccggtcagcctcgtggatgcagatgatggtcaccggggtgtccatttcttcatgacgtcttcatcctatccatacaagctggctggcagcccaatgatcgaatgcatgcaatgcataagatcttttcctggctttgctgaaagctcacgaaattaggctacaattcacaatatatcgtttaaactagaaaaaaaaaatgttccgcaggtttgctcacccggcccaaaacgagcctgacttttctgaagttagtactactaccactactatttacgaaaaccaaacgttaaagctgacagccgttgcccgttattacgacttgttggagtgatatcactgatatggcaacaaccctcaaaaccgagtcaagttcccgtataaatatttccaccacctgtacataattcgcaagaattttgagtcaagccgtttaaaagatccggaa

SEQ ID NO: 9999 - DNA, 100744 bp, Oryza sativa
tttataatagaccggtgtgtataacaccataagaaacattacaatatcatgtgtcaatgacttgacagaacatagagcatcaattaacatcaaaagtagcccaccggaagttcccaacatatgttccatctaaaagctctaatatctaaatattacttatactactaacacagcgtacttcaaatttcaactgtcacaaaatatttactccactattggcaatggcagtacgccaatgtgaaacctccaagcactttcttcaaactaattgttgatgctatactatatgcctgcattaatgtttcgtaaagttaaatctgaaaccatgtgcaaagattataggtaatgtttcatcagtgatgaggaattgatatggtagcaatagataatttatataacctcaaacatatacctgacaaacgagtctaattgctgcccacaaccgaatttgcagttgaagcttgagttgggacaaggataatagaattagtatcatcctcctagtatgcaacaaacaagtaaacacagattattagattgtgtatctctattaattggttagaaacatgaaaatataagaacttactaaatatgtgcttttgtggtggcctcctctaatccaactagatgtacacaccaaagcttgtgctgttgatgggagtaaagagctgtgataatcactaatcacttgaccccctgtgctgaaagctgattcagatgagactgaggtgatgggaatagtaagaatatccttggccaactttgccacaattggatactttaattcattcatcctccaccactgaagtagattgaaactttttgcaggaatatcctcaacaggatcatctaagtacctctttaaatctgacttaggaagactagcagcattctttgatttcatatactcatgaaattggctagcagcaaagaaatgactactagtagtgcccagagatgtactagtagattgagtggtggcatcattttcctttgatgtgctctggagttcactttcatatgatgcatgcaaagatttcaatgtggattccacatttgcaagtttcttaggaagtacagtttcttcatacaaagcagggaatgtgtagttaatcatacccatcttaaaccttgggtctagaaccaaagcaactgcaaacaaagtattgcattctgggccccagtacttctcaaatttttcaagcattgcatttgccatttctttaagaattgggtctttggacttcatgtcacgccccgagctagtcccgactggaattagcccgtgacgctccaaattaacctgttaatcgataccagtcccaggaaaacagtgctggtatcacagggagacagaatatcacagcaacagaggtctctttattatagagtagaggtacagtcatgttgggctgcggacagatcccgagctcacaactgcattacaaaagggaaacggaagccagggcttggaccaaacatcataggcgcgacttgggaattaggccgaaaccctaaaactcatcgaagccggcttgctcctggaagaactcttcatcagcaggatccgcttcatcttcttcagcaactgggggggttatttatatagagcaaaggtgagtacaggagtactcagcaagccaggggaaataagtgtttaatgcaggcttcaaggaaaggctgttgttttcgtaattgattttatttgaactcttttctgaaacaactaagtgagtgcttctcaaacgacacggatgagacagtgcgtcttgtccgaacggagtatgtgcaatgtatcagtctttagattttgaaacaaggttggcacccggccaacagcttttcaacggccacccgggccaacaacttttcaaacggccacccgggccaaccactttcaaacggccacccgggcctagctgatcccgtcagctacagatttttcaaacatcaaaccccttttcacaacagcaatttcacaagcagtagtcaaacaaaactacgctaagaatcacctcacatccgcccatgaccgtgggcacggctgttcgaacagttagttaacctctacagagggggtacactttacccacacgacattactaacccggatcacccagcccgtggggatcagccacgtcgggagacctccaagctttcatgacaaggcatttcgaaagccgacacaggtttaccatatgccgacgagaggggtcccagaccaacaacaggctaggtcccagaccatactgtgccaggaagcccaggggggtcctctccgacaccaccccggcgaatccacatgtctctcggcatcatggctcccctgataagctagttactcagccaggggtgtcccattccacccatgtggtcgtacttgtcttatgtttggatgaaattccaaggaaacggtccttaagtgcaagagcgggaaaccgtacacccggtacgttccccggtccgcggttttagaaattcatttagttcgcaagcaccgacccaggtgtcgggttttccaagtcttttgtaaaacccaagttttacccaagttgtttttcagattttaagtttgaaggcgaccgtcgatactcgcacagagtgcacgaatatcgaggcgcaactgggtggttacaaggggacatggtataacaattaacaaaggaaggatcaaatgcaacaaattaggcaggtccgccaatctgccttgcagacgggacaaccgattaagtgcgatcctatcaatgcataatattttgcaagcaatataattaaatttcaaatataggctcaagatgttcaaaggtggcttgccttgctcgagatccggagcttgatcctcgaaatcctcgcactgcgggtcttcgggctccgaaactacacgcgaaacgggacaactcaacaaacggcgaaaataaagccctattaatgacctctaagcgtgccattaggtagatctcgagatttggggaattttggaagttgaacggagtcaatcggatttacggttgggaagatattgaatttctaagattattggatttttggtctgaaggaaaaaggatttaggcccgggtggccgtttgaaaagttgttggcccgggtggctgttgaaaagctgttggccgggtgccaaccttgtttcaaaatctaaagactgatacattgcacatactccgttcggacaagacgcactgtctcatccgtgtcgtttgagaagcactcacttagttgtttcagaaaagagttcaaataaaatcaattacgaaaacaacagcctttccttgaagcctgcattaaacacttatttcccctggcttgctgagtactcctgtactcacctttgctctatataaataacccccccagttgctgaagaagatgaagcggatcctgctgatgaagagttcttccaggagcaagccggcttcgatgagttttagggtttcgacctagttcccaagtcgcgcctatgatgtttggtccaagccctggcttccgtttcccttttgtaatgcagttgtgagctcgggatctgtccgcagcccaacatgactgtacttctactctataataaagagacctctgttgctgtgatattctgtctctctatgataccagcactgttttcctgggactggtatcgattaacaggttaatttggagcgtcacgggctaattccagtcaggactagctcggggcgtgacacttcaacaactgacctagtactctcttaatatcgacaatgtgagaataaaaaaggttagatgttgggtaggttgaacctgagaactcctcagtggctgcatgaatgacagaaagggcatcattgacttcacaatatagattccattcctctggtgttggcagccacctatagtttgcatctcctgcagcatatacatccaaggcagacctataaaaaaatgcagattgcagcattttgaaggttgagccccaccttgtgcaggaatcaatagccaaacccatgtcacttttaaggttgagagaatcaatatcagcactgaacttgtatgctcgattgtttgatttcttgatgtacttgatagtgtccctaactttgtcaattatatgcttaatcacagccagaccatcttggacaattaagttcagaatgtgagcacaacatcggatatgaaggaattttccataaaaccaaagtgaaccacgttttgtaaacttggcaagcaacaggttagcagcactatcattacttgaggcattgtcaaatgtgatgctagctatcttgtcctcaattctccatgaagcaagacaatcagaaatggcattagcaataactacaccagtatgtggaggctccaactcaagaaagttaataacacgacaatgcattgaccaatcagcatctatgtagtgggcaacaaggctcatgtagcaaattgtttggttagaggtccaaagatcacatgtgaggcttatctttctaacatctttgaaagtcctcttcagtttttctttttcagattcataaagcctcatacaatcacttctaatggtatttctagagacctttttgtaagaagggtttagcctctttagcaaaacattaaaccatgtatactccacaaggtaaaatggcaactcatggacaatgatcattttgcaaataagctcacgtatctttgtaggatcataataaccagggacagaaacacaaggagcatcaagatcaacatcaccttcatcaaggctagggaaattgatattctgttgttttatggatttttgttgaagcttgtgataatcacactgctctaaatgcctccgccaatgtgttgtagtgccactactattcttggtgagcagagtttcacatgccttacatttgaccttattttccatttctcctttcttcttctttgatggcacagtgcattcttcaaagaaatcccacaatggagatttctttttcctggtggctttagttgggtttccctcttggccctcttctccccttacttcacctggtactagctgctgattcggttgtgcttctgttgctgctatgccatccctattgctcggtgactcgatctctatagatagctgtctttgcaggtttacagacatctacaaaaaataaaaataccaactgctatcaatatatattctgcacaaggtaaggaatcaaacaagtacaacaagaaaagcattgccatcaatttaccttggcaaatggcaaacacacggtgttctgcaaccttcagtctttcttcagaagaggaggacagcaagataagtactactctatgtctccacctagtccataaaattcaatgtaaatcaataacatccatcaagcaactaaacactacacaattaatacatgtagggccctagatacatgtgggtgcaaaagaaataaaaatgtaaaacaaagaaagaagaggaaacttactcagatccgagtcgtcggttcgtcactcacggcggaggcggtgggctgctgctgtcctccatggggttcttcctggacaggagaggcgaaggatggacggtgcttggctagatccacagcagtggtcagtggagcactagagcagcctaggattgtagatctagaagagaaatgtttcgaggaagagagcaaatgagctagggtttggatacgggatggggatataagggaaataaatggttaggtgatggactgctgttggtggtaggattttggaattggagtgcgggagaaattgggataggtagcgggagtgaaaatttcaagcttctgccgaatagctcgagctcggctcggtagagctcgcgagcttcgagacaagctcgagctcggctcgaatccttgccgagtcgaactcgagctgagcttgcgacgagccgagctcgagctgctcgcgagctccgagcttttttgacagccctaaccgtcgtcgatgaatcgccgccacaaccatcttcgagctcccgacggttggccgatttgggcctgccgctgatgacctccacccatccctgatctagccgccatcgagtcgctgatccaggattcgctacatgcccctcctcccgccgccatctagggttctttctctcgcttcagcccagcgcttcctcctctctcgcgaaacagcgaagaaacagatgccgcgtgcgtgaagccgtgaatcggtatacaacgcgaaagtacaaaactaccctccataccacggtaccgcgtcaatgggaggtgcggtaccatgaggtaccgacgccttttggaccgttggatgatctcgaatcaacagtcacgatttggtactgcagttgctcaaggacagtaaaaactcggcttcagatgttcatttccagacttccagtgaactatccttactgcttacagttaaaacgcagttaaagcatatgtatctgactaaaaaatgataacgggcaagaacaagcattcattgtagcagatttgatagcacaaaaatagggcatacacataatgtcttacaagccaagtttcagaattagcccccacaaaggtgccttttactcctttcgtgcatccttgacagtatgttttcttttccacgtagcagagacagcactaggctattcttttccctctaggatttttatgatattgaatgtgagggaatccaagttcgctctagttgatcacttgctcgtgagatactgagatctagagacgaagattggagagagggccggcttggctgcagaagcaagcaagaatcctacgtgccacttggagtacgctagatcttccagtcctactaacagtagctcctcaacagtctgcaggccctagctgcaccaaccaaaaacttcaagaattcaggatgcatatatccatccatccatctgtgcgttcgtgtgtatgacggttagcagcgaccactctgtgctagctagctccatggaggagagggacttagctctcattgatgcgcacacacctccgtgcgcatggagtagtatagtagtaccacactgctccataatacacatgcccgatcgatcgtcggcagcggcagcagggcctcgatcgcgagctagctgttggtatttattacacacctcggcctttttgggacagggatactggagaaagtaaacgattacattcaactcacggggatgtgtacaacccgatctattgatctagatattatgttcgatcttgtacgttctagcttgccgaaaaaccaaaccaaaacttgcatcaggtctctctctaccgggtataagcgtgtggtaaaggtaaaaagaacattgtcttcttccacgcctcagttgcaccatgcatgcattatgcgtaaatccagcctctaattaagccattggtgaacccatggagccatcgagcccgtacgactagcgttattctgagcctcttcttacggaaaacctcctcctccagagcgcacacgaacgacgccgcgcactgtgcacgcaagtgcgaaacggatggtcgttaaactgcccgcggcgcgcgctctgttcaggggcgtgggattcaccagacagccaccagtggcgccggtgcgtaagctagaccacccaatcaacagcgactccgtagtcaatcgtacaggctacttgcccccttcgcgcgcgcggtgcgcggaacagtcatagccacagcggttaccatcgcccgaatttaccgtcgagtcgctttgacccgtgcaacttaaccggtttaccattggtgagaacaactgagagaaggataagatcgtagagcaaaggttgctattgctactacaccattcagtagtgccgcgagttttgggtggattagccggtcgccttttgagtgccagtgggagaccggtccaaactccaaaggcgaggaaattctagccggggatgggacggctatggcgtgaaccatggtgcagaaggactgcatgccgtggcttagcttacctggaagggttctcttcgactcacgaaagtcttgcgtgctagtgaccccatcgcgcagcaaaagtgaaggggaaaaaaagaaaagagagcgctaaaaacacttgtggtacttttcagcgattctttcctgagctgccactctccccgtaaaaagaaaagaggtgaacgaatgcttcttgtacgaattccacttttttgctaagataatttaggtgcggcttaacagcggcaagaaaagtacaagcagagagcgcgagaaggagggagggagatcacctgcctcgtctaaaaaaagcgcaagggtaagcgccacctgatcgcagccgtccaaccatgatccatcacgtgtcgccacgtgagacagcaaatgagcaaaccccactgccttcgtccaggcgcgccccgcgctacggccacacggacacggggggacagcacaaggtcgggccaacgtatcaataccttgtcccgtcctgctgctcggtgtggaccaaccgattacgccgggagatccgcctcgggatgcgtgcccacacagcttccacaggggagagaagtacgatggccagactcattaaccgagaattaacccctgattaactgcgttaattgtcgtgctaatcccaccctgggtcagtaacgcccacaccgcgcaaagtcagtggccactgacacgccgatgcaatccaggtgggcccagcgaggagaaaagaacggtgccacgtggacgcgagacgtgggccatgcttataactacctgcccaccaaacgaggagagcagctcctgcaaaatcgagctccagttttgctgccgaaaccacacaaactgtccatcgagatccaactaattctcccaagcatttttaaacaactaaaagttctacatttttttttctcagtgctgcatgcttagtttaggaacagcaattctgttgcattagacagacgatttgttaggatccagcgcatatgtttgcgccggacaagtggggcccatcgcacagtgagaggaatgaacggagcagcagccaagcaagagacggacaaaatggactaggcaaagtacgaggctttcttttctgctttgctcctagcgtgagaagggaaggggggacgccgtcacggcggcatatgcagcagccaaaccgggcaggcaggtggtcgtggtggtgggcagtggaagcagggaggagagaaagcaggagcagaatgccgctgttgctgcaccctgcatgtggatgcaaccatgaacacactagggactactaggctgatcctgcattggtactgccattttgttgcttttcttttctactacactgcttactatctcgcctattgtttggccaaatcccgtaccatggacaattggaacaagaacagctggagactgcaacagaaagcaacagttcagctataatttttctcctgtggctctctctgtttttcggtggaatattttcatgctagattatgatcaagaagtaagcaagatgctaagctctgctagttgccccaatgtacactgttcgggtagcttgaaacaaacaaaaagacagaacagaatggaggacagcatcaagcaatttttgtagctgaatgaacaaaacaactgagaaaaaaaaaactaccaaagcaaagatgtctcctttttatgatattttctttaccttttcggctgcctggttaagcagctctttctctcgaatccatagctctaaccatcttctttggaatcaaccgaaaggagagagagcactgaacagccagtatgctcgctctctcatgctctgcttgctttcaagaacctggcttcgaggagaggaaaggatctgaaacggcggagagctccacgtcgtcgaacggcgccgggaggttcagatcaatgaagccgttgcttttaatcatggctggaatatcgtcgcccgatgcggccgccgccgcggctgagcacagctgggaccgcttgtggccgcccagagcttggccggacgcgaacacgcggaagcagtaggggcactcgtgcggatgcggcttcgcgccctcctcctcgccgccgtcgcactccggcaatggctggagaggcgtagcgggagaaggaggagggttaggcggaggcgcgcagcagccgcccctgccgccgcgcatgtggctagcgcgatggccgccgagggcctggtacgatcggaacaccttcttgcatgcggggcactggaaccgcgtccgcttctgcgcggccgctgcggccggagccggaggtgcgtcgccaccgtcgctcccgtcgtcgtagcctgcgccgcggagacggtagggcggcggcggcggcggcgtggctggccaggtgtcgcgggagagcatcatgagggacagcgctacgtcctcctccgacgtggcgtcggacaccgagctcacctgctcgacatcgcccgatccggtgttcgcgcgcttgccgtgaggcggcgaggagtagtactccgtctcgctctcgcgatccgagaagtcggactcggcgaggcggaccctccgcttgggcttctcccgcagcacgtatccctggatgggcctcttggcatcaccgccgccgtcgtcgtcgccgaccgcgacggatgtggacgcggaggacgtcgaggagatctgcgacctcgaggcggcgactgagtgggagcgcatgtggccggcgagggcgcgggggttgccgaagcggcggtagcagagcttgcatgtgttcttggccatggcgagagcttggatagagcttgatgaggcacagagcttaggagagctaaaaatacgagctttcagaggaaacggagagagatgaaagcgctgcttccgtggggagttagaatagagcggaactgccagcttcctctcgtttattgttttccttttatttcccccctttttttctgggtgactcattgtattcttgactggttgtatttgcagcatttcttttactgctcgtgtagaaccaagcccaaccgtatggaagatttcggactgatgcttgtagttaattgttagtacggatgaaaggaatgagcctattgttcttttcgatgaaatgagtctaatgttttgccatgtaccatcatgtggtccagtgcgtagtttttagcagtagcggttgtattgctgagatggtggctattttggtgatcagattagtcctaattaaaaatctttatttgctaccatacagaaatggcttttgcatacgtgccatatggctttctatgcgagggaatgtactgtgggatgctgctgtactcaatgcaatagctctgaaaattacccgccttggaagatgccactacacttcatggctgtcaaattgcccttttgatggatctccttaatatagctttgccttgttaaaccaccatttttatatcctgatcatccaaaggccacaccttggtgcagctcaggcgttcagtaagttgggtgagatatgtctgaatagagggctcagaatgagatgggaacaaagagtaggtgacaagaaggttgggaagatgggtagaccagtgagaacaaagcgaacacagggtggagtgtggcttggggaatcagtgatagtaataagtggcagattaatcagccggggtctaaatcacaagagtcacttacaatgcaccactgtttttatacctttctcattaaattaagatctgggtatggtgggaacaaaagatctcgatacggtttaggcaacgattaatcccttattagcagcacgttagttgcttacccacaaagcctgaccgagtgcccggccagcatgcatgcatctcatcagcggatctctcagaattatgcccatccaaatccagcctcatcttgttcttaatctccctggaattactcctggcctccccttcacattatcttcctgccaattttaaccaccaggcatgcatatgcaccagctgctgcatgctcgttgagagcttagcacttagcaggcaagcaagcaaagcatctgcgagagctagcctttccaactaaccgctttagggatctctctggttatgatgggtacgcattaggtgcgcccccgatttatgtacatgatggccattcaccccgaataaacacctaccagctagcgagctagccactcaggatcatatttagtactaccatcaagtagcgaccaagtatccagcatcattgttgatcaagcatttgttatgcttgctacggctgtcatgttagtagcatgctactgtgctgccgatgcatggtgttcattgtgtttgtgtgtttctgtgtgtttctgtgtgtgtgcgtgtttggacttcggtaggtaatttccaaatttccatttcactttgtagctggtactgtcagtactgtactagtacagcgtacagatacggtacaagtcaagggggatcggctggctggcttcaattccgttctgaacactaggcagcgtggcaggcgatgagatcataggcgtgtgttggtttcttgcttcgctcctcctctcgtatactctactggagtgtgaagtttttccccctatctgtcaccttcttttttcttttctgtcatcttggtgctgtccttgttctgctcttgatccctatctccaacctttgggagtattcattggaatcatcatcccgaattcatgatatgatatcgaagtgattagctctgaatacttacaaaacatgcagtgttctccttttcctttccttgggcctgcaggtgaagcagatttgtattctcctgtaaaatgcagtggcttggcaatcagtggaagcaaagggttagtgtcttcctatgttactattccacaatggtgtgtgccacgatgtctttttttctttcatggagaaaacgaaaatcgaaggaacgagtacaaatccgcgattcggtccagtactccggtcattgtcctaccctgtgaacttcacttgcagtcgcgtcgaggatccagaggaccaaagctttccgtgcaacggaactgtttagatggtactccagtccaggaacaagacgcgcgatgcgatggcgatgaaaaccacacgttgctctccggcgcgcatggccgtcttgtcctctcgcgctttcaaaacgagcgtgcgttcgtgcgtgcagcggagcggagcggggtaaagaacggaagccgcgagggctacgagagggctagcgtgcagtaatgtccactcgcacaactccttggattcagcaaggctggatggacgggagcgcgtcaggcgaggacgaacgggattgggtcagaaaggattacggaagaagtcagcgtcgcgtcccggtggctgcctgcctcgcgctcgaattggagtggagcgatccgagtcaagcgccgaacgaagcgaagcccccgtcgtttccgccgtcgtcgtctcgctcggcagcctcgcatcgcatgcgccggcgctcgccagctgacgagagccgcgtgcgccatcaagcttaattgtgagcagctagctggctgttcgacacgtaaaccgatgaacgaagcgaagaagaagctaccgaatgctgatgcatttgctgtagacctgtagtgcatcgtgtagaaaacgaaaaaggatcaaacatataggccgtgtttagttgtaatttttttttcaaaattccaactttttcatcacatcaaaactttcctacacacacaaaattccaatttttccgtcacatcattccaatttcaaccaaacttttagttttggtgtgaaaacacagccatagctttgttgtcccctttaatgccgggttggttcggaaagtttcgttaaagagggtttatgatattcctacatgtttacttggtctttttgagacggatttgctacatttatgtcgccataaattttcgttgattacagtcggtatacatgcctattggtcacacagccgcacaggcttcccactgcatgtgcttccatgagagagaagattattttcacacatatatcgcgtgatgatagacgattacatactaattacactataattacatactattttatgacttacatatacaattttgaaacttacattgtaaatacactaaaattacatatgtaattttgggacttacatatgtaattttgagacttacattataaatacactaaaattacatatgtaatttaagaacttacgatgtaaatacatatcgactattttttggtgaaaaatatggcgtcataaatatagctactgatataagaacggtaaatatattcggtagtttgacgtgagggaaagtaaaactaggtgatgtgaaagacctttttacacatcgacggataaattcgttgtagtctagctggttaggatactcggctctcacccgagagacccgggttcgagtcccggcaacggaaatttttgattttctattttctggtcatgcaggcatacagcttcaaaaattcatatcttaaataacgatttcagggtgcagcatccaggctgccattggcccacgtggcactctacaaaattttccagggctactctgaaattatgccacgtgtcctcccgtatacataattaaactgcattcttctgtccacttaactctcaggaaaagtcaggagtcaataaatcaccttgcctaacccttgtgaagaagttggatatgtaacccttccgaagtctctagaaaaattaagatagaagttggatatgtaacccttccgaagtctctagaaaaattaaaatataacatggttcttcacgtgtatttatacgcacaaactatgtcagtactcacatagtcacatattgatttccaagacctttgatgctttaactttttaagactggttttaacttttaatacaaagagtaatcttttaatacaaagactggctttggatattaagctgacaattagagtcattagcctaaaaaattatgccttacataaatttcgtaattttcctataggttaacaaattctgtaaattatactaattcaaaagacacatcttccaaagtatttgtccaaaggtacttatagacgcttaaacaagttaatctttcattagcaaaacttttttcaagttgaattataatatacagcagagaagtacggctatctaaatgtggtagagaagaattaattagccatgcatacactaattaaccatattactctatttgttgataatattgctctaactatgttcgattgtacctatgattagcttgtattatttttaagatggagggagtatcgtatatgagactacagagaggagtaggtgacactggtatgttagcagaagaaatttctcttagagagacttgtcaaaaaatatatcctttagttttcggtccactaatgatctaatcttaccaattaataataggtgttaattactctgtctaatggaagagaaaaacaaaggtttgaaagcaaataggcaagtactatacataatttttatacataattttgctttatgtattaattcttttacaacgcttaaatctttacataaatatggttattactataagttaatcgttcctcagtcttttcaaaattcattaaataggttcttgtaaatctactgcatttgaaactctagacaacaacaacaataatttttctaaatgagtaaatatatccagctataagttggtgtgccgatggtgcgccaattttctaggatatggaagcagggaattgggaaaggatagggaggtgagatttgtatatttgtttctaatttttagggtatttagtgtaatgttggactattctataaatttgaaaaacataagaactaaagtaagaaatatgagggcccggcatgaaaaatcaagaatatctctagagttactttgcattataggataaacaaatttgagatatgctaactcatcctacgtgatactttgaggagggtcttgcactacgaacgccctaagagaggtggtatagctatagttttccgaattatacatatgaggctacgaattgtgacatctaaatggtgtactactcgcaatagaagatatggaggcgtgtccctctccattcacatgtggctcttcaaatagtgtgtgaactatgtggtcctctcgtagtcatgagtcatgactattttcgactactgagaagataagcaaatatttggaaaaaacagagagcgcggtagagatacaaatgataagatttttaaccatcgaggatttaataatgtaaaagtaaaataaataaagagaatttagaatgttatacttaggctgaaagaaaataaaaatatgggaagaagaaaaagaaaaaatcatttcccttttttttcataaccagttaaaaaaacaattccaactgttagtgctattataagaaacctctagttattatgagtaaattccctgtgtacccctgaaaactcactcaatccctttcatacccctgaaatttacccaatcccttctatacccctgaaaattcaatttgatcccttccatgcccctaccgttacattttccatcatttcactgttacgtttggttgcaaatatcctttttgccctagatgctttaggtttaaatataagcttaaaaaacaattgaaaaaattttgtttgggtgcacagtatgtgcattttataagactaatgaaactaaataattagtgcagaaaattttgacataaattttgaaaataaaataaatgtaataaattaaaatttttatttcaaattttaataggacaatggatttttttatcgggagcattcataaaaaaaatgttgtgaacattggtagtcctatctttatatgaatgctcctcatttttatgactttttttaaaaaaataaatacgtgttttttatttcatgatctaaaaatatttttgggataaataatgcatcgcacaacaaactcataactataatagtctcatgcgagaagcttttatatttttaataatgtaattcatgaatttctttgttcatccaagggtaaaatggtcatttttatggaaaatagacggtcaactaacggtcaactgatgggaggggtatgcaagggatcaaaatcaaattttgggggtatacaaggaagtaagcaaaattcaggggtatagaagagattaggtaaaatttcaggggtatataagggattttctcaattagtatagtcccaaacaattttcatataaggcttcaccttttagccttatcttattaataataattaaatcgaccatcaaccaacatatatttgacatcattttttcctctgtaatttaaatatttacaaatataatgtttactcagacttgtaggcataaaattaaaaactgctaaaatatctctttaaaattttacgcttttacaaataacaataaacagtatatgtagtattaatatggtttgctatatggatggtgtgctaacggcgcaccaattttctagtatttacctcttttgtgaaaaaaatactcaatacttgcttctcttgagaagaaacaagagaagcacctatttctttaaaattttctggtcatacaacttaacagattaaattcatatattacctcttttgtgaaaaatactcaatacttgcttctctcgagaagaaacaagagaaacaactataactttaaaattttctggtcatacaacttaacagattaatacattatcttgtgtgaaaaaacaagagaagcaactatttctttaaaaattttctggtcatacaacttaacagattaatacattacctaaattttctggtcatacaacttaacagattaatgcattacctcttgtgaaaaaacaagagaagcaactattttttaaaaaaatttctggtcacgcagcttgacagattaatacattacctcttgtgaaaaaatactcactacttgcttctcttcagaagaaaaaaaaatcctacaagtctactgcctcttcccaaattcatatgttacctctttgtaaaacatactcactatcttgagaagaaaaaaaaacctacaagtctaaaagaaaagaaaaagtcacaaaaaagaaggcaaatacttatatgctcatgcgaacaacatatatgcaattgcaaacgcatggaaataatgtaacagtatatatgtatgtactgatcaattcgcagatcaatcactccttgtcgttatcatcagcacccccgcgagacgaggagccaatgccgacttgcagccacggtgtcgtctcccctgccatgctcacgtccttgagatcgctaagcctcgctctcttgacggtggtgctgtccgcctcgtcctctgctgcggcggtgcttaacccgaccgcgtcgttggcgttctggctgccggttgtcgcggtagccttgttccgttggctgggtatcgccggcgacgatgggatgtataccggtggtggcgcgtcgagatgaaacgagctgccgccgaccttcggacggactgttgcggccgaggccagcagtggcgggttcgccgcgatgctgaggtcgagagcgggctccggtgcgtccaacattggccggaacgagagcgggacaaggtcgtcggctaggggtgggactgaggcggtgtgatccgccgaacttgacgtcagccagtggcaccgtttgtggcctccaagcgcctgcccggaggtgaacagtcgatggcagaccgagcattcgtgcatcttgcccttcttcttcaacggtgcagcggcgagcgcggcgaccggcggttctatgggcacgatggccatcgacagttctgccgcggcatcgctcgtgccggcgtttccatcaccgtcgatgcttgcgtgcacgttcctcctggcatcagaagtggccttggcgggattgtcctcgctccgatcagcgacctctgcatggtgtgatggctcagccacctctgcggcgttgctctccagcttggcagcgaagcagcccttcaccttcttgtggctggcacggtgcccgccgagagcttggtgagaagagaaaaccttcttgcacgccttgcactcgaacatgcctcgaggcacggtcgagacatactgtggcgccggcgccggcgggggaagcgccatcactgtatccagtacatacgtcgtcggctccatgaacgtgatcagtctcttatgttccttactcgcggaagaagatgaccgttgttctgcttcagtgacgcctgcctgatctaccttggacgacgagagcatgaccaggcaattggccaggtcctcctcctcgccggcagcgcacgctgagggtgtcggtgacaaatcgactcctgtgcccttgcagcgacgcgagcgcttccctttcaaccaaccggcggccggtgcagaatcctcttcgccgtcggcctcgggcgaaggcgaccacggttgcagcgagtgatccacgtcgtcctcgtcgtcgtcgtcctcgccggagctgcacttgccgtgctcgaggaaatgctcccacgacgtgaactccttcccgcagttcttgcacacctggcggctcctcgtgacccggttaggattggtgcggagctcgtagacgtgtgtcgctgcccctgacgacgacgggccgcccgcgttccaaggatcatctgccccgccgcgcgcacgccgcacggcctcatcgccgagcgaatcgtcgtcgtcgtcgtcgtcatcatcggcacccaacccatcgccgtcgccgacgccgtgggccctcatgtgcccgcctagggcgcttccgcacgtgaaccccttgttgcagactctgcagaagtgcttgtaccccgacgcctgcgccgccgtcggcggcggtgcccgaggtgatgacggcgacggctgcatctggccatgatgctcaagaagatgcaatcgttgtatggaaaatcacaatgtcaacatgtctcgacgaaaaatcaaatcaactttcggtgcgagacatatatatatgtgataatcgactaagtaccaaagacggtgaagattcacacatgcatgcgcttggttcgccgcggcggaatcgaattcgacctggagatgggagcgccgatcaagtgcgcgcctccgtccggtgtcacgaactcacgatcgcagcaatgccgcgagttctcctgaacctgaaggtccaaaacagccatccaaatttaaaaacttcgtcactactgcacgtccatagacatatatagttctcataggcgtgtttcgcggtgcatcggccgctttagctagtgacgtttgacaacgcctaggagtgacacgtgccggtgataataagctacatatctctgaatctgaaagtcaagggaccagcccacgaatcatgttcgtccaacggatgccatttgacatatatgtaggattggagttgttagttttttaacaacagcgcacgtgcactagtgtaccttggggctccttcggattgcagaatctaaaattaattttgttaaatttaacattgaatgtattttgataatattaatcaaatgacttataatatggaaaggagggagtagcaaattttggtcgtaattttaaaaatgataatcatgtaagtatcattcgcgtatgcacatctgaatagcaaatccgtctgaatatgcgacggctgctatactctagatcgcacatttttttagatgagattgtacactcttgtttcggaagtttccagagagcgccgtatgttggattgcaataagtggcagcgatccaaattcttacgattaccaccctccccttgtttggcgattctaaaataaggccttcccggggaattttcggctcctttcgccatcctgcgtcaacctgctgatcaatcgaccgggcaagtaacgcaccgccaggtccgtcaacacgagttgggctgtaactggatccccacacacgtgcccaactacatgggccggaacgggattcccatctgccgcaattagttgggccgggactgtattcacacgaacgcgcaacatgaattacagaggaataagttcactttgagtccctcagtcgccgagtccaaaattagtcccttgagcgcaaaactgagtagaacgcatccccaacatataaaaccaatacaaacgagatccctcggtggtattgtcctcagttttaactgacgtgacacatacgtggctcctttgacaaggtctttatcccacgtaacattgacgtggcgcttatgtggcaatttgattctgtaaaaattaaaagacgtgggacccacatgtcagctacacacaagataataaaaaaaaagttgaggcccatgtgaccccacgtgttatcgtcactcctccctcttctccctatcccctctctccttcccctacactgcaaggagaagggcatagcggtagtgggtggcgcagaggagctgaagatgaccaccgttggcaacgcccacaaagcctcatccatatttccgcggcgtgcactgtgctcgggaacagctctgactagtacacatgcgccaacttcatttccaccaactccgactcctcctgtggctcctaggccagccgcgtgagccgccacaccttcttccctccaaaaccgcgtcgcacctcaacttccaccatgccatgagcacatgccccaccaccgccacaattaccacgatcaccaccacggagtccgcggacaacgacaactcaaccgcctcccctctcctctcacccttctcccctcctcctcctctcgtctcctccctgccacatagatctcaccgccccacccaacctcttgcacccaccagatccgcgcgccaatacatccactccccctcactatagccaacctgtcgaaatctagggctcccaaattttcccctctctcctcttctctttcctacccatgttttgtttggtctttggaagtaacagagagacaacaaatgaagaagaaaaccggcggaatccacttctagtctacgcacttgggggtcataatgcggaagagcaccacgagcaccaggagcgtggtggccttggaggcacggtcgaagagggaaggcaccggtgaggtcgccgcccaccatcggttagctccgtccgccacctgcctcgcttgcctgctccgccattctcctcgctgcccacccccacccccacccccgtccgccaccttggaagagatgatgaagagaggggagatggaagaagggaggagtgaggatgagtaagaatagagagaggagagagaggggagagggcaaaagggtggaccggaggagcgcggatgacatttggggcccacatgggccccatcatttttaattgttttgtggtgtaactaacatgtgggctcatgcttttttttattacccatattaaattgtcacgtaagcatcatgccaacgtcacgtgagacgtagtagtcaaatgaaccatgtaggcgtcacgtcagtcgaagccggggatagtatcactgagggatctcgtttgtactggttttgtaagttggatgatgcattgtacctgattttatggtcaagggacgaattttgaaaattaagggaccaacttattccaatcacagattcacagccgacgtgcctccgaatgtgggccgagacagcgcagctgatcggccattccattcgtcccgctgcctcgattctattctttgccgtcgccgtcgcacgctcatcctattcccccacaccgactccccgtcagctgcccagagctactcgcctgaaatgttcctcatgtactccacgtagtttcctgcatctgggcaatttcatctcgtcagatatagtgtctggtcactggtgccctccaagaacgggcaaagctttgtcatcgctctagtctgtgggtaaattatttccgtcacaagatgctgccatggaatgctgacaaggacctcagtcctctcctcactcagccatggtccatggaccaggggcatccgcgttgccagaaatcagatcctgcacctgcacagaaccctttcccgtaccgtatgggccgccgcgtacgtacgctgccgtgggggcggccgagttgctgcagcttgcaagctgtgctgcgtcgagtaattcattaaaaataactcttattatccgaaaagtttttaatgtgcaccgacaacgcattcgcatatcgcaacagagaaaattttgcgtgctatgttcgcccattggcatggaccatgagttaaggtaaagtgttaattggtagtcatatttggtccctactggagttgatttgatgtaatctcgctaccttgtcgctatcgattccgttagcgttttaaagacttgatttgccggaaagcaaagttgatcggtcgtgacaacatgaaagaaaatcaattttacttgtccccgcatcagttcttttaccaatcgaggtagagaggaacaattgcattgcacaattcttactcctatcctaagtacacgagcaaaccataactatttacatccttgatctttctgggcactcgagtggcagctgccggcgatcaaatcgtgcggctgctgtgccggccgcctgtggcgggcaactggcagatcacgcgcgaatggcggctccggagctgacgtctactgggctgccgccgacgccgcttgcctctgctgcgcctgcgcctcgccggagcagacgagggccttcttgaggcacctctccacctggtacccgccgccgtagctcacctccctctccaggtgccggcagtagctctggaacacgctgacgctcacgttgagcctgaactgcatcaggaagaggaagtccagctccagcgagctcagttccgcggcggtcagcccgcccaccgcggcgaagtacgagttcttgtagttccggtcctcgacgaacttggaggcgacgaggatggctgtggtgagcagccgctgggcgttggccgacacgacgcgcacgccgtcgccgcggcgaagccggtccaggtacgcgtacgccacgacgtacacctgcggcgagacgttcgcgtaccgggagaaccgctccaggaacgcgtgaaggctcatgtccagcaccgtgccgctgtcgaaggcgcgcgccctcctcgcggcctcgccgtccgccgccgccgcctggtccctctcgttccgggcgatgtgccgctccagcagcgacgcgaggaccgacacgaccaccggcgtcgacagcgccgtcgtgccgtcgtcgccgcacgggagcgcgtacacatccgacgctaactcagtggacgccatctcctgaagaattcaatggcaaaagcttggttcttcacaaaacctatgctacacaagtacacagagaactcttgcaaatgcagacactttatacaccagagggaggcaagcgtgggggcaaaaagaagctattaacaatggcggaactgaacagctgaaggcgacacgaggaaggagcaaagaaacaaaagatatcggcataaaaaaactcagcacgtacacgcaaactggagctaaaacaaatcgagacacggagatgaagccttcaggcaccttccattgaggcccctgacccgatcacccgagcttatttatgatcaagcggacgacaaatgcatccaggggcagatctgattgatggctggtactgcactactgcggttgggggcggcatccgtgatcgacgaggctggatttatgagggaaaaacaagcgcgagtggcgaattatcgcgtcggtgcccggcgaacccgtacacatttaactatgcgagacttttcccgcgtacgtgctacctgctgttcaggtacggcgtcttgtgtcacggcgagacgcgtggcttgtgggcaagtgaagaacagatgcctctgatctttttagtcttgccttgccggttgataagctagtttatgatggtaatgggaacttctgttaagacgtcgaagcgaccgatggatgcaggagacgacaatggccgcggcgttgtaacaaccggttcttggagttgctggagaggagtggccctttctgccgacagatttgcactattttagtaggttggatgatcagtgggaatactgttcttgggtactcataggacagcggcatcgaggtgttgacatgaagatccagagaggatataaaaatggatctgctgatagtttttcttcatcatcagtactacttgcagaatgatgaggttaggttgcaataagctgcttcatcgaaaataattaaagttgccaaaggttaatttatttcatttgtgaggatcattttttggaaagagatgtctggttggtatatgcacgcacataaagcttgcaggaataaagcagaactttgctttgctttctgataataatgatcaaagttatcatgcccctgatcttagattttttttttgaactcctgatcttgattggatattggtatttctctcccactggacaagtagcttttgtttattattgtcaggcgtgataatgtacagcatgatctttgccaagagattccactctgggacatcgaatcaatcggccatggcttgcgacagtgctcatgcgagcggatggtaaacaaattgaggcatgtgtttactagagaatttttaaaaataaatttcatgaaactataggtgttttaactaaactatccaaaattataaatttaaggcaccatatcacaaaaccacatatttaaagtacataaaaagctatagatttaatattaaagttaacataaaattatatattttatagttgaactataaatgttatagttttgtgattaatatgatgctaaacttgtagttttaggataattttgttgctaaatctgtattttttgatacttttggtttgggataactttagtgataaatctaaagttttgtaattcaacgtcttaaaattacatttttttcgatagtttggttaatgtataccaatatatagttttgcgagatttattatttttttcattgaagcatgttttacattctgctcttcacttgcttacggtgaccaggacaaagatcatctgaacgggacagagtaatgttagagagcagagtgacagcctgggggggggggggggggggttgtcataatacgtagcagaaaccacatatataattgaaacctcaaaactaccgttagattaaaaatggacgcctaagatttgttcacgcgcacgtggacgaatcttatgtccattttattttaatccaacgataattttcaggttttcagtatataagtgatttacactatttttgcaaatagaatacgtatttatcaagtacttccttcgtccaaaaatataacaacttttagtctttagaatttgtcctaaaatataataatttcttcattaacattctcctttcaaccaatcacaacctccactattcaattttctcacatatctccacttattctccagtcagagcactcccccatttaattctaccaactttcttaataaccgtgtccaactctaaaaatgcttatattttggaatgaagggataagctagtttcaagcaagtgcatgtttggtgaatgaaattgtctggtacacaataaaaaggtttattcaccaaaacaaacaacttgtctagacgtatcagacccaaaacaaacgtattataagttaatacactaacttaagtccgtataccggtaatgcatatttactcttttacattcctcaaaaagttcatgaacgatcacatcatataaaggactaagcataataacaaaagctatggttcaacgaagatatgtaacatccatggtgtcatggtgtcatggttatggataccacatatctaatagtagttgactaaactcggcaggacccaccacatatcatgtcttatacggaaacaaacctcgtatataaaaagagttccggataaggaagaataaatagagttctatatgaaaacgggaaggactactcggattgtatccatatttatctccttaatcttacttggacaagggggcacttatgggtataaatacaagcccccctaggagaaaaggggacacgccacaaagccacaagacataacatacacataagccaagacgatggcagctatataggttatcccaaatattgtatttgtgtgatccagataaataaagagcaacactggtttcggctaacaggatgtagggttattacctgtcagataagaggcccgaacctgtataaaaattcatgtctccatctcttttatcttaatctcgcacataccctgataccaacgatccccataccatccaaataccctagtcgtgactatcaaacgtcgacacatggggatgccatctcaagcgtggagctgcaatgatgtacgattgagctgggccggagcacggaaggcacagaggtggagccgtggagggattggacgactggggccacaacggcggcgcggctgccattggagacagaaggggcggagggacggggtgctgatgtgttgggctttttctcaacttgggtcttctgggctcaagtaatagcgctgtttcggaatggagaaggcttcgtattagaatagaggaacaagtccatttgtcatccctcaactttgcaccgagtttgtatgatatccctaaccctcaataccagatatcttgatcctagtcttcaaaaccgtgcaaagttggtcccatgacggtatagatcattttcccccttttttgttgacatggcatatggaggtcccacttgtcagggtgtcgttggtgtcactgggagatgagggaaagagagaggagcacctgctgcagtcgattgaggagcccccgcggaggggctcaccggtagtctccctttccttttccaccttcaccttccttgcaccaatgccgagcaagctcaagctcagtggggctcgtcggccacgtcgccccttttccgcctccagtcccctcacatggaagctgagctgacaacctccccctctctgtctcaccgcatgtagctcatgacccgccaccttctcaacctgtcggacaacctcctccccagcgagctattccagccgccagccctcgacgggcacaaccatcgtctcaagtggtcttagtgtgcagacttgggagagggggagatgtggatgatgtgcactctccttcggcgagtggagaccgcggcggcggtcgaaggccctcgaagaaatcgtccctgatccgcctcgacctccaccccacttttctcgctgccgtggctacagcagcggctgccaccaccacatcacgcctcttccgccattcatcatcatctctgttgccgcgccgctcacctcaccatttgtccgtccctcatctccgagccgctcacctcgccatctccgtcgctgcgtcgctcagctagcctcacctggtttgggaggagaggccgagaacaaggggaagagaggaggaaggagggagagaggcagccgaacaaccccggcagctcgccggagggccagttgtccaccagtgccagctcctgcagcctcgtgctcgccggaaactggtctttgctgttgatttgtcaaacaacggcactgacgacacactgacaagtaggccccaccgtatgccacgtcaacaaaaacaatgggaaatatggtctatattttcatggaaccaatttttcacggttttgaaggtttgagggggtcagaaataatttctggtattggagattatgggtgtcatgtagactcggtgtaaacttgagggatggaaaatggacttattcttagaatgactagcgcgtgggccttccccgacttggatcgcaactactggtgtcgttgcccttatttgtggccaacgagaggtatatgtagtatccggttcggcggttgccatctcggcaaagtcagatcacggcgtatagattgacgtaagctgattcggcagagaacagaagacgtatcatgtatatatatggacgttggaaaataagaaatcgcttactgcatacgattatgccggtagctaaaacagagcaagaatagaggccgtcacacggccgggctcgtcaaaaccgagctacggttgccggttggggcaggcccgggatgtctccaaccatgtcaacgcaattatacaagtgcaaatcgcaacgcagaattcggttaagttataaccaagcaagagacgtcactagaagcagctctgcaaacggccacggagggagaacacacatcacgaacacttaacactaacagatcgaactcctcttttaccgcggctgcgcacgattcccggacgcgcacacaccgaactcacttcgacgaggcgagcttctgcctcgcgatggatctatcgcggcgacgttaacaaacacgcgcgtacgtagtcgcgcacgacgccgccgcattaggcggcgtagttcacggtggatcggtaggtcaacccggcctgccacccggaggggatgacgttgttggcgacgagcaccttgccggagcccgaggtgagccggatcgagaacggcgggctcagcggcttcccggtgttggagttgaggcgccaggtggcgccccacgactgctgcatcgccttccacccgccgccgccgcgggcctccatgatgtgcaccgcggcgaggtcgccgtcgccgttcgcgtactggaccaggatggcgaggtagtacgggttggagcccgcgtccaccttgaaggccacgttcatggcaaacctgcacggcaccctgcaggcaaaagtaaaaattcagtaaaaatctgcacttgtacattgcagagtggaccagaactccagaaataattttgcaaattcaatggcggggcacctcttatactggatcttgaggactccggcggagcggaggcggtcgcccatgccacggttggccatggcgccgaaggcggtgccgctcatgtcgaagtgcgccgcctcgttcaggcatacccctccagggcaggagtcggtgatcacgacggtcactgggcggccggagcacgcccggttgccggtgcacttaatctgtacatctaatttagttaggaatgctccacgtcccatgcatttgactggtaaaacatacaaatacactactgacttggtagcatgagccgcagcctttgccattcttgaagagggagggcccgccggcggcgatcatcgacgagaacgggcgctgcccgacggcgctctggtaaccgcacgcgccgcctgcatttggattaattaaccaacatggcaacgtgagtacttgaggtcaaatacgcacatgcatgcagttcatactaccacttgacaacgacttaattaccttcgctgccgtcgccttgcgggccgccgtaccacgtcgcgccgccggaggaccagccgtagcctctgcccagcgacatggtgctccgtctgccggcagtgtagttctgctcgtagccagagacggggagtgacagtatcggtagcgccactaggacggcaaaaacgaaagtgccccggctaaccattgctattttcttgttgggcaatcggttaggtagctgggattgttaagcggagattgctcggtgatttttaagatgatttgatttggttggtatttatagggaagattagcggtcacaaacgtggtagcaaattatgtgtacccaagcattattgaggtgaacgtggcaacttgaatttgtacatgtgttgatgtgtatgtcaactatgtgtgtgtgggatcgaagagtatacttgtggactttacggaggtccttgcatgaaggaggtgatcacgcagccgcaagggtttggataaactattctcacaaggtagttgtgttggttagaaacgctttgaaaattcgcaatttgatattcgtcttgtgtcatccgtacgtttgtcaaatggctactccataatgtgtacgacttgagcgtgagctgtacgtgcgcaacgtgcctagcaaagtagcgagtatcatgcccggccactcgaatgtttgtacatatggtacatatatagttcctttttcttttggagaaatatatatagttcttttagaggagaatgttgtatagtaacacttagtggcagcaattcaatcgaactagctgggtagcccgcgcaattagcacccatacaaaattatctattttaatatgatttattcaaaatttgttaaatagctatctcattatcttaagactttgaaagaccaaaccatatcattctcgtgtttttaattatatagtttttaaaagtcacaccaattactaccccttatgtcatcttcttctttatttgcttgctcgatctatcactatttctattcatacttcttggaacctttaaaaaatagattttatagtttttagagtttattgtcacgttgggttttatttttataatttctagatgtctcgtcaaacgttgccattatactcctctacggcccatcaactatctcatctctttattgtcattgagattttaaaaatcgaacataattatcgttttggttcatttttactttctagaagtcccaccaaaccgtcagcggctttgccattgtactcctctacggctcgcccgctgcctcccttctttattgtcattgagattttagaattgaacatgattatcattgttttttttactttttagaagttccgaacctttaaaaattagacttgtagtttcattttttataattttgagaagtcccatcaaacaatgccactatgcccctctacaacccgtccgccgcctactctttattgtcctcgtgattctaaaagtcgaacataactatcgttggaattcattttttattttctagaagtcccgtcgacggctctgcaactatactcttatacaccccacccgctgcttctcctttttattgtcattgagattttaaaaatcgaatatgattatcaatggggtttgtttttttactttctagaagtcccggcaaccgccttactcatttgcttcgcggcctacctgacgttcctcctttgcggcaattgtgttttattaacaatttttatatgtcgtatcaaccgccaccactctactcctttacaggcctgttacttaacttatctcgtcatgtgttttagatggtcttttctttcaataatctttatttttatcaaaaaattgagttacttatatgcaccccgcgcaccgcttctcatttttattgccattgagattttaaaaatcgaatattactatcaatggtttttttttactttctagaagtcccggcaaccgccttatttgtttgcttcacggtctgcttgacgtctctcaatttaatcgtcattaggattctatttgatattttattaacaatttttatatgtcgtatcaactatcaaccgccaccactctactcctttataggcttgttacttaatttatctcgtcatgtgttttagatggtcttttctttcaatagtctttatttttatcacaaattttagttatttataaattgtattcctaattgaaatcttatttttctttttctaatttcagaatttattttttttaaaaaaattagttaataccgtgttgtgttcttttaatgtttttatttttaattttcaatttcagttgtttcaacattgtattcctacttgaactctcttttaatttttctaattttggatattattttattttttatttaaaattttaattaatctcatattgggttcttatatggattcttctttcaatattgcttatttttaattccgaatttcagctaattttaaattgtattcctacttgaactcttcttttattttcttttgctaactttggatttatttttattctaaattttaattaatttcgtattgggttcttatatggactcttcttttaatattccttatttttgacttcgaatttcagctatttttaaattgtatttctacttggactctcctttccttttctaattttgtattttcttttacttttatttcgaattttgattaatctcgtattgggttcttatatggaatcttctttcaatattgctttttttaattctgaatttcagctatttttaaattgtattcctacttggactctcatttccttttctaattttagattgtattttatttttatttcaaattttggttaatctcgtattgggttcttatatggaaacttctttcaatattgcttatttttatttccgaatttcagctatttttagattatacttctacttagactctccttttctttgttttctttttctccgattaatgtgggaatttttagcccctacagcgaacgtggtgccttcttttcgagctgtcttaataatataactagctgggtggcccgcacaattgcgcggctagcacccaaacaaaatcatatatttttttaagtatgattttacttaaaatttattaaatatctatctcattgtcttaagaatttgaaagaccaaaccttatcatcatcgtgtttctaataatatagtttttaaaagtcacactagttgctaccccttatgtctcagcttcttctttatttgattgctcgatctaccactatttctattcattcttattggaacctttaaaaattggattttatagtttttagagtttattgtcacgttgggtttcatttttataatttctagatgtcccgtcaaacgttgctattatactcctctacgacacgtctactgtcttatctctttattgtcattgagaatttaaaaatcgaacgtaattatcgttttaagttcatttttactttttaaaagtcccgccaaaccgttagcggctttgccattgtaatcctctacggctcgcccgctgcctcccttctttatttcattttgattttaaaatcgaacatgattatcattggtttttttacttttcagaagttccgaacctttaaaaattgaacttgtagttttatttttaataatttttagaagtgccaccaaacgatgtcactgtgtccctgatctacagcccgtctgtcacctactctttattgtcattgtgattctaaaaattatttttttttactttctagaagtcccggcaaccgtcttattcgtttgcttcacggcctccctgacgtctctccttttaatcgtcattagaactctatttggtgttttattaacaatttttatatgtcatatcaaccgccaccactctactcctttatagtcatgttacttaatatatctcgtcatatattttagatggtcttttattttaataatctttatttttatcaaaaaatttagttatttataaattgtattcctaattgaaatcttatttttcttgttctaattttagaattttttttaaaaaaaattatttaataccgtattgtgttattttaatgtttttattttttattttcattttcagttgtttcaaaattgtattgctacttgaactctcttttattgttttctaactttggatattattttttttattctaaattttattgcttcacggcctccctgacgtctctccttttaatcgtcattaggattctatttggtgttttattaacaatttttatatgtcatatcaaccgccaccactctactcctttataggcatgttacttaatatatctcgtcatgtgctttagatggtcttttattttaataatctttatttttatcaaaaaatttagttatttataaattgtattcctaattgaaatcttatttttatttttctaattttagaaaaaaatttaaaaaaaatgtttaatactgtattgtgttattttaatgtttttattttttattttcaatttcagttgtttcaaaattgtattgctacttgaactctcttttattgttttctaactttggatattattttattttttattctaaattttaattaatctcatattgggttcttatatggattcttttttcagtatgcttatttttaattccgaatttcagctaattttaaattgtattcctacttgaactcttcttttattttctttttctaattttatatttatttatttttattccgaattttaattaacctcgtattgggtttttatatggacttttcttttaatatttcttatttttaattccgaatttcagctatttttaaattgtattcctacttggactcttatttgcttttctaattttggattttattttatttttattttgaattttgattaatctcgtattaggttcttatatggaaacttctttcaatattgcttatttttaatttcgaatttcagctatttttaaattttatttctatttggactctcctttccttttctaattttggattttattttatttttatttcgaattttgattaatcacatattgggttcctatatggactcctctttccatattgcatatttttaattctgaatttcagctatttttaattgtatttctactttgactcttcttttctttttctccgattaatgtaggattttctagcccccacagcgaacgtggtgtcttcgtttcgagctgtcttaataataatagatagatagatagatagatagatagataatagatagatgatgagggctgtatgatagtataagttattttccgacaaggaaatgggccgtttaccgcgagaagttggtgtgggcccggctgcaggcccaatccccccgaatctcgcgccgcgtagtgagctgagagcgttgctgttcccctcgacacagaccgtcacgccggcacgcacgtaatcctcctctacaccaaccgaatcgttgccgcgcacccacgcacgcacgcacgcaatcggcaatccccacgagaaattccccggagcgatcgctaaacgtgcggtgcacataggcagggagggtgacgaaacgggcgtgtggtctcatcttaacgtattggatattttgggtcgcggaatcgctggaatctcccgtgcaacgcgccgttgatagcgaagctcctgctccaaccgcgcgggcgggcaggcggacgtgggaggcaacgctgttcgcctgttcgggccgaggagatcatcatgcagtgatcagacgacggctgatcgcgcaggggggcgcacgtcgtcccgtgaaaacaacagccgcgcccgcgcgtctctatctgggcatatcacatcgtcttccaccgatgggctcttcttctcctacgccgccgatcatgtagtcgacgccacggtgggggtggtgtgtgtgtggtggtggtggttgggggggtggggggtggacaaaggcaaatcatgtttgttggcagcgttgccgtcggcgagattagcggaaagttgttgtgatagcaggccggttgacgtagatagagagcggcctaggcccaacacaaatttgctgcgctttgggaggagcgaattgggctctcgtcctatacgggctggaatcaactatcccagcccaccttggataatccgaattgttggaagcttcggcctaaggaataagttcatctaaggtcccttaatttacaccgaatccaattttcatcctttaaccccaaaaccagatataatttgtccatgactgtcaaaaccggtgcaaataagctccctcggcggtttggaaagcggtttttgctgacatggtgcctacgtggctggtttgactaggtcttcatcccacgtggcgctgacgtggcaattatatcttaaaaaaaataaaaaaacggtgggcccacatgtcagctacacacaaaaaaataactacaaaatggtggggcccacgtagaccccacatgtcatcctcacttctcccttcttcctctcccctctcatttcttcctctgcgccggctgcatcagggacgcgttcgacgctgccatgaacaggacgaacaggccgctctgcgagctccgcaagaacgtcatgctctactacgactgcttccagctcctgttctccgacgtggactttgtctccgggtacggcaacaagccggagtagccgctgaacaacaccaacgtggtggacaccttcatcgccggcaggttccgggagcacgtcgcggtgctgttgaacgctaccgtgcacgatggtgtacgctttggtgcagtgcacccgcgacatgaattttattttatttttttcaaatgttcaccatatcctgattaatttgtttctcttgcttggttgctgcatgattttggtcgtggtgcagaacaatcgggttctgatgtcccctccggcgttgtcctccacctcggcgtcgccctccgctctcggctccaggaggccgttggtgatggggaagcgacgacgccggctttggtgaagcaacaggacaacacgagctcgtggctcgccacggctttagctccttcgttcctcttcccctttcctatacgcgcgtgccccggggggagtcaggcgcggggacggcggcggctccgggacacggagcagaggggcgccgcggcgggcgagcggagtcgtcaacgcccgcctcccccgcagcagcgtccggcgccggccgaacctgtccctcctggccgaccgttgcacgaccccgcgtgagctcgccgtcgtccacgccgccatgctcgtctccggccgcctcgccgacgacgccttcgcggcgacccgccttctcgccgcctacgccgtgctctccccttccgacgccgtgctccgcctcttcgccacgagccacgagcggcggccggaattccatgcgaagcgccgtcgcaacaagctctgccgcctcgtgctggctgttgcgtcggtgtagaggcggcgcaggggaaggaggatggaggcggtggtccggcgagggaggagcctggcaactgaggcggcggcggcggcggcggcggcgaggttgccgaggtcgccgcctcgcagcctcgctcgcctacgggaagaagatgaagaaaagggagagggaagaaagggggtgtgaggatgacatgtgggcccacggattttattatttttctgagatataattgccacgtctacgtcgcgtcagcgccatgtcaatgtcacgtgagacggagacctagtcaaaccatccacgtaggcgccatgtcagccaaaaccgccttctaaaccaccgagggacctcgtttaccccggttttaacagttcagggaccgtttgtatttggttttggggtttaaggacgaaaatcggattcggtgtaaaattaagggaccttagatgaacttattcctcggcttaaacccaaaactgcccccatactttccaaagcctgggcaccgaatggtatgggaccattttaggtacactctaccaaactggtgtctagtggggatgtccactcgctgtttgcatgtcattcaaataattataaaaaattaaaaagattataaagatatattaacatgtgttatatgatatatcactctataaacatgcaagtttaaattcaacctacacatctcgtaacaaaaaaataaatttaactttgaatatgcgttactagttgtagtttaatttatttttttttgttgcgagatgtataagttgaatttgaacttgcatatttgtgaagtgatataacacatgttaatatatctttttattttttaatttttttcataatcatttaagtgacatgtaaataaggagggataaaatagtttcatggtgcatgccgagagacatgtatgcacagtcaagacacaacaacacaatgcgaatatgttcatatatagcacgtttataagcactggtcggctctgttctgatacaaataatacacacagtaaacacgtataacgataatcattgacacgtactgcggcgaggaggggagaactagtaaatcatctgcgcctccgcctctgcatctcgccgttattaatttcacacttacgacaaacctgtagccctgtagcacacatcgttgttgcaccaacgaataaccgatctaacatatgcctgcagactgcagacacatgcatgcagcaagcatgcaagttgagatattgcttgcgatcgttagaagttcaccgtcgatatgtacgacatgccgggcttccacccggaagggatgacgttgctggcgacgagcgtcttgccggagctggacgtgaggcggatggagaacggcgcctgcagtgccgagccggcgttcagcttccagacggcgccccacgactgctgcatctgcgtccaggcggcgccggcgccggtctgcatgagctccacgccggagaggtcaccgtctccgttctcgtacttgacgagcacggcgaagtagttggggttcgagccgacgtccacgacgaaggtgagcttcactccgccccagttgcacggcacgctgtacacacatcacgtgcgttcgatcggatcgtttgaaagaaaccaacacgagaagaagaattgaaggacagttgcatgcatggaggttatagctgaagcagtgcatgtgccccggtggccggtggtccatgcgtggtgataagaaaagatgagtgaagccgtgataactgcaagtgttctgctgcttggccgacttttggccattgctgctgcagcaatttttgcacggaagtgaaagatgctcgcttaccggttgtactggatttggaggacgccggccgcgcgcagctggtcggcctggccggggttcgccatggcaccgaacgccgtgccgctcaggtcgaagtggaccggctcgctgaggcacgggcctccggggcactcgtcggtgaggacgacagtcaccgggttgcccgagcaagcgctatttccagtgcatttcacctgaaaaattatattgttgatttccaatgttagatgcaatacaggcatatactccctccttccctaaatacgccgttgacttttttaaatatgtttgaccgttcgtcttattcaaaaacttttgtgaaatgtgtaaaactatatgtatacgtaaaagtatacttaacaataaatcaaatgataggaaaagaattaataattacttaaattttttgaataagacgaacggtcaaatattttttaaaaagtcaacagcgtcaaacatcttgggacggagggagtacatgtatgtgcacagacttaattatactagatatatattctgatctgtcggtatatatgtacctggtagcaagagccgcagcccaagccagacttgtagatggaaggactgccggcggcgatcatagacgagaacggtgcctggaagacggcaccctggtacccacatgcaccacctgtacacacagatattgcactgttaagacatgacatacataggcatgaattttcttttcgaagaaactctcatctgatgacaacgtatttaccatcacttccggcgccatttgcagcgccataccacgtagctccgccattggaccagctggagagcttgcggtggaactcgatggaagcgcaagggcgtggaagcatggtgacagcggcaatgacaacgaaggtcgacaaaatcagctggaacctggaagccatggctgctatacctgcttagctaaacttgctaggattgttgttgctttgcaaggatttggaagatgcaagcaaatgagtcgatgagaggtggtgtgggctgtgtgtgaggtagctagggaaaggaggtgatctatttataggcagcagacgatgggtttgtgtgggcatatccctccgtgcatgcatgcgtatgcagacaaatcgctctgcttgcttgctctgttggatagttccatatccatgctaatgcacatggctagggtcaacatgtttaagtacagtcgaaaagtaattagctatttacgtagtagtaggccggtccttttgtgtgtagttcacttgtccaatcctcaattcgatcggtatcgggaccatggcagttttaccggtattattactagctttcagtttctgcctgcctggctagatctggcaagctagtgaatgaagccataccatttggctggagcccatctttggttaacaaactcgtgaatgtagcatacatgctatgtgtcattgcaccctgaacctccagggcggcatgcatgagagaaaggtgctaatacaattaatgtgcatagcttgtgttaatctgcaacagagggtaactgtacatgattataatttgtgcataacattgtcaataacttgctggacgacgacgcttacgtttgcgaatcctgcctactactattggcaaaatggaaagtcaaaagtgcacaggagattggccgttatttcggttgatcactgcacgcccgcacgcccgcgcgcgtgatgcgatggtgaccgcttaagcttgcgcatcccgagacgtctcccctagcctcgctctcaccacaccagcttcattcttcctcctcccgggtcaaccgatcgaccgtttcatccccggccgcatccccaaatccgccaatctcgtccccgtcaactctcctgacgagcgagcgcaccgtcggctcccgcgagcaaacaccgggattcggggcagctttgccgggccatggcctcccgggctacggctctctacatcagcgagaattaggcggtcgtacgtacgccatcggcggccaacatgtgcgcttggccggcgggagggcgggcgagctccgggtgccacgcgtgaatgtaggtaggctgcacacagtcgatcggttggtggcaacgacttggcgttggcgatcgatgtgcaatgcatatgcatgaaagtgtgtgggatgacgaaaggcacggttgcatgtaacttgcacgagtcgtcgtgcagtgttaactgcgggggatagctgttttgagtactgtggtcgcgtcaaaaatcgatggagtgcccgggtggctaattttgtccgccttgatttctgccattaacccgaggatcccgccatcccggtgaatctgcacggcacgtatggcatgacgtaatcacaggtgtgaaccggcctgctctgaagggccttccattctagcccattaacatttaacctccccaggccgaaacaggagctttggggcctaagcctaccaggggtttttccgtactggcttcactgcgtttccagcatatccattggctggaggtaattttggttttacttccagctggtaaatgtagcaaacgcagcacagtagagttcacagacatgctgcctcactctcaaaataaaccaatctaaaattgaaaaattgaatgtgacataaactcatataaatgttatatctagataggactttattcagatttatttcgtcaaatcataccctagattcgcttatttcggaattaagggagatcacaacatgaaccaacgcagcatgaattccatgtgaaattagtcctcattttgaaaacatagtatctttaccgcaacagtctgcaagaggtcctcgttttaaaaacagagcagctttgcccgcaacagtcttagagagtaaaccgtgacggtcgttccaaaatagcattaaacacaatacggatacacattctcccggaactccttggtacaatatcctaagtgaatgtctaattaaagacaaacaaaaaacttacaaacattctaggggtctatcacaaccatcacacatagcagatcactcgtgatcacaaaaatgagtgtcaatgcttgttactcttcgttcccgctctcttccttcgtaagtttgatcatgtcatcaatcctcaggatagtaatggccgcctcagtggcaaactgcaagggaaaaaaaaaggaaatggcgtaagggcctcagatttcagtcaaacatcatgataagacctatgctaagtataccaacctgaataatctttactttactcattgctggctcaatgacaccatattcaaggttgttgcgaatgataccttttgaaaggtcaagacccatgctgcagcaaacagaagtgaatttactggttactctattgataaattacacacattcaggaacacattaacttcttccttttaatagatggctgactaacattaactatatgtttaatgccaagtatcgcgaaaactacagatttaataataaaattatcacaaaacaacagattttggggttcaaatcattagcactaatggtatgtttgagttatcaacgtccaagttttgtgattaaattgacattaaacctgtagttttggggtaattttattattaaatctgtagttttgcaatacttggcatcagacatatagttttgtgataaatttattgttaaatatatagttttgtgatacatcacctaaatctgtagttttgcgataatttgctcaagtatttgtagctttgtgaaatttactctataacataatatctctagaattgtcccaaaagttcatcaaaaaagaatttggagagcttttcaaagatctagaacatactatatgtacaagataaaagaaccacatcttattcagataacaacgaagacatgttctgtaattaccttgaaaagtgttgcttatcagcctttgtttgagcagtatgatgatatgccctaagctttgctacaagctcagttgcatcttttgcagcattgacagaaagaacctgacatcacaaggtcacacttcacattaatattttatgtcatccagtatgtaaacacatagaacacaagtgatcaaacctttggaatgattaacaaagattccgcgaattcagcaatggccaactgttccctggacccaagggttgtagcaagattctccaagtatacagacaatgcagcttcaactgcaccaccaccagcaacaacctgcatgatacatacatgtttaaagcgccaccaaagttacaatgccagaactacattcacggctaatatgaagtatacactgccaacattgttctgtggatggaatgcaggcataaatgactgaaacaagtgacaacacagatagaattgcaccaagtggctcagttgtgaaaattttaactgctttggttgatttggtttgcaaaagcatggaagctatcctctgaagaaatgtaatggcaaacatggtcatttggcattgtacagcataagcaattgacaaaagaataatgatggggcactaaatacaactaatcaacatgttagtgtctaatcaaaggtctcacgtggtaacaggacaacagtagtgctcaaatgaaaaaaaaagacatttttttcttactctcccaaaaatcttaatataacagtgaactttatatattcaactgcagggaaccaacatgttaaggaacagaagcaaaaggttataccatattggattccagagttctcttcacaatgcacaatgcatcatgcaatgatctgtcaatctcatctagcatgaagtcatttgcgcctctaagtataattgagacctgcataaaagaaatgcaggcgtgattcccctaaactcttgctggttttgttatacaaaatataagatttgcattggaattgaaaagtacatacagcgctggtgttctttgttcctttcaccaaaattacatcatcatcagcaattctttcctcaacaacttcatcagcatgtccaaggaacgatgaatcgaatgtctcttcaccttccatatcagcaaatgtagatacctgcaatttactaccaaattaggacagcaccaaacagtttgtgtagcattaatattaggactagaagcaacaaacttaagactaaaattacagtggtatcgcaagggaagttgcttcatcatttattaattctattagtcatctgcacaattatgtattccaatgttgttacaactcgataaacaaaaggtgaggcataccatagttgcaccagtagccttggcaacatggcgcaaatcctccttacgcacacgccttacagcaattgctccagcctcaacgaagtactgaaatgatattccattgaacagtcataaagcagatttaaagacagtagccaggaatcatcaacatcatacatatacaaagattaacacacaaacaccacatgaaccaagtagctctttcaaaataatcaaaaccaattcaataatgaaacagctctcttcagagtaaaaagaagtctaactaaaattatgaaacagaagctcagtttggacgaccaaaaagattcaatgatgaaagaagtttcctgaggaaattgataatgaataccccacaaacacccacgctcaatcaacatcaacacaataccgtccatgtactagtattcaatcaataacagagctcttaccagtccaaccgaagtcaatagattatatttaggtaataaaagaatgtttctacttgaataaaacataccttcagtgacatatcatcaattcccttagtggtcagtacaacattagcaccagccttcagaattttctcaattcgctcctttgttatgtcagattctctgccatgaaaagtaagattatgttttacaattggagaccataaattataatagaattatgtgtggatccaaccacattccacaaaacaatagaaataaaaaaacacaataaaaatataaaaaaaataaaatgtgcaaatcagataaaagagaacaccccaattgttgactcattaagtatacaaaacaaatgaatcagaatgcgttggaaaaagtaaatgcacatacctctgacgaattttctcaagttcccttggatcagttacaaggacttgaacacccaattgcatttttgtcttctgaaggttaaaatcaagacatgcaattcttgccggggttactctagtaggcattccttgagctgcacggcctgtgtttagtgcatacccattcagcaggtaactgtccttggcacttttaccatgggctttcaaaatattaatgctctgcagatcagatgagctatagttaccagcaaatttctgtcgattttgttaatataaaaatcaaaaaatggttattgcgaagtacttttagagaaataacttgaatgccatgtccatacatgaatggttattggttaacaagaaagtcaatgacataacagcatataattaaggtagaagttaaactttattagctctcaaggtgtccaatatgttatacataaccaggagaaaagaacaaaggtcacatgtagcaaagctcacaaacaagtgtaatactctacaatttccaaacaataatagaggctacagaaagagaacaatcagtgaagcacaagtgcacaattcaatatatctcattcagtgtattgcaattgcacacaacaaagttttgctttgatgtataacaagaatcacaagcatgtaactcaccttgataggatacttcacttctcccttagcgtttgtggtcttcacagcttggactgcatcgacaacctattaaacaacagccatgttaattatacagcacagtttgaaggaaagcttacagaaagtgaattaaagcactagcatttggctacggatatgcctaactgtcagatagagacttaacagtgaagcattatagcatgctacgacattggaaagaaataaattggactgcctatatatacagatatagagtatcaactaaatatttatttaaatttaaaaagtatcactaaaatcaaacttacagctgaaaatacaaatgtatatatatggcaataggaacttaccagatttgcgaagaaatcactgtcactattaatcagcttcgaggacatgcttgtcttcgcacagtttataagagaatcctttccaagtttatcaacctgaaaatgttgatagatactagtgtcaggtgtcaagaagtaatctgctgctattcattaagcagatagtattctcttaccttgacagccaacttttcttcaacatatttgcaagcttcacgcatagcaagctggtagtaaatgatggtaaaacatgttaagcaatgtgggtttgcagctggaacattcgttttaaatctgaaattgtactgcagctgaattatgaagtgcaaaactcaccctgtagccactgataatagatgtcggatggattttgtttctcacaagatcattgccccgctggtaaaaagaaaaaaagagtgtcataaatgcatatttagaatggtaggcaaatacatagggaagaaaagactgacacgaaagctccatttcattacctttagcaattctgcggctattatcacaacagatgtcgttccatctcccacctctctgtcttgaagctcagccaactcaacaagaacctaacaataacaggaccaaaaaacaactaagcacaaaacaacaaccaggggaaaaaggagatggcacctttaagctgcctgacatcaccttggctgctggatgctcgacttccaacatcctcaaaatggttgctccatcatttgttatggtaacatcaccaatatcatccacaagcatctacaagaaggatatgctcaattagctcattccagccaaccttttggaattatcagggattggtgtggtgcagaactgatctaagtctaacttcattaatcctgattaggtttagtgatactgatgcacatactgttgtaatttcatgatttcataaaaagtttagtgatactgacagttatttcgagcacataacaacattagccgcacacatattacaccgttgaatcagtaagcgactgaactacatctggatcacaatgagcagctcataaaggagaaaatacgtcattctaagtagcggatcacacaattttgaaacctacaagttcgcatccttcacacacagtaacaatttatgcgcaaccaagtagatcaaatcgcaaggtacaaaccttgtcgagccccacgggcccaagcgaggacttaacgatgttggccaccgcctggcacgccaccactgcaatcagagaaggaaatcaaatccccgcgtccggacggcgagtcgtgccactagatcttacaaaaacccgccgcgactccacggaatctggcggcggggaagggcttgcaggagggggagagacgagttaccgttttgcgtgcggacgtcctggccggactggcgctcgccgaggatgtcgggggtctgggcggtgatcgccatggcgacgacgacggcggcggcggcgaggcgaaaactgtggaggcagcactggagagttcgaggcgggggtcggcgtctgcaatggggggttttgctggaggagccgcgggggttagggttcgatgcggttgtgaaatggaccttggacttgatgggccttgatgagcccagcccattataccggcccaaactcctcacgaaggcaacgcgagctcgcctccccttccccccgtcaccgccaccacccaaaccaaatcctcgcccatggcgccactagtctcccacgcgaaaattctcgcgccgattccgaggggcaaccgccgcctcgcccccgcgccccctgccgccggcggcttcctccgcgccctcttcccctcacggcgctcccgccctccgccagagaaggacgagctcctccgcctcatcgccgaccaacgccgcggcctcgacacccagtccgacccctcccgcctcgccgacatcgtctcctgcatcgacgccctcgccgccgctgctcccggatccgataccgtttccgatgccgacaagctttccggtacgtggcggctcctctggaccaccgagcatgagcagctcttcatcgtgcgcaacgcccccttcttccgcaccgccgccggtgatgtgttccaggtaatcgacgtccccggtggcgccctcaacaacgtgatcaccttcccgccctctggcgcgttcgtcgtgaacggctccatcgagatccagccgccccagcgagtcaattttaggcaggcttcctccagctttttgtttaggcttaacataatcatctgttctttccaaaaagaagacatcatcgtctgttgtttcatcagcttgtggtaattagagcaactgctgattgttttattttatgtttgcttgttgcaggtttacacgcgctatgttgagagggagcaattgggaggtcccgtttccgccctttgggaaaggatggtgagtggaagatattcttcaattggtagtatcatgcacttcactcgaataatcttacaagttgagttccaatgaaatagcaaaaacaaaggagacagaaaaaaatgtggaagcatagcacgagatattgtgcattgtttgcaacaattttcaaggaatgaaatcgtatctagcattcatggattgatattgtgttcacgtaatcgtaaaccatttcattaaatcaaatacattactctcgcagtcataattattttaggtaagataagaattggtcaaacttttaaaattttgaccataaattattggtcaaatgcttagtttaaaagccaaaaaaggggtatacttagatttgactcaaaaatatatatatcataaatttattctaatctaaaattaatcatccgagttttaaaagtttaaccgaatcttgtcctaagtgtcaaatatgtatgaccagaaatagtttttggaactgtgctgcataatcaacaatttataagtctaacaaacttttcatttttgttactagatgaccaaatcatcatctacaagggctttcctttcccacctccatttttagggatggtgtatatgttttcttcacctgatcagtagagagtgaatgtaaataaagctggactggaaacacatttttaccagttaggtctttgacatttgttcagtttatcagttctgtttcgttttatcagtttctggtttgacaccatctatttggaaatttggcttgtatgtgttaggtcttttgacatttacataatatatgcctctactttcaggtttgacactgtctatttggatgatgacatccgcgtagcaaaggacatacgaggggactatttagttgttgaacgcgctccatattcatggaatggatagttgttaaaattcaaagttgattgaatgcatagccagtcttgtgatgtgccttgtgaatataagaagcagattgtcagagccttgtgctttctcagcaaagtgttaaccatcgtgctatgacatttcttttcctagacaatactatgttctcccggaattagatggtaagtttgattagtaatgcatgtgcagcaaggttcttcttccaaggaattgtctaggttaaataatacctaggtatcccctatgtgagagaacacaaacttgccaagtatttgatgtgcttttggacatatgaaaaagatgctgcccattacggtgaactacgttagcgaacttgacagcatattgttatggcccacgatatcaagagccatgatggaattgttgactgtttcagtaccttttgttagtattgttttgcctgttgcttccagctttaagtagtagtttttcacattgaagcaagttctcagcaaatcaggtcaatgaatgccatcatctgattaagatagtaaactatgtatggtcttgctttatctgtatcagggttccttttccttttatactcatgaggagtcaatgagatcaaatccaactttgctttgggaaaagtagcattgtagtgtcgcaagcttaatgatatgaaacattagattcagtttctgtaaccacttacccatgatttctaattctaggggtttcagatacagtgttatgtttcattccatctatcaattgaccactgaagatcagatcaactttttgcagggatcggactctatccttctactgcccccttggaatgctggcaggatttgtagtgcaatgagaagagaattcaatttgccatgtctgaattttcctggttatttttgtttgctcgtttctttatctaggaaaaattctgctcaatacctggtttaatttttgctgcatcgtcaatgctccctgtcatttaagaaaagtaagtgaaaaggtatctatgtgatagattgattgaacatcactacttctccatgatattccaggcctgaacagaagcactgaagcaaaatacttttgaaatgctttcgttggtcctactgttgaactgaatagcaagttctcctttcaacagcttgtttcaagtgtctagtctgataattgcttccttgtactagactactgcaggttctagtcgcagtcgaacaacatatggtgaggctttaggaggacaggttggaccatggccctgggccagactacattgtgtgatgttgggcagtttgtgtacgctacgtgtgaactcatcagctcatcacgaaccagcatagaattatttttcttagtttgcttttgtttgtttggataccatttccttcaccttgagatatttggttaaggtggattgaacttagtaatgaagcaattcttttgtaatagcaggccctccctgaccaagtactggagccacttcaaaggatagaaggcaaaggctccccatgtgaaaaaggacgctccatgaccctgccatgtgtggtcatctgcgatttggtgtcccatggacagtgatgcactgattccacccttcgagtcttaaaagcaatccaaggttagtttacataccttttgcagcttagaaatactgaggataaaacgaagatagtatatcgtacacactgctggtctatagatgatctgctggtggccacaaacctttgcgtgacacttaatttggtggagtagtattttgatcttactggtatccttatatatatttctgaataaactagtatacaatggacaaagtcagttgatgtttccaaagaaaagcttgtgccgacatcaattaatcattttaaagttgcaaaaggagctataatgcttgagcatatctggaaaagtatgattaaagtatgcatccatacaaatcaaccacaatatattcaagattgaggatatttgaacaacatttgtagcttgtgcatgtttaacgggagcagaattattagtttctcttttttttaaaaaaaaccgaaggtagccatttgaatatattaaagagaaaagctaaaaaacaaagtgcatgcccaagcaccacacgctaaccacacaagcataaaccactgagagtttagagcctaacaccaaaacgatccccactaaacgtgaccaacaacaccaaaacaagaccggcttcactccacctcctcatgccgaggtggttttcgccgagctctttggcctcgcagccaccttcccatcttgccgctagcttaccatcggcatgctccagcggcggcgaggtggaagaggggtggagatgtggcggcacgggtggctagaatttcgccccgagccgcccacgcgaggacgacacaggggagggagtagtagattgctagcagcaaccattttttcttttttatattagttctttaggaatgtgagcaggattattagtttttctgtttttagatgaggatcattactcgtttttcaggaacgtgttcacagcttttctttcttttctttttctttattttttttgcatgcaatacggatatgttcgtcagagcgaatggtgtcatcctataatccgtgctgcaaattcaatgatccagttactctagagacggaaggcacgcgtcatagtatcatactccgtactttgtttacactgtctctatactctgatagacgaaaggcacacagcacactggcatatcgttatcctctgtcagtatagtacagtaaagcaacagccgttcggcactgcaaatctactactatcgtaggagtatactgtatgtggattggatagatgtacataatgagatggaacggctttgcgttttgcagccgcccggatggtagccagcagtccagcaccaagagctccaagacacggcggaccgagccagccggagggaggggatgattgagacagcggcctctgcggcgacgacagtggatcgtgagcagatttatcctgccacgagataagtacattgtactgctgactccgtttcaaaatatagctatttttagcataatactttgttctaaaataaagctatttcttcatctacgttctcaatcaatcacaaccattcttttgcatctaccttttcttttcaatcaatcgcacactttctctaatcattatccctaattttttaatacccgtactaacttaaaaatatttatattttaggatagaggaaatagtagcagataggtgcggctgctgcatgctatgctgtgcacccctacgcaaatgcgtctctccaatgatccatctatccgcatccgtctccatccgcggcggcgactgggggagcatggcgtggcacggcaagggggccggccgaccggcgtggctgtcgtaccccccaagaaagggaaataaaatccaaactggcagcggcagcagcagcggcaggatcggatcggagcggccatccatctatcgtcgccacgctcgctgagtcaggtccgtgatgatatgatatgatcgggcccccggcccggggtctctccgccctttttctttccttccttttctctatgctgtttattgtgggaactggccagcggcagccgcagtggtggtcctggtacttgcgcacgtacagccactagctttccctgcagcagccacccactgcacctgctgctctctctctcttcccctctccctgcccatgtccatcccgctttgggctaccatctccccgcttttccatcgccacaatcatgaccgcacgtagccacctaattacgccttggatcacctccaaattaatcgcccttaatgtgctctctttttcaatgacttagggggtctgttcactttgatgttaaaaaaaaccttaccaaatattagcatagttgccacagaattttttatatagttattaaaatttggcagcaaactaaatgtagccacttttttagcaactttaccaaaacttgttaaggttgaaaatagcatcaaagtgaacaggacttttgatactctgatacgctacggctggtggctctcgtaagctggatggccccagctttaattagatcgagacgagtaaaccggttagagtatgttcttatcaggttatctgctaaacaggtttcaattctgaagtatcgtacgagaagttggagatctctaattagctagctactactccttccataaaaaaacaaatttgaagggatataacataacttaatagtgcaatgaacatctagattggttttttagataaaagagtagctaagaacctaattaatctgaaacaggagtagctccccgtttttaggcacacgggaccatgatatcctcccctgtctaggacgtcgacgtggttcaagacgaggatcgatcaatagtacacccgtcaataatgtcatgtacgtacggcttatgcctactccctctgtccaaaaaaagaaaaatcctaggtttccgtgcacaacgtttgaccatacgtcttatttgaaaaaattataaaaaaaattaaaaagacaagtcacgcataaagtattaatcatgttttatcatctaacaacaatggaaatactaattataaaaaagtttcatataagacgaacagtcaaacgtacggaaatcaagggtttgtcttttttttggatggagggagtacgttaagtaagcactcacgcaggccggcaagtacctactccctctatccttaaaaaaaaccaacctcgtacttggatgggactcgtctaaaaaatctagtacgatgttggcttttttggacgaagagagtacgtataacataacagtgactcgcccatacttgttttgtcatagtacatgagatatacctcgtttatttacacattatttaaatattttttaaaaagaaaatgtattgatatgtaacattaccatacatgttacaatttaacttctatatgtaaaaataaatagattgtagctaattaacgcatattcagtcaaatttgtttttttattacaacatgtagaaattaaatttaatcttacatatttgtggagtgatttatcacactaatttatcttattagaaaataaaataaatttgtaactgctccatccgtctcaaaataaatcaacttatggaatttaaactttatcccaaaataaattaacttctaccttcttatttactttggttcacaatgaaataagagaatttcttccatacccctgaaattttagccgatcccttctattttcctgaattttcttcactcccttgtatacctctgaattttgatttggatccctttcatacccttgttgtcagttgaccgtttaataagtatcaaaaagtcagttttacccttcaatacgtgaggaatatgtagaaatttgtaaactatattgttgcaagtatagaaatttgttgtgtgattataatatttgtaagtttgttgtacatagaaattttaataaatattaaaaaagtatgtgtaccattttctttaaatgataaacatagttttggaaaacattcctatatattatataggacatgaaaaaacacgttgaactaccataaaaaaaggatacatatactcttttaataagtaaataaatattaggtttttatgtcattatcttaaattaaactttgccattaataagttgcatattactccctctatccataaacttacacctatttcatatttgagtttttccaaataagttgtttctatttgtagtctttatgcattcaagacttaaatgaagatataaataaaatgctttattagaacccaatgagtcatctaaatactcattagttgcatacttacattcacttcttgattttgtaacatccaaggtgatttaatttctccttggtcttggtgtcaaaagtaatatgtgtaacttttgtggatggagggagtatgatagtttgttcaatgataaacctactagtaacatcaattttatctgattgatctttttagggcccctttcaatcaaatgaattatgaaggaatttcatagaattgaaaccctatagaaaattttcctatgtaacctttgattcaaaggattaaagttttctaaaacgtacaaaatttctatggaatggcttatttcatatagtttttggagaaaacttagcaagaggtccaacctcttggtaagaatcctttgagtctatctcatccgattcttgtgttttttatatggtccaatcaaacgatgattcatgcatgtgtttttcctgtgttttgcaatcatctgttttatatttacattcatgttagaattctatatgttttctatttcttcgtttttttattctcatgattcgaagggacctttaatatttttgatattaaaagttaaaaatgtttgggactgagggagtaaagctaatggagtactcctaccttgtagcaaacggcgttgctgaggccatcaggccaatcgtctggctggccgaccacgatctacactgccctagaagttagccctgtcagtggagtagtactggtagttaggccgcgcgcgtgggtcgccaattcaccctctctatagctacaggtgcgttacaggtgcatcgccggccgtgcagtgcaggctgcatccatgcatcgtacacctcgtggcgttcgcgtggcgtgcatgtgatgagctcgagctgcgctaacgagctttccagagcaaagcgacgcgcgcggccggccggggctgcgcaggaaaaccccgaacctccatcagctgattctctgagcgtaaacctggagctacctggtagtagtagtattacgaatttaattacgatacaccgtcgcacgtcgctcacagccggcgcacacagctaaccagccagtacataccagcggatagatcaggcgaacggcatatactacgtgccttctgtatagtgttcacgctgtgtttagatttaggggtaaaaatttttatcgtgtaatattggatttgaagtattaaacgcactctaataacaaagaaattatagaatccacctataaactatgagatgaatttattaagcataattaatctgccattagtaagtgtttactatagtgctatattgttaaatcatggagtaattaggcttaaaagattcatattacaatttacacataatctgtataattagtttttttttctatatttaatattttatatatgtgtctaaacattcgatgtgatatgtgaaaaaacttatcaagagatctaaacatgcccataccttagtatatgcgcccacagaaaaaggcaaaggggaattaattagtacttgaatacttgatctctagatatatgtatgcatgattctgcgtcgaatcgtggttaccgaaaagatatgatcgagagctaggagttaactccatatagtagttaattatgttagctaagagctaggagtactcgtacctttctgatctccttggaatgtctttttctcgatgaccttacgtgaaagcgtaacgcgatcgagaaccgactcagccgagactcatcgttgcgcacgtacacgcgcgcgggggtggacggccggcgtgcacggttccgctgacacagacctgcacaggcgggcaaacataattagatcgagtagcccatgcatgttgattataccagtaagtttcacgcacgcacaccggtccattgatttctcgccgcgcttaatttgtcctccgatcctctcctggtctcgggtctccggaagttgaaattaaagcttcttcgatcgcgtgcgccgattgattcggattaccaaacttcccagagattttagcgatcgaatccctgctttgagatcgacgtgtactctccctccctggtcactggatttaaggttgtcgcgtgccccctccccctgcgacgactgcgagcctctccttcccttccaccttttttcttcctctcttcgcatgcacgcacgtacacactcacatccccccttttctctctccagatatctctctcatactatttaataaccggactcgtagtccctacctttccatgattccatctcctccattcccatccgcccgcatctccactcctcctctccccacctcctcatcaagctagctaagctagctctcccaaccatggctggcgccggcaccgtctgctccatgtgcggcgacgtcggcttccccgacaagctcttccagtgcgcgcgctgccgctaccgcttccagcactcgtacgtaacgcgcgacccggccggtgtactctctaccactgtaatctcttctctatctagagctagcagcgaacacggggtgtgtgtgcgtgtgtctgtgcggtgtctgtgtatccatgcatgtctgatagacttgtggcgcgcgtgcagatactgcacgaactactacggtgacgcggcgcccgccccggccggcgccgacatgtgcgactggtgcctgagcgacgtcgccgggaaggcgaggtactcgtcggcggccgggaagcagcagggcgccggaagccaggagtcatccacgacgacgtcgagctcctccgccggaaggggtggcggcggcaagcccggcgccggcgagcaggagagcgggcggcgggggaccaaggcggccggccgaaggtacaagctgctcaaggacgtcttgtgttagtttgtttgtttaggtcacccatgccgtcacccagtactagtcgtcatcgcttaggctatatagactcgttagctagccgctagtttgatgatcgatgtgcatatactacgtgcgtactccatattgtatctagttgtgtgtgttagggtcttttaagggggcctgttacctgaaatgttgcactcttggcttgtgtttctcttgcgttatgcttgcatgcttttctagtatcttggataatttactgcatatatatctcttgttatcttcccgggttctttctaacagcgatttgctagtagctcatatcacatgcatgcatgtaggtaatccctacatcttttgatcacaccttgtgtgtggtggaatatttcagatgagctattaatttctcctgaacttgttagaaacaacaggatgcatgcatgcattttctttatctttatacttcatgtagttttggggccggggaactgaggagcaactggccatcacgcacgttgcatgctgccaagccgagccatgtcgatgtaggggtcaacgaatcgtacccaaagacccaaagtggccgacaaagacatgctcctacacaaacctcaagctctgcacggcctcctctctacgagtagctagcttgtggccaagatccatttagcccctgcttttgcctcgattggatggcaatgcaaatccttctgctacctatagcaacaaactgcatgcgcacaacagcccagtatcagcaacattgctgctccagaatgccatcactgatcatgttctcccatttgtcctttcgttgatactcctaaatactctgaatctctgatcaatgagcctgttgatacagcactgtccgttattcaaatattttagtcagtcttgccgtacctgatcacttggcgattatttaattcctagctagtactctatatattgattcagatctctactgggatgaactgtagccataagacaaaactttaattatgaggggaagtttagttaagtggaattaatagtagatgacggcaggaccaaattagctgtgtgtggtagctagctctagctcgcccacagtaccagcggtgcagctgaccctactcttgtgcatatgtacaccatctggtcctttttaggtgtcatgtagctaaacagaccagacatcgcgggatcgtagctaggtttctttctccctcgtcttctacactgtatgtggagttatctttcttctccctagcctagctagctacctatcttgcacgtactactaccaaacaagcgttgttccttaatcataaccgaagtttaattatttcttttgacactgtttgctagctagctcatagcatctacttcctccgtcccaaaaatatgtccagatttatctctagagttctagaggagtactaaaaggactactcttttcattccaatttgatcatcacatatgatttttgagttatccctaaaatgatcgtactcctatataataagtgcctcttcatttatttgtgaaaagagtaaatggacatcactgaatgtgttggtatgcatgtaactagttaagattaatttctattggttcaactccatgcaacatttatagtgtgatgcaagctgtgggacacaaagcgatggaacacattgattagtgataattaattttagagccatcgaggttttattgtctttggactcgatgctctttgctttggtgataatcaaattggaattgagagagtattatataagattgtagttgcaagtatagctttaaagattgtaaacatactgcaagcagctaaacactacaaataaaaggggtctattgtgccggttgtgaaccctcgtctattctgggttcccaaccagcacaacaatcgatgcaatgatggcctctcgacctcattgtcgatgtagagaataggcactaatgggattgacgagctaaaaaaaggttgagccagcttgaattgagatgacgcggtccaaatcacatatcatgtatcgatgcccagatcagcaattgaaaaaaaaatcaatttagacagattgatgcatgaatcaacaaaattgtgaaacacagatcctaacaaataagaaaattagaaaaaaaaatagaagattgtgcatccatctttttgttgatatttggatttcgttttcaaataaagtcatcttctagttttaaatcacctttagaatcattagcctctgtccctacactgactcacttatccgggatcgatcctcactacggtcctttatttcgaaacgaggatagggctctcgcggaacgaggtgtagattgagacgaaagatgagcgtatggtccatactcactcgggttcaaacttattcttcttttttttttccattcattcaaccttatatatttgatccccttctcccaggtgcgagtctattattgaggaactgtgagctccttttctagagcttccttcccatttaggcggggtgttcaaaggggttccaccgtcaacttaagttaaggaaccccaactaagaagaaaaataaaaaaaaagaaaaatatgtgaatcacagatcctaacatgcatcatccatgtcccaacaaaagaaattgctcgagttctcaaatggatagcatgccaaggtcggcgaagccgttgtttctcgctgaaggtcaaggacgccacagctctcactgcttgccgaggctaaggctgctgctcctatgattgtggagatcgagagagaatggagacaccaagagggaagagagtgtggttgtggggatgtatatgtagaagataaggtagagagagagagagagtggatgtgcaggagataagggagatatcaactcgagtaaaaaaccattagctcggttggctcaagtaccagttttacttaaagaccccacactaatgagtaatgactaatcatcagtgacgatttataatagaaaatgacactcataagtagactacttatctatgtcggttcttagctatattgggcacagattgggtgggtggatgcgaaactccttatcagtgccaggttttcttcatccaatagtaaaaggactgtacgaataagttgttctgtagtagtgtaagtagctaatcatatccatcttgtatacgttgtcatacaataaaactagacaaggactctagccagacattccactcgtaggtatcgcctacacgggtggcacatgggtgaaacctagctactaatcgttgtcaatctccaacccgaccctcatagtctcagctagccatgggcggcatcccttttgttgggggtgtgttgaaatcctcggtcgtgggagtttgtcaggcctcctttatcatccgtgggcggacatcgatggaaagatagtccagtgtacctaagtagcagtggatgcggagtgcgttttttggatcttgtagcccaaacctagatgtttgttgtcttctattactctctccattattgaataattgacattttgaccatagcatataaaacaagacaacaaaatttatggccaatttgcccttggcaattgttagaagatgacgctaaaaatgaataaagttgaggtagggaaaggaattgagggaaaagacaactatctagatgcttactctatggtggaagatttatttaggcccaaaagtgtagatataggatagtaggggcaaaattgggattttagtaataaaagtgtggtggtgacaactattttgaaacaaatggtttgatcaaaactatcaattattcaaaaatagaggtataggatagtaggggcaaaattgggattttagtaataaaagtgtggtggtgaaaacaattttgaaacaaatggtttgatcaaaactatcaattattcaaaaatagagggaatagctattcttcagcagcaaaccggtagcatcactggaattgactggaagctatgctaggtctacaacaagcaggcgcccaggcaacgaatccatcatcttgctgacgcgggtcgatggagttcaagtgcgcttagtaattggcgtcagtggggattgtattctggactcttaagaggatatccccttgtttctcctatgtcatctatatagttatgaaagaaaaactcaatcatgttttttttctttttgcatgttgatcttggatgctcaaaactagttggaaaacgactaaagtgtcgtacattaatacaaaagtagtatttatgggagggttggtgtgggatattaaaggaatcgaactcattgttttgtggacttggaataggtgagaagatggaaataaagttatttttttgtaaaaatgaaagaggctaaaagcatgcttattttggatggatggagtatgcttgtagtaaaaaatcctagtctaactgtccaaacaaactcaacctaaaaattgtttcccgtgttaatggtggtgcagtggatatcttagtatcttattactactagaaaacaactcgttgtggctgtcgcagctggtggatgcgcaattgctaatctctacgaacgcagtttctaaaggaaaataatcctaattaattaagagaccgtgtatttttatgcagttgggatagagacctatctaaagatgtaaatattagggaatgacctaatatcaaataattagaaaatgttaggcttcgagcctaggtcatctagcccactatcctgtggagctgcccaaacaccctagacgtttctcggatagagacctatcttacaatacatgtttgttttgtttctatagatttctccatccatccgtgatttcaattctactgggtggtgagtggccgggattacattaattattttagctagctgccatgacaatttacttatggctcattcaaaatacatgaatttcataggatttttatagggtacacttcattcttttaaaattccgataaaattgctccaaaccaaataagcccttagtactccgtacgtttgtttttttctcaaaatgtgttgttgattacttttgtaatggcgtttaaccatccatttcattaaaatttagtgcaaataaaatgtgaagtcatgcttaaaatacttcgtaaaaaaacaagttacaacaaaataaatagagctcatataataccttaataagatgaataattaaaagtcatatttaaaatgtgtgatcgtgtcaaataattttaatatattatgtgtgtatgtacgcaaacctagcaattaattagtttttttttataaaagagatcaggaatggatcccaagtgtacaatgtgtagtgaactagtgattactacatgtgtcggccggagagagccaaagacaatgagctttaattattaatttgtttctaagcagttaataggaaggatcgattttttgaagcacttgctagagctatcctagcttgctcccttatattagtttgagcagataagaatcgcagctacgccgggcccaacgacgtggacggaagatatttgcatttgtagatacttgaatctatcgtttggatagtgctcccctgcactatgccatgtaccatatctttcatagtgtcaaagcatggggaacgatgtgtccctgtccctgataacttcgatcgagtgccatgctcacattcatgtactacgtgttcattcattgcccgttggagattttttttaagcgttttggcaagctaattaatcaagtccatgttgtgcttgttcttgtggggtcgatgatatgccagtatgcacagcatgcatgatagaacaaatagcatgccaatacccatctctatgcatgcccgttcaccactttgaatgtgataggttgtggtggccaaatggcacatattggttgctttgtaaacagttggtaaggcaaacacaaatggctagtcatccattcaaataacgttgtggagtagcatgagaatgccattagtcacaataatatggtaggacattgtgtcagaaatgatactagatagcatcaaccttccatgacttcgtatcatacactgccggagaaatgctttgtactctcggattgtaatcctctattgttccggttatgcaaccgaaactagagatccgggaataaagatatccatctttagtcccggttaaaataaaccggactaaaaatcattgttagtcccggttggtaggactaagggattttttttctgtttccactgttgttttgttgtttgcatctcgtgcacaatcgcacaaaaatcacacaaatcatacacaaaatcacacacataaatcatccacaaaaatcatttacaaatcatacacaatacatgcccatccacaatccacaaatcatcacaaaatcatccccaaatcaaaaaaaaatctacacatcaattcactgtccatccacaatccacaaatcatcacaaaatcatccccaaatcaacaaaaataaaaacctacacatcaattaaaaaaaataaaaaatgctccacaggtcgccgccggcctcccgccttcagccaccgcccagccacctcccctcccggatccgacggaggggaggccgccgccaccctcgcatcgccccagcgccaccgcagccgccgcctcccctcccggatccggcggaggggaggccgctgctgccgccccgccacttccccggttgcttggctcgccgcccgccggctagctcgctccgccacctcccctcccagatccggcggaggggaggccgccaccgccgccgcccctcccggatccggtggaggggaggccgccgccgccgtcaccgcgccgctgagagagagggagagctgaggagccagctaagagagatttttctaagtgtttgttatatagtaacggggcggggagaacgatgcggagaggctgatccggatttttattttgtcccggttggtataaacaaccgggactaaatattgatctttaccaaccgggactaaagataatgtaagcatgacgccggcctgacgatttgtagaactgggactaaagatcaaaatgtaccctggctttttgaaccgggactaaagttattctttagtcctgtttcttacttagaccgggagtattgtgaattttggtcgaccgggcaaagatggtttctccagtaatgatatctacacatgaactctcgaaaaagcaccctaatttaagagatatcatattacaatgtcatttgtatttgggacttgcatacaaattaaacattgtcaaaataaacgtctgtacgtgctaattaatttttttcttatatgagggcaaaatgttgtatactcctaataaattgcgaatatatagcccagcatggatgcttggtttgagctacgggagcaaagttggaactagctaggttgcctcctatactaattattgatcagccggggggggagggtttgttttttgtttctggaaaagtcaggggggatttgttgcatgtttgccattataatgttattatagatgtatgcaggctcaaaaccatactttaatgccctttttcagttgcacttttaatgaatgaaaaaccgatggtgtgtgtgtgtgcgtacacatcatatggtggttatttaattgggtgttcaattataacatgcatgaataattcttatcttgcaatttaacatagttatgttaatatcacatcaatgcacatatctcaagctaattttagagagtatgtgcaaaacatgcaatagttggagcatctctatcacctctccaaatatccatctggccagcttgccaaatttatctttcattccaataaccttttcatttcactctcaatccaacaatgggtatcacatgtcaccctctctttacttcttcctcccttcttctatctttcccatcccaaccatcttccctctccacccgacgacagtagggggcgacaacgacgaggtggccaacaaggggaagcagggataagggcggggcaggtgaggggagataaggcgtcatggtgttactgctgccgccagcagtgggaatcgacacagggaagagcaagaaggggcggtgacgcacgcaccagcaatggagatgcagacaatggcaatgcggcggaggttggggaaaacggtggcaacgacgggctatggtgatcctctcatcctttgttggtcacctcccttccgagctcccggctcccgcttctgccactctgacacccttcaccgtcgcgtgcaggccaggccaagccaggccactgcctccacgcggcccttgtggtgggagttgtcggtggcgtggggaggtgattgccgagtgaggagtcaagcttagggatgaggaggttaaaggagacattgacgattggccttcttcctttacagcgatgcatcagcgcgagggtgggcgttggcagagaagagaggagacggagaaacggattgaaggtgggactgataatgcgacccttcgtttggtaaatagaggagcctggccacatttggccacccgaggaactcgtttggaagagagttttttcactgtgttggctaaaatttaatttgaagagccatctaatgtggtgacagttgacagaacatactgttgtattccggagggctgacgaacctgctgatctgtgccaagtgtagccggtcttagggtcactggtacaaatagctaggccaggagcatcgatctaagacaaagatgtgttggtcttaggttcctgaaaatatcagccggtgcgccgtgcgcgagctgttaatcatcaaagcaatggccgatgtgggtagcacaaattattcggaaccaactttgggcccgtttagttcctcaaaaatttttcccaaaaacatcacatcgaatctttagacacatgcatgaaacattaaatatagataaaaagaaacactaattgcacagttatggaggaaatcgcgagacgaatcttttaagcctaattagtccgtgattagccataagtgctacagtaacccacatgtgctaatgacggcttaattagtctcaaaagattcgtctcgcggtttccaggcgagttctgaaattagttttttcattcgtgtccgaaaaccccttccaacatccggttaaacgttcgatgtgacacccaaaaatttcctttttcccaactaaacacacccaaaatgttagggacaagagaacagtaaccaaacgtactgtcactgtttggttttactaatcagtgactttgtagtccgacatgacatccaacaaaccccgcctgacattgccgccgatcgagaggatctgggggattcgctctagtaggcactatcgcacagtgaccgcgtctctgtcttctagaacccaatgcgacgacctgataagatcgcattatcacatccatagttttagtatctgtcacaatacacgttttgtcactgaagaaaaccgaacaaatacgtgactatcacgggagaagcgccatgtagttttagtgtctggcgccggaggtagcatcggtcacaattcacacgtcgaactgtgatcatgcggagggctttggggtctgcagcttgggttggaattcccctcaagaggagaacagagaacgacagcatttcgtcgctccccccacgacatcatggcagaaacacgcccgtgaccaccaaataatgtccacccaattggcctctaatccatcagaaaagcagagcgaaaaaatagaacattgctagctagtggcaccaccaccaccactgcaccagtactgctacatcgggatagattgctacgagacgagacactattgtccaacgaactcaagttgattgcacggctgcgcgcggcgtcgggacagagctccagccgtgcgcgcgcgcccaccactgatcgatcgcttcccacgcccagctgacacgggagctagggaccgtggtgcacgcgcggcgacgtcgcggctggcaggtcggacactcagaccacgcgggcgccctccatgggcgacggcgtccacgcgtcggaggtgcagccggcgtcgccgccctccttggggggcctcgctggcacgggccggaacggcgcgccgctgcctcctgccgcggtggtggcctgcatgaggtcgagcgtcacgtgccccgactgattctcgtgctgccctccggcgccgggcggtggcggccgcgcctgcaggtgcgcgtgccagccaccggccgtttcggagcccgggctgcggcccgttggacggccagctggtggcggctgtcggtcggagaagaattgccacgagaggagggccgcgcggttctcggcgatgagctcgtcgagcgccgcgcttgagcgggcggagatgtcgggcgtcggcatcagccatgggccggtggctctagccgatgacagaagagagagagcaccagccgacgacgtcggcaggccgtacggcgggaaaccgtgtcccagcaccggcatacctgcaacaacaacgtcgacacgttattatgcatatcattgtgcctacagaaatgtggccatctgttatagtcatatcaagaaagcataatgcacaccatcagtcctaataacgaagtggttactcaaccgcaatcatttttgcatgcttgccctgatcatttgcaaccaaatttacaaagtttaaaaccaaccaaccatgcatgttcaccgggtacaactaattgatactatactatatatctttacacaaactgatcgctacctgatcttccacaacatcatgtctatgtgttgatcaaataacaggtttcaagtggtcaataatgctgatgggctttgggtcactagcatagtaaaaacgtgcactcgaccttgatgtcaagtttaggtccatggtaatacgtactaatgttattgttaaccaagataggcccattatgctgttgttgattatgttgacacgaaagtttgtggtggttacgattgttaatgtctttattgtttgaggcaactaacttaaatcttgcattccataatatttctctgtaagacagccagaaggacctactccaaatcaaagtccacataaatactggagtacataagttatcacagaatataaggcatgttcatctacaggatctatgtcagtgcagcaggagtaccatgtactgtattttctactgcaggagtaatagtttctcagaacaagagaaaggtagtggtagactaaaaggagtactccctccttcctataaaaataaatctatgaatctggacagatgtatatcaaaattcgtagtattagaataagtcatatctgacactatattgtttttttatgggacaaaaggagtatacatatatacaaggtttctgaactgcagagccgtgcttacctttgaaggtcagtagtacaactatactcatgaaagcatatcaatatcaatcaatacacgcttgaatatcctagaatgccgctatgaaattcgaccgccgtatgtccaagtctttcggccagtcccgctatagcactataccttcgtacagtaactattcgtaattaactgtacagttgtacgcgtatgtatgtacatgcgtactggagtagtagtactagtacgtagtagtatagatttccgtaagcatacaggctcttgataaggagtggaagatggatggatgaaaccactgtttgccgtgttgcgtgcgcagcgaccacccggcgcgcgggttcctgttgatgccatggtgatcatatgcacggtcggcctggccagtggccacgcagccactgccactccaagcaagcaggctggctgggccggccaggcaggcagcgcagtgcacataaagtcgtgcattaaaatctgtgctctcagcgtctcacacatcccgatgagctttttggtgcgcacctgcagctctccccttgtttcccggcatcaaaccaaccagtactcctactactgggagtggtacgctcctgtttgtgcagctaacctgcctctccattggtctccctaactattactgggagtagtacgtacgtactacacgtactagtagtatgatgattaatggaactgttacggccgggacgggaggagtttgttttgtgtataccgtgtgggtgcgcagagcccctggccatggcctcgctggcgttgctcctccgccgcctctcgttgtgcccggccagccgccgccggcagctcttcttggcgtcgtcaaactccgcgagcacgtggaacctgcgcgtacaagtgaaagaccgctatgagcacgcgtgtagcagagctagacatgtgacgtagatcgtggtgattgacgcaccggctgcattgctggcagaagcgctgctcggtgccgtgcacgacgaccctcggggccttggcgtgcacctcgcacaccttgtgccgccggtggtactccttgactccctggagcgtaatgtcgcacccctccacctggcaacggggcaccaccggcaccgccgtcgccgccttctccttcctcttcccctgatccgcggaaccaccaccgcctccgcctccgccgccgccgctcccctgcgccacctggccggcgccgtcgccaccccagaagcacggccgcttcccgagcttgaggcaggtcagcccgccttgctgttgcatctggacgtcgggcctgcatggcgccggcgggaggaacggcggctgcgggctaggcggcgaggtgacgacgggagcccagtgcatcccaacgacaccacgtggtgtcgccccgcttccgccgcagccgtttccttccatggtggcagccgcacacggacggacctatgtgtaaacgtaccgcagctaagctagctagcgtcgttacacagcagcagccacctggtcgcgcgggcttggcttcgctccggccgacggcggcggatcgaaaactagcgccgattgggaaaaaggctgcggcggcggttgtaagtacagcgagtaggtttgccgcactggcgttccatataaagcgaagcagccaggcagcgagggtttgtgaagcgaagcgcacccccggggaggagcagcctactggcgaggaagcacgcgccgtactgacatgtgggatctcccgtcaggattggggtgtgtggtggggtcacgagcgtggctcgtgacatgtggggccaccgccacatggagctgtgtcattgacaggttcaatcgaaggcgggccccccctcgcccgctgccgctgcctctgccgctgctgctgcgccgtgacatgactgccacggcattaaacgccgcgcgctgtgtgacaatacgctcatccgcgcaccgcgcgtcaaccaaccaaccaatagcgcgcgcctcccccgacactgacacgccgggccaacacctctggtgccaccggacgagccccacctgtcggcgagccgtgccccgcgtccgtacggatcacgggagccacttgcgcaaagatcccacccatatccggaaccggacggcacgatagattctcccagccaacgcaccagttgacaaccgcgcagcagcccacctgtcgacgggcccattctatccatggccccacatgtcatagaggcatccacagagctacgcggtggagtacatgggacatggggtacgtacctggtgggcagtgaaaaaaaaaagcctgcgaggcaggtcgtgggtgtgtacatgcatgcagcgcgacgggcgggggtggggcccagtacggcggtggtccagttgtcagtgtcagctacagggcggcccagtgcctattggctggggaatggggggtatgtctgtgctttgggggaaataacatccccgtgctgggcgttggggaggatacggtgcagcacgtacgggtacgcctattttggccgcttcctgcgccattccctgcgacggtgctgctgcctttggctgcctcacctcacgtccttggttactcgcgcccgcgcactgtactactgccgctgacaccagtgttctgtttcctttcttcattttacagtactgtactatacgttttactacccctagatgttctctttacttttacgcatgtgcagcaatgcaggctgcaagaactccgttgcaagttgggtggattcgttgcaagttgcaagcggctgctagctgcctccggtgcctgctgttagggtggcagatgtatgtgtgcccagacgatgatcggaacagctgtgctgtgcactgcatgcgtatgcatcgctttttcagatggcagatcagccttcgtgacgtgtagtaacacgttgtgcagttactagtgggagtaggacaagaggcgtggtgtagaagtgtccaacaggatgagatcgtagcgtataataaagtggatacctcctcccatgcaagcatatcgtacgatcgtagcgccctcctaaagacgctttacaccatctaatgcaaatcctctcacttttgcttggtttcctagcgtctaaatataggcttgtccgtattattgtcattttgaccgtatcaaattttgataagacaataaactaaacgcaacgcaagaatcttcaggaagattgcatggacccctcaaactctaatcacaaatataaaagaggaagcatgagcctagtaaagcaagggcagtaaaattgaaagacactacatagaaaagagttcgatggcttggaagacactatatagaaaagtcttttatgggcatggttccctttcccatgcgggcatgcccactacattgtttcattttaagcttttattcaccatctctattataatatataagacaaatattcttcctttccttaaaaaaaaactaaacatgatatcaccaacttcatcctaccaaaatttggtagttttggaattccctctcacaaaaaaactatcaaaaaattagaaaggtatcaaactaacgcacatcctacgctaccacaatttaataataccaaaacttgagaaatgttggtattgctaaaattcgataatgttgattttaacagcaaagtgaaccagagccctctgcatattctacctgtctgccgtgatgggccaatgctgcaacagcgactaagcgcggtttgccgtctgcggagtgctcaaagcgaacggcccagctcgcgttctagcctaacgttttcggtgtggattgaattaggcccatgtagaatacacttgggccgtcacacgaaacggaatggaaagggcccaaaaagcacatggaccttatcgctggtcctcccgtccccgttaacaccaccggccgcctcgtcctctcgccatggccgcaccatccgcgagctcccgtgcctccgcgatctagcgcggcgcggtggctctcgcacccccggcgtcgacggagcgcggaggaaggcgggcctccgtacagaggcagtcgaggggcacgggatttaggggagaggggttggggggatggggaggaagcctgatccgtcgaagccacactacggtggcggcgcctcgccgagggcagcgaggaggacgcagccgtcgccggttttcctgggaacggcgctgttcgtcctagggtttgtgtccctcttcacgggacacatcgttacggacgccgactggtcccggatccggagccggtggcgatccaagcaggtaattttctgacaacctagaaggtctgtactgtataatttgacgggatttatcggcaccacttagaattcacgtgatattcgagtgcaataggagtaaatggacgtagtttgtctgttttctggggtgggcacgcctataccacagcatcgttggaaactaactgaaagctactgaacggaaaaaagtttaatttttgggatatatatatagttgttgcatacggtttacctggaaatagtatgcaagttgtgggtagtcagaggttttacgagtcactacgtgagcacctgcctgataagtccttaaattattgtttactgttgtcctgtcattatcagcatgttatttgtctcagttcttggtcaatgcttccttacaacgttggcaatgtgcaggttagaaataacgagcccataaatatttggaaatcgaggtattccaacttgtactatggatgcagcaggaggagcgtaaatttcagatgttagtttgcttattaaatcatcctcccttttggacaattataactagatgagtggaagaatatttaacacagtgattccatatgttcatctttcagctgctgtgccggagaacagttctactggttacttgctgattggtactagcgggggactaaatcagcagcgcataggggtacaactgtatttcaactttttattgcgttgctttgtattatccattgtattaccattacgatcttcagtttccagataacagatgctgttgttgtcgcccgaatattgaatgccacacttgttgtacctgagttagatcaccactcattctggaaggatgataggtaagttgagaccttaaaattatacttcctccatttcatattataagactttctagcattgcccacattcacatatatgtcaatgaatctagacatatatgtgtttagattcattgacatctatatgaatgtgggcaatgctagaaagtcttgtaatatgaaacagagggagtaggacaacttctgaagttcatcaacccccttgcacgatggacttaccctgatatggtacgtgctatatgcagcgacttctctgacatttttgacgtggactggttcatctcttacctatcaaaggatgtaactattgtcaaaagaatcccttatgaggtgatgatgtcaatggataaactcccatggaccatgcgtgcgcctaggaaatccatgcctgatttttacattgatgaagttttgcctatccttatgcgaaggcgagtaagtaatacattgcttcatattgatcaatttatcatctgcttgtgattgtttcctcgacacattttaatcatattgtgcatcttggaagaacatttgaattttttttttacttgaacattggaagaatcaattgtttgtgaggtatggatagtttggtagcttcatatgtcaattatgaagttacctcctgattttctgttttcaacactccctccatcccaatataagtacaacctagtgcagatgtgaaatatcctaggactatgatgtctagattcgtagtcctaggatatgtcacatctatactaggttgcacttttattgggacagagggagtatgagtttaggagatgcaataattggaaacatctatatgaaatcattagacacgtatgtggaatgctcgtgatatgtaaaagcaaagaggtttgcctatgcacttaacagtttaattttgcaggctttgcagctaacaaagtttgattatcggctcactaacgagcttgatgaagaattgcagaagttacgctgccgagtaaatttccatgcattaagatttacaaattccatacaaactctaggtgagaaattggtgcgcaagctgaggagcatgagctcacgatacgttgccgttcacttgaggtatgcttttacttgtttcttttgatttagtttctttgaaaatggtactactgagtttttttcccctgaaagtactcatatggagtgttttgaataacctctttacttttgcttgactcctcaggtttgagcctgacatgcttgcattttctggttgttactatggtggtggtgataaagaacggagggagttaggtgaaattaggaaaagatgggatacactacctgtaagactctgaaacttggtgagcttaggatctggatatatttttgtcggtattgcacttcctttttgtggattatttcttttgcactgataaggatgtgttgggtcagatttcccttaaaaactattgagtgataatggctgctgttagttctgagtgtccatgtattcttttgatcaattagtaccgatggatcaatatttgaatgatgaaatgatttagactgattcctagcaggagttgagcgctgaggatgagcgcagtaggggcaaatgtccactgactcctcaagaaattggtttgatgctccgagctcttggttttagcaatgacacgtacctgtatgttgcttctggagaaatatatgggggagaagaaactctccagcctctgagggatctctttccaaactactacaccaaagaaatgcttgctgggaatgatttgaaaccgttccttccgttctcttcaagattggctgcaattgatttcatcgtatgtgacgggagtgatgtttttgttacaaacaataatggaaacatggccaaggttttagctggacgaaggtatgcatctatcttctaatggatttgctaaatgttctaaatgtaaagtatagttgaatgtaaacagataagccttcaggtatgatgcaatccacctgattatactatttttctccctagtgctacgtgtgaccctttttcatgtatttttcgtatgtgtctatcgttggtggttttgtttcatctaatggtcattcatctctgtctacttgtaggcgatacatgggccacaagagaaccattcgcccaaatgctaaaaaactcaacttactatttaagagacggaaacagatgggatgggatatattttcacagaaggtaaagaaagtgcagaggggactaatgggagaaccggatgatatcagaccaggaagagatgatttcaatgaatttccatcatcttgcatctgccaaagaataccagtcaatagatcagtcacagcgcgagctgaaaacttgtgagctctagtgtagtgaggcagacaacttgagaacggagaatgctgggtgattgagcacgtcccttgctgcactggggaaaatacatgtttgttaagcaaagaaaacagggatgtaaacccaatcagacagaagcagacgtggtggataaatactcttaccggctttaactcatggcactctggtagtctggtggttcagacccagcagaactggttagtgtgcagcgatgacagacaaactgctgatttgcagcttcagtttggttccactaattgttaaaactgtggtaaagaatctgccacgataattgtagtcattagctcgatatgctatccctgtaaattgtacggtatacacgatcaattatttggatgtgtgcttcaatcgtcccatcttctgtctggtagaacctcacagcaacgaacttatttgctgaagggaaatgccattgtaccagaaacttggaaattgaaaattgcggtgattacgtgtaatttatttccttttaacgagccagtctggttcttttgaagcaatatgaatgtaacgtctttgttgcatggctgtgcagtactaatcaatgactcagcaaatctaatcaaatcgtcatcaaacataaatttcatgggattgctattcaccagtcaattgatttttattttcttaaatatcagccactggggtagatgacaacaagtgcattccttgttggctgggtatacaacacagatgggggaaatttcgactcacagatgtaagtatgcaacatcgatacacaacataacaaatgctgatgaaatcatgagatgcaccgtgatagcatcaccagctaacaacaccacccatggatcatcgggatcatctactgcgtgacaatgagaaacatcactgacgaaacccttgcaacgatttctttttagtaaacattaaccgaagctctgcttcggacctcggttgcagttcagatcagagaaactcataagcaatggacttctcttccttgagctcggtcgccgaggtttccatcttggagcgtgcaaagtcgtcaatctcaagacctggagtgcgaacaaagcgaacattcttaggctgatctcatcctgcaatgtatctgaatcacaaggattccatgagctcaccctgcacgacagaccactcccccttctcgcaggtcaccggaaacgagaagaagacgccctcggggacgccatagctgccgtcagagtaaacgcccatggacacccacgtaccctgatgaggagaggacgagcaaatgctggaattattagatgtgatcgatcggaattcggaggaaggtatgcaggggaggggatatggacctttggggttccaaggatccagtctctcatgtggtcgcatgccgcgctggcggcggacagcgagctcgactgcttccgcgccttgatcaccgccgcgcctcgctgctgcacgtcggtgacgaactcctccctcagcctgtcgacacatggtggtggagccactatcagaactcgttaccacacatgcatttttacttgacgagttccgtaccatatctcgtcggcgatgagctccctgacgggcctctcgccgcggtcggtcgagacggtggcgtggctggcgtcggggaactgcgtggaggagtggttgccccatatgatggcgttcttgacgtcgccgacgtgcacgttcagcttctcggcgacctggccgagggcgcggttgtggtcgagcctggtgaggcaggtgatgttcttggccgggattgccggggcgaactccttcaggacgagcgcgttggtgttcgcgggattggccacgaccaagacctgcaaactccggcaagatcatgctggtttgactttataatagaaatcctaataggtacttcatacgtttcatacgtttcataatgtaagtcattctaacattttccacatttatattgatattaataaatttaaacatcattttctacattcatattgatgtatatatctagattcattaacatcaatatgaatgtgaaaaatgctagaatgacttatattgtgaaatggatggagtactagttaggaacccaacataaatatcaaaagttttaactggcatccgttaggcagcaccgataataatagtcatcagtaccgattacacaattgaaacctatatcaacatataggtgcctgtttttaagtgagggccatcaacaattacttcgtcgtgataaccagtggacccacaccaagatgctagttgggtgaaataaccggcacctataatttgcgtgaagtatagtttatttgttttttaccgtccaatggccggtacttgtaccgggcggtaccaaattcctagtcgttggatctggcccgatccaacggctggtagagtttgataccaattctgtccctggtacagtaccgacctaagaactaaggtggaagggcaaaaatataattatgtgcaatagatggatgtgagtcgggcagatagggtgatatggttcccaccaacaccactgccgccaagagtgtgtcaacctcgtccacgctgcgccgtgaagaactccgcttcgtccgcccctcaccgccgggaaggactcctcctcctcgccccctcggcgccgggaaagaatcctccttctccgcccgtcggcgccgggaaggactccttctcggcccctcggcgcagggaagaaatcctccttctccgcccaccagcgctgggaacgacgactttaactctgccgccctgattgagcgcatccctgctcattttctctcccgatcctacccatccgggattgaacggtcggatgagttttggtaccgaccaattccagtaccgggcagtacaacttggtggacggtaaacatgtaaacatgctgatagtttataggtgtcgttttctattaccaaccggcattatgtatgaatatgggtgctaatcgtctcaaacagtacctcgtgggtgcacacttgaacggcaaaatcactataaatattggttctagcccgtttcttttttactgttccgtagtagcagtagtgttttagcatagaaattgtgtacttgcgtatacgtgatgcgtcgtcattcaccttgcagtttggggcggcgtgctgatggagcgcagaggcctgggatttgtagattgtcacgttcttgctaatcaaatctttcctctccatcccgtctctcctcggccatccaccgatgacgatggcgacgttgacgcccttgaacgcctcagcctcgtcactcgtcgccaccactcctacacaattgaagcatcatgttttatactcgggcgaccagcgcaacgagggaaacttgaaggtacaaggtcacgcacctctgagcagcggcagcgcagcgtcgatcagttccatcctgacgccgttcagagcattggccgcgaccggcagatccagcaggtggagcaccaccggctggtcggctcctagcatgaggcccctcgcgatcatcgcgacaatggcataccctatttgccctgcaaaaaacagcacaaaatgtcgtcagtgaatttgttttctcgacttctggtcgtatttttggtttagctgcttaagtgtttgattagcttccgagttctgtattacctgcggcgccggtgacaagaaccttgacaggcttcttcggctcatctctcagtaaccacgggcaccattttgccagacgctggaagagggaattggatgacatcatggttttttctctgtgaaatttgtatgtggatgacaaattttaggagcctagctttgatatgggttcagctgaagcaactcatacaaatagcaccaagtaggccatacaccatgataccttactggcttaccttgatgaacttgatgctaaaggctcagattccatgctgatttctgcaagaaatggagcttcctggtgcaaactgcaaagcttggtataatgttgagaaggtgaacggaactaccaaccttggctgatgtgaattcataggaagccatttggcttattttaagcataagcgaaacggcatatttgcaaacaaaagataatttatgaataaaacttttatatatgtgttcttggcgatttaaaagcaaaagctgaaaaataaacttcaatgaaaaaactttaaaattaactttaaattttagctaataagtataagtataagcaaaaagatgagaccgatagtatgaacttgatggtctcaagtgattttgacaataataaattttacaaaattacagatactttgggggtctaattatcacaaaactacagatttaagaatgtttatcacaaaactacagatttaacgtcaaacttttcatggaactacagatttaatgcaccatatcagaaaactatagatttagtgatgaagttatcacagaactacatattctagacttggatcatagtattattatttattaaaagttataaaatctgtagttttatgataaatagtttttaaatgtgtagttttgtgataaaatagttgttaaatctatagttttgtgatataatatcttaaatctgtagttccgtgataaatttaacactaaacctgtaattttgtgaaacacgttcttaaatgtgtagttttgtgatagtttgatcaaattatatgtagtttcgtgaaatttactcttttggcaattaaggaagatgtgcgaaactgcatgcttttcttttctttggtaaacaaagtcttaaccctaatactgaactgatacaagtacacaaaagtttaatctgcactggtacgcgtagaccataacagcaagcaataggatgcctgattcaacaatcaactcagagagaaagacaagggtttaaaggctgtgtttagatccaaagtttggatctaaacttcagtccttttccatcacatcaatctgtcatacacacataacttttcagtcacatcatctccaatttcaaccaaaattcaaactttgcgctgaactaaacacagccaaagatttatggagaccgaagagcatggccttttgtagtattgtaagttcaagtgccttaattgattaatgacaaatctaactatatgagactaatcgtttcatttttatgagcctttctttgactagtctcatttggatacaaaagtaaaaatgatgagaggtatgtattaaacttcacatattctaacttggtctctcttgtggatccaaaatatagtgtgagcttcctatttgatctttattgattatgtgcatatgcgttccttcatatccatatgtatgcacatcttgagggagagcttattttatatttttgtttattataagatttctatcttgatttgaaatcatttttcatctcatctctctatattgtttatatcgaattattatctatcaccaaagagagaaaagattgaaagatcttggattaaacaatttgcgtaattgttactttggtgatacatgataaaccgatgtttatgggattaacctctcttttgcataagttgtctactaggttatttcccgataatgagatgcggaagacatgcattcttttgtgatgtaccttaatcatgacaaggatgaaatgcatggagataaaacgatatgtaccacttcttatctcctactttttgataggttcatatatatgatttccatgtaattgatatataagtgtgagactaatgtttactcgaatgttatcttatttagtctcatttacattgagaacatggagatcatgaaggtatatgttttatgttggtctacatcattacttcatatgccttctctatatgtataggataaatccccattggtcattctctaattatgcatacacttgcatctcttgtatatttatttgtatgcatatatttagggggagcaaatcctatacatttattgtgcatgttctagatctatgttgttcacctattatttatatcggatatttgcacttgagcttgcatacgagtatatgacacttgtgatgttaatgaatactcaacaaacatatccatatctttcatatgcaaccggttggtcatcaagtgaaggatgacaaccgatttgttgagactaatgttctcctttgaggtgtgaaaaggaataggtcccactacgatgaggctaatgaatgacaccatgggttagtggtcaccaagccaaggacatcgtcatgttggcaagaatgaagtcaagcttgtgatgagaataaagtcttgacaaaggatggacaagacctcggcataaacatggttcaaccggatggtcacaagtgttgatctcggctcaagcttgaccccaagatggatggcacaaggcaaaggtataatgtagctaagaatgttttcttagtcttttcccggtcttggtgtttggtgtagaccggatttgctagataggcgccgtactatcaataggggtctatgaagcgagcttgttgatgatcttgtgccatattagttcatatgcatgtaggtgcattttgtgggtttgtctaaacaagtgtgatgagttttctcaagtcctaaaccaagagagaagtaggcatgtccaataggagtgagtgacatcttgtgggtatgtccggtggatatcctttggagtgtgagccctttatccttgactttagttgtttttcttggatggatttttcatgggttggatggtcctttgaataagctttccatagagtccaagaacgccaaattccgagacccgagtcaagagatatcgccgttttactaacggtcggttgagctgaaaagtgacatgcggtctgaccgtgggccttaggccggtctgaccgggtctgttagccggtctgaccggtgtggtaaggccggtctgaccggccccactggtctgttgcactgatctggtttttggtggcgatacagagccgctagagccgcaaccggtcagaccgagccgacggcggtctgaccgagccatggacggtctgaccggccactacactgcggtcagaccggccaggttgagtgggcccaataatttccctgttctagccgttacaaagtggtccggtctgatcggcctcacaacggcggtctgaccggcagagcacaaagttggggatttcggttccaatggctagttttggtggttgggtatatatacctactccccagcagcaagggtaaggttttggcactccattgcattatcttgaaccattgcaagagctctcacacccttgtgcacttagtttatctagtgaggtgttagagagtgagttaagccaatccaagtgcattgcttcattgctagtgtggcacctgatcatcctcggcaagcatcctagatttgttactcttggaggttgccgcctcctagacggcttgtggaggtgttgcccggtgacctctccgaggagattgtggaggaggcccggcgccgtttgtgagtggtttggagttcaccaccttcggagtgaaggaagaactaccctagtgatcgaggcttgggtagtcctctccgtgggccggctcccaccttgcccaccccttgaccaagggggcgtgcggtggcttcgtggttgagcggtggagttgggctcgcctcaacggggattaggaaaccggcgagtttccgaacctcagtgaaaaattccttgtctcttgtctcatttatttgttgcatttacatttgtgcaatttactttcatagagacatatttgagcccatatcacctatgtttgcaaaacttaacttagttgcttagttaaccttgcacctcaccttgcctagcaacataggttagttttgtttaagtgccattaagttttaaaaccgcctattcacccccctctagtcggcctccttgatcctacaagtatatggcaccaaaatcttccgatggaagcaaatgttattgaattttttttcattccctaaaggtatgtccccacgtttgtttgtaagtatgaaatactaatcaaatagttatagaacactttaaaaataaaactattggtcaattagttatttatcatcctgcaaaaaactaatttcaaacttgatttacaaaatgtgaaaaacagaaatacacactgaatactactagtcagatttgtattccaagttgtctagttcgatttaaatttgcatgttggtgtaatgatatctcacacaattatttatgttataattgtttttagaatttttcatagccaggcagtgtatcaggtgaaaaccaagcatcctgtgcaaacttggaaactctcaatcaagtccacaggatgctcatccgatggctagggacagaggtgggctaattttgcacttaaccgcccgcaattagccatagtaatctcgttttttttgcaaatcaccccccgcccaatcccagcgtcgcttcgtgtggccggttggccgccgcgggcgtcatttcgtttggccgccgccctccgcccgcgaatcgctccctcgcgcctggccacgaatgcaggcccgcccagccggctcaactccgtcactagcccgctgaggtgcgccacgcgccatcgtttcgtgaggcccgccgaggtgcgcctcacgaaaccgtgatggagtccagcgtgtgcaacggcatggagtctggcacgcacgacatcctttctacgcacgcacgaacgcccacttcggcattggcagtggcagcccttcatgccgtcgttagtcgtttctcctataatgctttcatcttgactttgatagaaattattttgatccttgctaacgtgcctgcatgcagtggatggtgaacctgtagtcactgttgattctgcctctgttgaggctaccgccatggatcatgccgtcatcaccatcgacgccggagttggagtccaccttgaacatccaagcacaccacagccaaaatcttctctgagtataatagtaagttgcaaagaacatttgaacattaggaagagcaaggagaagaaggctggaagtggaagtaaggatacaaataaacggaagtgtcaaaatgtaagcaagcagtggatcatgatgcacgcaattgcccaaacaatgttgttggctgatatttcaagttcccgtaaccttttaagttcaattgagcaaagtactattataaacactttttttactagtggcatcattcagcttattgctgctaattttcagatcaattgtgctaaattttgagttaatcattcagcttttggattttcagttcactgcgatgttgaaaaagtttgacccaagaaggcaaattgaaaaagtttgtctttcaaaggacaatcttcactgtgactgtaatttgaacacttgaaaatattactgaatttagaccatgcccattcacaagaagttcacagataacaacattcatattcacagagctgctcacaggtaacaacacagatgacacaattcacagaattttgtatctcttgctaggacagataataacacagataacttgctaggacagcagcaacagattcctgtcaacatcttcaatctacagcaacagctcccaaatgccagaaaatgactatgcagtagcacggctggggccggggctgttgcggcggcggcgaatcgcggacgagggagcggtgactcgcgggcggagggtggcgaccagacgaaacgacgcccgcagcggccacacgaagcgacgatgggattggcggagggtgatttgcaaaaaaatgagattactatggctaattgtgggcggttaagtgcaaaattggcccacctctatccctagccatcagatgagcatcctgtggtcttgatcgagagtttccaagtttacacagaatgcctggttttcacctgatacactgcccacataaaaaggatgagtgcacatccccttaagggacaaaatgacattcccaatgtcatggaactggtttactgatgaaacaccaaaccaggtgaaatgttatgacctgtttaggtgcctatctccttctgtaatgttggagatatctaaccatttccaaaaagttatagagattatgtgagcacaaggttgtatggctcagtgcagcttgcattagaatatcagagggcttgattgtatctgcagaaacaggtcaggaaatgaacaaagaaaacatccaccagtctctgaaatgctgggtattctcaatgatatgcctaatgagataagctaaagaaccattaaggcattgtttaagcctaaacaccaaatgaagtttgcataatgaataggggcatgacaaagtatctactctttctctttcttgcaaggacctaatctatgccattattggcttgagctcgtatgaccaccgccagaagtgctaatgacattgattagtaatttggtatgaactaccagaaaccccattcccatttcagaggaaactcgtatgaattcctgattatctgtggtccataaattttttgtttcatatgcccgaagaacaagttttgtatgaaaaaattgtgataataaggagagacttggtatcaaatactactcttttttttagctttgagagagaagaaaatggtgagatagggactcgaacccaggccagggcttgctcctggtagctccctaccagtaccagatgagctatccaccgttctgttttgtatgaaaaagtgaattccaagaaactctgcacaaatgctgactgcacaaataatgagctgagcaactacagaggatagcataaagaagtttgcctggtttggtcgtctaatcatctccttcatgccatgaagtcattaccactcattctagcattatcatattgttgaaacctattatttcaattgccggaccagccacgaactcaattgatttaattgctagccttacctactccagagtgtccattggattcctgtcacaatcccttttccgaccgctctttgaactgaaccttcggtcataaattacatgaatgattggtaacaacaaaattcaggtttgggctaattaattttcgccaggctggcaaagataaccggccaagttttgcattaagaaggagagagttttacagcagcccctaaaccagaaaaggcttaggttacaaaaaaaacttcacaacaataaagacaataaacaagcacagctgctaaaacctcaggaaattaaccgccagcgattgcgctcagtagcccagcagccttccatgtttcccattcgtcgacaattgtggcacaaaggtgaaccgctgaagtagctcgtccatcaaacacacgtgcattcctttccttccagactatccatgttaccaagataaccccaacatcaaaggtcctccgatctcttgtgaactgatttgcgtgcttcacaccaccaatccaacatgtcgtccgtgggggaaacacaggagagtcccaggcaactcctgattctcgtccaaactgccctcgtgtactcgcaagcgtggaacatatgggcacatgattcagcatccttcccgcaaaggtgacagtatggagccaagtgccatcctcgccgctggaggttgtccgccgttaggcatgctccacgtatggcaaggaacatgaagaacttgcaacgggtcggcgcgcgagacttccaaatcagcttcccaaccgccgagcgtgtcttcccagtgcagaggagtgaataggctgattttactgagaaaccaccatctgtggcaggcttccaagaaaacaaatcaggctgagtagggttcaaggaaacggtggcaacaaggtcccagatttggaggtattcaaacatcgcttacagtgaaagacctcccctgatgtcgccggtccaggcatcatcctgcagcgccgaatgaaccgttctgcctctgtttttaacaaaggaacacaggattggggctcggttcaggatcgaccccccatctgggagccagtcatctgtccagaagaaggaactcttcccgtcacccagcacaatcctgcatccggccgctagacaatgttcggctttcctatcttgcggcaatgtgaaggacacccagtggcgctccggctagacacgccgcagccaaagccaccgcgtccgaagggcaatgcccattctgccaagattgatgatgcccaacccgccattttcgatcggcagacagagcttatcccaagcaactaggttgcatccacccagtgcatcctcatcccccttccacaagaaaccaagaaaccgtggtctcttgttcacatactcttcagtggttgtcttttgtaacttccattgcagggaaaacttctactactattcataatgcaatacctaagtaaagatcaacaaagtatatcacttccaatacaagattgcagaagttcctttacagccaagaaaaactgttgttcaagtaatattcagaaatttgatttctcctacatttaggagtcaaggaagagaagaagataagatattagataatacatcaagaacatgacccaacaacagtttagtcattacaatgctccataatgtttattagccaatagataagataatacatgacccgatagcttctttctaattgtcttgtggtgtatcctaacgtggttcatgtctaaacaatcacaataaacacaaagttcaggcgttcagcagaacagagtggttggtcggccaatataaaccacaaaacacgattagtttttagattatcaatcttgtggttatcatttcacgccacccataatattgtagtgaacatttaggactgtccatcaagtcattacagtcacctgttgtgtgtataaaagggggcctgaagaagggctttacctgcatcagtgtgatcaaccatctcctttgaagtcctagcctaaaagctcttctactcgcataaagaaagatggtgaagcttgcatttggaagctgcggcgactctttcagtgcctcgtccatcaaggcctatgtcgcggagttcattgccacactcctctttgtgttcgccggcgtcggctccgccattgcctacggtgagctccttatttatgtttcaaaaaacttccatcccaactctgcttgtaccacttagcacagtgatcattctatgtttctcatctaaatctttgttgtgcagggcaactgacaaagggcggcgcgctagacccagctggtctggtggcgatcgccatagcccatgccttcgcgctgttcgtcggagtttccatggccgccaacatctccggtggccacttgaaccccgttgtcaccttcggcctcgccgtcggtggccacatcaccatcctcaccggcatcttctactgggtcgctcagctgctcggcgcgtccgtcgcgtgtctgctctgcagttctccacccacggacaggttggtttccatcatgctgccacgttgttgtgctttgtacttcgcacttgagctaagtgaatcgggcttgctaattcgcaggctatcccgacgcacgccatcgccggaattagcgagatcgagggcatggtgatggagattgtgatcacgttcgcgctggtgtacacggtgtacgccacggcggccgacccgaagaagggttccctcggcaccgtcgcgcccatggccatcggcttcatcgtcggtgccaacatcctggcggcggggccctttagcggcagttccatgaaccctgcccgctccttcggcccggccgtcgcggccggcaacttcgccggcaactgggtgtactgggtcggcccactgatcggtggtggcctggccgggctcgtctacgacgacgtgttcatcgcctcctaccagccggtcggccagcaggaatacccatgaagatcatcgaatccgaaccgtcgctgctgttgattccaatttccatccatgtcacgtctcgcttccttttgtatatggtcttcccgtttccttcctttttcgtttttggttttgaacacaaattctcgtgaagaagatgtaagatcaatgtgtgttttaattcttattctgtgatgaacaattggcatctgtgattattggttttgatatttggagattatcgtcgaagttgttttggagataatcaattttcaggtgatgatcggattcactgttattttatgtgaccggtctgaccaggctgtgtatgccggtcagaccagcggtgatcgagcggtcagaccggccggcccgcggtctgaccggccgacgctgtgtcggtttcggtttcgggttgtttctttggatatccgtgattgtttcatggttatggcttctagatggatactatacgtatgtaatactgttgtttgctaacaatgagtcaagttggtgatagcttggtctcggaatatagtttctttatttgtttcatgtgtaggtgactcgatgcctagggagagtatttgcggtgatggaccgggagtcggcttggtggtaagacgatgtccgtggtggtcagatattatgcgggatactaaggctagagttgatgcacgtggttggtgaagattccatatggcatacgatggaggtattgtgtgcgtttgggatgcggagtcgaatttggaaggagtccaaatttggtacaattggttatgtaaagtttgtgtcttgtactagagagtttcctaaggtgtttaggactcttagtatgagtttggttcgtggctttaggctgcctacctcatgtataaatagagggggagcgtgaggcttcccggtatcgcttttgtattgcttttgagagcaattgagttgctagtttagttagggtttcgagtttggtcaaaatttttataaggagtgctgttggtgcactttgtaaacacagagagaatcaataaagttgtcatctattttaagagttcttcgatttgtgtttcaccgggtttcggcggtctaaccggcaactcaccggcggtcagatcgacggcattgcggtggtcagaccggcgggagtacggcagtcagaccggcagcagcgacagcgagcggcaggcgacttcggcggttcgaccaatcgttctacatcggtcagaccggtggcatccactcggtcagaccaacagattaatctcggtcagaccgatctccgtctatttcgagggtaacttttatttccgctaaaagtttttggtttttgggtataccaaccattaacccccctctggttggcttagttcttgtgattcgatcctacaagtggtatcagagctttttttgcttctttggattttaaccgatctagagtttttgccatggctgcttctaataagttttcaactaagcctcatgttttcgatggaacggatttttctcattggtgtagtaggatgcaatcttacattatggctgagaattatgatatttggagaaaagtttctcttccttatgtgattcctgaagttattaatactgctgctgaaaaaattgcttttgaactgaattgcaaagctcgcaatattcttttgagtgggatttcttgttcggattatgatcgtgttgctcatcttcaaactgctcatgagatttgggttgctttgaataattttcatcaaggtacaaataacattaaagaatttcgtcgtgatcttttcaaaaaggagtacattaaatttgagatgaaacctggagaagctttggatgactatctttctaggtttaataaaattttgagtgatcttagatctgttgattcttcttatgatgctaattatccacaatctgagatttctcgtcactttttgaatggtcttgacatgtctatttgggagatgaaagttacttctattcaggagtccgtgaacatgtctactttgactttggattcgctttacacaaaactgaaaactcatgagatgaatattctttctcgtaaaggtgattctaagtctagtgctttggtttcgtcttcaacttctttggatgttggtgcttcttcatcgaagtcttctgttcttgctttatttaatgccatgtccgatgatcaactcgaacagttcgaggaggaggacttggttttgctatctaacaaattttctcgagctatgaaaaatgttagaaacaggaaaagaggagaaccaaatcattgttttgagtgtggtgcacttgatcatcttcgctcgcattgtcctaagcttgggagaggcaagaaggaagatgatggtagagtcaaagaggatgacgtgaacaagaagaagaacatgaaggagaaggagaagaagaagcattgtatcaagtggttaatccaaaaactcataaaagtttttgatgaatcggaagatgaagatgagagcaaaggtaagcaagttgttgatttagtttttattgctcgtaatgcaagttctgatgttgatgaatctgatgatgataatgaagaaaagcttagttatgatcaactagaatatgctgcttacaaatttggtaagaaacttcaaacatgttctattgtgcttgatgagaaggatcatactattgagattcttaatgctgaaattgctagattaaaatttttgattcctaatgatgataattgtcaatcttgtgaagttttattttctgaaattagtgctttgcgatatgtcaattctgttaattgcaagaaattggaatttgaaattgaaaaatctaaaaagttggaatcttcttttgctcttggatttgctttacttgctcgtgttgttgatgagttgattttgacaaagaatgttttgaaaaaaatacaaagtggctttttgtgcaagttctttagtcaatgtttcatgtgcaaataaggcaaaacaaaacgatggtgttttgatttctcaagattgttcaaagatgacggagcgtggggctcctcaccgggagaccgcgcgggcccccctttgctggttcggccgggggcgctaggtgagattctaagccctcgatttgtggaatgtttcgcgagagagcaaatgcgcaagacacgggcgatgtagacaggttcgggccgctgagaagcgtaataccctactcctgtgttctggtggatctgtgtatgaaggagttacaaagagctggagagcaagagagttcaaactctagagagaccctctcactctttctctcctctacgagctccgctcttccttttacgagctctccttcttttcttctccctttcttctctctttttcctccagtcccctctcttggtaggcatggtcctccttttatatctcaaggggataccacatacaccatttctacctacccttcttttgggtggggacccatcctactttgaccaaaacttggctcgtaccttcgcctgacaccgggataaccctgtccttccttcattaatgggcggagatttgcaatggctgctgtccgaatgaccctccgatgggatgggtcataccaacctccactccgccggaagcaggtgcaacgtgggagcacggttatttgctgatgacgtgaccggcgtcagaccagtcacaaaccggtcattcttgtctaccacgcgtcagtttagcatgccacacgtcagcccttcttcataaaatgacttccttgtaatggttgcgatgaagcctggtatgaatctagccgagaccgatgtgctaactccaggagttcccacgccggctccgtctagggacgagtgcctagaggctctcatcattccgacgggacggagcgaggcgtgcgacaggccgcctgttgccacctaacccgcgatctgaccggtctgtgaccggtcacataccgcgactggtcacagaccggataagcatgcgctgcgccgcattgaatgcggcgtgacgcgctcgtctaacccgctataaatgtggttaggtgagggccgctttgctcacctaacccacacacgtggcgccgacgccacagggggtcggggcgccccagccctcggggccgaaacgggagcggccgacccctcggggagacagagggaggggtggccatgtcaccgttgggcccgacccccccgagggggtcgggccacgtgagtgatcgcggctacccaagcctctagtcacgatacccctggccccatgtcaccgacagtagccgccggcgtcacgctagggcgaccgcccccctcgagggaggcgatcgggcgagatgccactccttaggcccggtgacaggtggggccggtccccacaggcgggcagaaacccaacggtcgcaaatcgcgcgcatcggcaagggagaaaccgatcgacaataatgagcgggctcttcaagaccgctacattacttgagtagcgcgcgaatcgggacgaaccggttcgtttcgcctagagatgtgatgatggtgcatcggtcggcgagcgtagttaacgcgcgcacgatatgtcccatctcgactgccacggccgcacatccgcctcgtgcgccgcaaacgggcgaacgggattagtggaggagtgggcgcgagaaacgagggggcgagatagtgggcgcgggaagcgaggagccgggcatagcgttggcaagggtataaagacgccgaggaagagattcgtttccttcctcttcgccattattccccttgccttcgccgcttgcgctctaacttctcgtttcctgtgccctaccctcgccgcactcactcgctctcaaacccctcctccgccggtgtcatggcacggggctccgcaccgctcgacggtagcgtgctgccgccttctcgcatcgtgagcgagaggcaagccgggctgccgcgccgattcatgccggaatctgccaccggccaggaggtggttgcgctgggtgagggacgcccggcgccacactacccggggcggtccgtattcttcctttccttcgcaatggcagggctggtcccgccattctcttctttcttcatggatgttctggagctttatgatctccagatggcgcacctcacccccaacgcggtaatgacgttggccatcttcgcgcacctgtgcgagatgttcatcggggtgcgcccatctctccggctgttccggtggttcttcaccgtacagccggtgtcgccaccgtcggtagtcggtggctgctacttccagccgcgggggccggtgctgaaccgctacattccctgcgtccttcgcaagaagtgggacgactggaagagcgactggttctacacccctctcgccgacgaagcgcgcctccgacttccgagccagcccccggcgcaggcctccagctggcgggcgccggtagatctgggagacggctacgacgccgttcttgaccgcctggctggtctgcgatcccaggggctcacgggggccatggtgtacggcgattaccttcgtcgccggatcgcgccgctccagcggcgcgcccggggcgcctgggagtacaccgggtccgaggactacatgaggacccaccagggggtcaaatgggactgggtccctgaagacttcaaggtggtgatccaacgggtgctgaatctcagctccgtggaggcatccctcatcccccaaggtgtcctccccctctgcagcgatccagagcgcgccaacatcctgaccatcatgcaggcggtcggggcgtcaggggagcgggctcctcgaggccacgatggcgcgggcgggagccgcaggggggaacaatctaccccgggagggagtcgtgcttctgggccccgtgacgggggcccggggggcagccgccctgccgacgcccgggggaagaggaaacaggaggataccccctccccatctcctccccgagggggcggggtggtgcgtgccagcagcaggcgcccggagggtgctgtgccgacgtcgtagcccgagggggagcgaaaaaagaagcggctccgcaagataggggggaccgaaccatgccggggaaagctcatctccccccaaggtggtcgtttagccgacctcctcgcaggttcatccccgcgcccactgcggccgtattcattctcccatctcccaaggcaagttttcactcacccgtttttcgtcttctggtttttcttctgcctcagcgagatcccgtcgcgcccttcccgccattccaagtctggccggtctgaggccgaggagacggcgaccacggaggcccggaggcgggaagctgaccggcgagaagccgcaaaccgcctccgggaagccgaggaagctgcccaggaggctgtccgggctcgccaggctgaggaagccgcttgggaagaggccagactccgacgaggagggcggtgacggtggtgcggacgacagcgatgacgaggccggcgacccgggcgcgtcggcgtgagcccccaggcccccgccaatcttaaatagctttttctttcttcttctgaggccttcgggcccccttcttgtataaactaattcaatctgcaatcaaataaagaggaaatttttgtgtcagctctgtttgttgtgtgtatgagatgaggatggtctgtgccgcggtccttctgtgtcttggcttgaacgagggctcgtgcccaggtcccagcctcaaatggcgcgggtcggggctagtgcctggggagatccgtgtgtcgagactggccaggccgggaacgtggtgaccgaggattatggatgacccgattgtgggcctttgccgattcccccccggagttcaccacgccccggggcacggctcggttctgggccccgtttggcgattttagccggcccgggccaccgagggcaggatcgagcacgagcgtgctaattcaagccaagattcttcgaaaggaaacaatggcacagacacagtccttaggaaatcgaaaatgcttttattgaaatacggaagagaaaaaagataaggatatgcatgtggtagcccccggccaactctgcacgcctgggagggcgcggggttggcccgagcccgagacctgacacctgacccctactaggggtagaagcgacgaaggtgttcgatgttccacggattaggcagctctgtgccgtcggccgtggccagccgaacggagcccggccgggggacgccgatcactcgatacggaccctcccacattggtgagagtttgctcagtccagcacgcgtttggacgcggcgtagtacgaggtcgtcgacgcagagtgatcgggcccggacgtggcgctgatggtagcgccgcaggctctgctggtagcgcgcggctcggagggccgcgcgccgccttcgctcttccaagtagtcgaggtcatctctgcaaagctgatcttgatcggcctcgcagtacatggtggcccgaggggacctcagggtgagctcgaatgggagaactgcctccgcgccgtagacgaggaagaaaggcgtttccccggttgctcggcttggcgtggttcggttcgcccagagcaccgctggtaactcctcgatccacgagtcgccgtgcttcttgaggatattgaaggttttggttttgaggcccttgaggatttctgcgttggcgcgctccacttggccattgcttctggggtgggcgggagaggcgaagcagagcttgatgcccatatcttcgcagtagtcaccgaagagttcactagtgaactgggtgccgttatccgtaatgatacgattaggcaccccaaaccgagcagtaatgcccctgatgaatttaagcgcggtgtgcttatcgatcttgatgaccgggtaagcctcgggccacttagtgaacttgtcgacagcgacatacagatactcgaaaccgcccggggcccgcctaaacggacccaggatatcgagcccccagacagcaaacggccatgaaagaggtatggtctgcagggcctgggccggctgatgggtttgcttggcgtggaactggcacgccctgcaccgccggaccaggtcaaccgcatcgttgagagccgtcggccaatagaaaccctggcgaaaggccttgccagccaaggtgcgtgaggcggagtgggctccgcactcgccttcatggatatcggcaagaagctcgacgccttgttcctgaggaatgcacttcaggaggactccgttagccgcgcgccgatagagggtcccttccaccagcacgtagcgcttggagatgcgctggacgcgttcactcccttcgcggtcctcgggtagagtcttatctgtgaggtacgcctagatctcagtgatccaagcaatcaatctaagggagctgggagcgctcccctcgggtcccgaggcctggactccgacgggcctcgggggccgttcaggcgcgtccgtctcctctagggggtcgggccgcgccgatggctgggcaagcctttcttcaaaggcgcccggtggggtctgggctcgcgaggaagcgagcctcgagagttcgtcggcgaccgcgttatcccgtctgggcacgtgccgaagctctattccgtcaaattggcgctccatacgccgcacttggcgcacgtaagcgtctatctgcgggtcagagcaccggtactccttacagacctggttaacgaccagctgggagtcgcctaacaccaggaggcggcggatccccagtccagctgccaccctgagtcccgcaaggagtccctcgtactccgccatattattggtcgcccggaagtcgaggcgaaccaggtatctgaggacgtctccgtttggcgaggttaacgtgacccccgcaccggcgccctgaagagatagggagccgtcgaactgcatcacccagtaggcggtgggaggcagctgcgaggggcccgagctggtctcggggacggagatgggctcaggggccggggtccactctgccacaaagttggcgagggcctggctcttgatcgcgtggcgtggttcaaagtgcaaatcaaactcagagagttcgattgcccatttcaccacccgtccagtaccctctcggttatgcaagatttggccgaggggataagacgtaaccaccgtgacccgatgcgcctgaaaataatggcgcaacttcctcgaagccatcagaatagcgtaaagcatcttctgggcctgagggtatcgggtcttagcgtcccggagggcctcgctaacgaagtagacgggccgctgcacctttcggcggggccgatcctcttcgctaggggccgcatctccagggcgctcttcgtccgagaggtcgtgcggggcgcactcggcttctgtgccgacgacctcggggtcggagggcgacaggcgcggccttcccgcagtggccccggggccatcctgggggtcgggggcgcctggcaccgtctgacaagcaggcggagggccagctccggccgtcgggggcctcgggccgccgttcggctcgggggcctctcctccctgctctctcccgggtcgagtcgacacagggtggggatgcgcggggtgagggttgtcctcgtcgtgctccacaaccaacgccgcgctgaccacctgcggggttgccgccaggtaaagtagcagcggctcatctggctccggggcgaccaggactgggggagaactgaggtacgccttcaactgagtgaaggcccgctcagcctcctccgtccagataaacggcccggagcgtttgaggagcttaaataggggtagcgccttctctcccagcctcgatatgaaccgacttagggcggccatgcagccggtgacgcattgcacatccctaagcttgctggggggcgcatccgctctatagctcgtatcttctcggggttggcctcgatgcctcgggcagagaccaagaacccgag

SEQ ID NO: 10000 - DNA, 71057 bp, Oryza sativa
atgtcggggcgcgcaagcaacccgaagggtgaggctgaccatctgcaggtccttggtcccaaaggtggaggaaaacctgtgcgggcgggtccggaatgtcgaagatgaagggcttctggagccaggggacgatgaagtgggtgccctccgacgaggtctccgggagcacgccgcggaaccggtagaagatcacggcgcgctgcccgccgtccaccgtgtacagcgccgtcgacgccgccgacgccgcgatgcccagcccggccgccgcctgcgccagcttcgtaagcagcgacgccgccgcttgcccgccgccggccatggatcccaatggatgggggttcgcctgcttttcccggtgggggattgtttgggaaaggggtttgggtttttttttggggggggggggggggggatttggttgatctggtggggtttggttttaaagccgtgcacgggtttccgcatttcttggaagggaagaagaacgaaacttccagtgcgtgggcgtcgatggttggcaggtggcagggcactcgcattgagattcgtgctcaggcctgatgggccgtgggcctcctccggtcgatgctttgtgacgtccaatttaagtccctcaagatatattccatccgttccaaaatataacaacttttttaccaacattctcttcccaaccaatcacaacatcctcctatttaattctacctactttattaacaacaatgtccaactctaaatcttcttttattatgtaacgggggtggtaagttattttacacgagttcttattgttaagtagctgagggatacaaatcattgaacattttcctcgagtgagaacctcgagcacttctatcgagactcacattcaagatcatgtttgtgtctacttcctccatcttaaaatacttatcattctaaataatttagtataggtcgtgtttgtagtctaccaccgaagaagaggactcgggttccaccagctgaggggttatagtagacggcgacgggacaataatggtgaatccgtgaatagggtggcagcaagcaagcaagaaaatgggagaggaaggtgaccggattctcgacccctctagctcaatcctccaaccgcgtgtcctcgtgcttgtaagttgtacctgtccatccccatacatgtacgggcttagcctggacgagggatgaagctctcaccttgcatttcgagttagtgtagctcggaaggctatgcgggtaaccaaattattaacgctattcgtttgcacttgtgcatgccaatcaggctttatgcaagtaaccagacacgtcttttagccttttcttagcaagagatggttggttagggagatggctaaactttgatcagctagggaagagctagctagcctgataaatccactgaacacttatttttaattacttggttagctatttttagagatggctagtctgatacgtacgtagtatctaggtaggggcctcttacaaatgaatattgtacttatctccaatttaagcaaccagaggaatatatatgcttgtattcgagtagagttctttcatagtagtagatgcttagttaggtaatagtagatgcttaacactaatattagaaaatgccccccacgtgaacgtctaaaatgggaaatgccccgtacgtgaaaacaacaaaacaactcatagttgattcatgctctcgagaaaacattctctcgttatttacatggtatctaaatagttatgaaaaaatatagaaaaaatcaaatagatagattaatatgcagtataacactctacaaatatgtagattaaaatttaacttttacaagttgtaaaaaaaattaaaactatgactagttaacgtatatccacaatattttttttgcaacttatagaagctaaatttgaccttacatatttgtggagtgatttatcatatattaatttattttattcatgtttttcttatttttttacaatcatttagataacttacaaacaacaagatttataacaactcttgtactccaccgaaacaagaacaatggtcccccacacgacagttccacacatatcgcacgcttccccttccctccgtcccttgagccatggcgcgcgtttaggctttgcaaagagccaaagccgcgcaaaaagcctacacagctcatccatgcagctgtgacgctgacgcagatcaaccaaccactactaccgcccgcaagctcacgcagctccagcactggcctcgtgttcgatcgatggacatggcggcctgcgtcgacgacgtcggcaagccgcgggcgtcgaggaaggtgtgcgtgatcggcgccgggatggccgggctggcggcggcgcgggagctgcggcgggaggggcacgccgtgacggtgctggagcaggccggcgacgtgggcgggcagtggctgtacgacgacccgcgggccgacgacgacgacgaagacccgctcgccgccgccgccgccgccgcgaagccggtgagggtgcacagcagcatgtacgcctcgctccggctgctcggcccccgcgaggtcatgggattctccgacttccagttcgtgccggccaggaagagccgctgcggcggcggcgacaaccccggcggccgcgacccgcgccgcttcccggggcaccgcgaggtgtacctctacctcagggacttttaccgcgcggcggggctcaccgactccgtcaggtttaacaccagggtggtgcgcgtcgccgtggcgccgccgccatgccgaggtggccccggcgacgcgctgagatgggtggtgagatccatggacgccggcctctggaagcgatgcaccgatgaccagatggcggaggcgcactgcgtcgaggaggtgttcgacgccgtcgtcgtggcccccggccactactcgcaaccaaagctgcctagcatccaaggtgcgtagcgccgacgagcgaccaaatcagcaaacctgctcttgtctcaggcagaaatcgaaatgctaatctcgccggtaattaccctggtcgaaatctcttaattaatcaggaatgggggattggaaacggaggcagatgcacagccactggtaccgggtcccggactccttccgcgacgaggttaattaactaatttgctgccacggctgtgatttgtgactaatcacaaccacagtgcccgttaatcttggattaatcctggcgtgcgtgcaacgctgcaggtggtggtgctggtgggctgcggcgacagcggcatggacatcgcgctggacctcctcgccgtcgcgagggaggtgcacctctccgccaagtctgtggaggcggccgcgacgccggcgatgtccaagatgctggcgaggcacgccaacctccacctgcacccgcagatcgagcgcctgtgcgacgacggccgcgtggtgttcgccgacggcggcgggggcgtcgtcgccgccgacaccgtcatgtactgcaccgggtaccgctactcgttcccgttcctggacaccgaggggaaggtcgccgtcgacgacgacgacaaccgcatcgggcctctgttcgagcacacgttcccgccgtcgctcgcgccgtcgctgtcgttcgtcggcatcccgaggaaggtgatggtgccgtggttcttcgaggcgcaggggaggtggatcgccggcgtgctgtccggccggcgggcgctgccgtccgaggaggagatgacgcggtccgtggaggagttctaccgcgccagggagctcgccggcgtgcccaaggcgcacacccacgacgtcgagcctcacgtaagcacatcccatggcggtctaatctgttcacttcttgatcgaatatttgaatgatcgctcgttttggtggtcagaaaatgtatgagcttggggagaagtactgcgatttcccgcgcacggaggagtggaagagggagctgatggcgatcatcagccggaacacgagcgacgacatggagacgttccgcgaccgcgacgacgacagcgacaacgtccgcaggtgcctgcaggagtggtacgccctggctgagcaccaggctcaagacgaagaagacccagctgccgctgctgcacaagcacccgtgcacagctcgctctgaagcctgtacagctgtgtgttctgtgctctgcacaatcataattttcttctacagagcatgaaaatttctgaaataaaacagagcatgcagaaatttcgaaatttcgctgcatgatttgggtctctgcaaggccattgcccaatgatacggccgttggatgagatagtgtgtattcgtttggaataagtttacattaggttcctcatcttgaaagtcaagtttgaatcacgtccttcaatcgcaataacaatacataatgcgtctctcaacttcaaaatcaatacaaacgtggtctcaaggtggtttggacaattgtttagctgacgtggcgccaatgtgactggtttaacttagtcctcatcccacttgacgaaaaagtgacactagaaacacgattaataattttaaaattaagacaaaatatgtatggcttataagtcagtaaaaaaagataaacaatatagtggggcccatatcttctacctctctatatcgtcatgtctttatccttctctcctttgcaagcggacgtgctctcctatctagccgccaccttttgatccaactcgctgttcgtggtttcggctcccgcacttccacaacgtcattgtgcgctttgccccagtgcctcgttcttcttctccgcatcatcaccagtttgccacaactcgctggcacaaccatgcaatgcaaggattggattgagttggattggagagagaatggcaatgtatttgtccctcgcgccctcccacctctcttgccttatgacctccgccacggcgccatcgtcgcaacagtctcataccccgcgccctaacaacttcacctcaacgtacgttgataatcgctatagccagatttggcaaggtacgatatcgttttgcttacactgggggtgattggccttggtctatgtcgtctttttgctcattggctaattagttactttccgttgccttgtggtgatgccgtcgccgtatcctcgtgctgcccagcctcgctggccgccacattgttgaaaagacctggtcagactaccacgtggacatcacataagataaaactggtgttgaaaccgttaaaggactcgatttgtgccatttttaatagctgagtaacgttcaatatgcggttttttgcggttgagggatgtgaatgaaactcgatgtattgttgagggataaagtagacttatttctattcgttttcctcccggaaaccggccagctacatgggctaatacaactatacaagcccaccagacctgggcccatcacatacattacggtcccagatttgccacggtcacacgcacaacctgcccgcgccgcctctaccgcgcggtcgaccaaacgctgacctccagggtccacccccaattgggcaattcggcgccagctgggggaggggccctcacgtacgcacgcctactcacgcgcgggtggtagcctctctcgctgccacgttgggccccaccgttgataaagctggactccagtgtagtaccacccgctaccgccactgccagcgtgggccttcaccttgacccgagccaagcgaaaccaaccgcggtcaaagggtgggcccacagccgcctgtttttctatacctcccctgctgctggccgtccgatccgttctcatctcaaatttttgagccgtcggatgtagtaatggggccttcgcgtaaccaccgccgtagcggaatgggagcgaggcgaggggcgcgcgcacacacagcgcgaggcaactgaaacgaaacggcggaaaaaaaaatcagcccaacaaatccagacgttttacccggagggaccttgcatttcctcgtaattacaagttcgtatccgttggttggacctagtaataacgacttgacagtagcatgccatcctgtttctttcctctctttcgagtgttgaaatgggggatttaaatgggttgccatatacattgatgctaagtttagcatcttgacaacaaaggatagttcttatttagtacttcaaatttctttaaccctaaacgtgagccgtcaacagtcttttcattttctcactataataaaagaacatcacttgttaacagcgtgataatttatttttatcgtcctcgtttgatattatgaaaacttattttatttttccacgtaacacctgtatgtagattcttaagtattgtttgtaataaaatgcaacacacaaaaaactattaatctaaagctaataacatccttctcgtatcggtctcttttcggtttttttaattgtttggatccttctagaaattggcgcgtgttagactactttgtaaaaaactcctcaggtatatataaaatcttatataggctctctaccacctaacgtgtatatagtataggtaatagatacacccgcacaacaacgcttgttcattggagagcaatgaaatagtagcaagttagcaacgttgataacaatgttagctttttaagattcacatatagcagtgtcaccacatatgtgcctatcaattcatccgtctgtcatgaatgatagaaatgttatgagtacgatgacacattaaaacacagtcattcaactacacttctcttcatgaatcgtttacttgtagatggtggtacggcatatttctcttggttcataaaaaaaatgctacatcttatctaaatctaaagttatcattgcatttaaaccaacactttcaattacaggattttaaatctacgttataccgaaatctcaagcactacaactcataacgttcacagagctagcgacattatcgagcataagcgactaatagtgtttcttcatgacctaccacttctttatacgccaaagacaatatgtagtgaaggtggcgacgatggagccagacgatctcccgacctacctgagagctgtctccgccactacatatcacccaaccaacttccattgatacacacacaatatctgaacctgggtgattaatgatgtttttatatgacctaccaatttgtttatacaccgacgataatctgtagtgaagatgctagcgatggaacccgactggtcgcccgacctgctaaacatctgtcgatatatgcacgctgcacgctgcacgcaatatctccaaaccacagggtcctctccgcgacgcggagaaacattagggaagttgggcttccgctttccacttccgccctcccgagactcgaagccgcagcagcagcagcggaggaggaggaaaaaacggaaacgagccccccttcaccccaccccaagtccccaacggacgcgagtagtgaaaaaggcgagagcgggagcgcggccgcgcccaccctccctccctccctccgcctccacccccattcgattcccccccttcccttctcttcttccctccccaaccgccactctcccccccaaatcccccacctctcctcgagaatggcggagtcgcaggtgagtggggtggaattcccaggcctccctcttccgttctactccgccgccgccgcgggtggtggtgtaatctggttttgggcgcgctgattgattgattgattgtggttgtgtggggggtttttgggtgggtgggtgggtgtttgtttgcaggtggaggggatgaggaaggcgtacgcggagatcatgctgaacatggcgcaggagtcggcggcgcgggtgctggcggcggagcggcgggcggcggcgctcgcggggggtttggcgacggcgaggaaggacggcgtctccgcgctcgtcaggctcaaggccatcatggaggccagggtacgccacgcccctcctcctccccttccgctccttaggtttttttttcgcttgctcctttcgttggttagttggttggttggttgggtgtttccttcgggtttggttgttcgtaggtgtggttgcgatttcggccccctttcggggattgcgagtttccgcgatttagggaggtttttgggtggtggtatttctcggaattctggtggatgcagattttgcgtttgaatgcggggatttggagttcgaattagagggggtttcgcggttccgtactctgcccaaatgttggttgggaaagctggtgctagtgctttttcatgcttctgcattttggtttatgcagtggtgttgattttgcacagccttcaaagtagaaattttcccttttcggtatctatttcggcagcctcgagggcaactaggctaggctcctttgagtgggtggtagaggggggaatggaagcacaagtttgtgtttgtgctctaactcaaattggtagattttgggttcctcagttccccaaagcatgcaaatagtaagattgttacaatgagttttgagacactagctttggtgataactgataataggtacataacgttcccattttaatgtagtgatgaatcacatttcacttctctctacttatttgtgcttttttcccctgtggtagggtgatgcatgctatttctatttgctgttatacattgaagtgtagtgaactatctagatggcactggtatttttgtgtgtggccaaatttttgagtcctgagagcaacaataggatactatatattttacatttttgtttataacctgctgataaaccatgctcctgcaaagagtgttataatacaaaaagaacactagtgcaatataggctaccatgttgtttatgcaattatgccaatttatggggtaatctcttagtacataataatataattccgatagctgattgaaatttaattgagcaattctctcaactttagtaaaccctcatttgtaaattacattaccatattttgttctcggttgatttctgcagtgcacaatttcttattgggaaatcatatgttgtagcgtcttgcctgaactttttactttttaagtcaatttttcattatccagtccatgtttaggtcatatatgtgtatatggtcaaggtttatgattgttccataattgttccaaccagtcattgtgaccttgatactttattgtattttaaaatgtagtccgtgtttactttgcgtacaaggcatcaaattgatagtgttattggccaagtctgtaccagacatggtctcctgctgctttttagtaccttcagtctattggtgcagttctgctaacaaataataactgtagagtttctttcagtttgtgtaaagcccagggtttttgttggatagcaatggcagaaagtctgccatctttacaaaagttagttaactgtgataagctaactgccctgttgagacctttatttgttatgatggttctaagaggaatgcttcaaagttattttaaatcttgtgatttgaggcaaatttggatatttgtaacaccactattgtgcctcatattggctagctatttgttaagacaacacatttgtgatatgtatattaattacaataactccatgttctgaagtagtggttcttctacctatattggagtacttacttagggtgagtgcagctgccccataggtactctttggccactctagactaaatgaactagattccattcatgaagttttcaaaaattaaatgtagttcacttagttgaactagagtgggtcaagaagtaatcgtgagttggtccttgctcatccgtactatactaatttgtatcattttcagtctttctaaactgttttctgtctgcctcgtgctgtgttcaacattgtgttgaagacaatagatgaaaagaatgcttatccgttaatgtacttgatctgtttgaatggtgaaatgttatacatgtggtggcgcttgtattttgtgatatattttaccatggcctgtgacctttgttccatttgttcggaacaacctttttcaattaaattatagtttttaaatctttttttggtaggtagaaccattgactatgtattagggctatccatattatttgggaaatgcaaatcatggttgtaaaattcattatggattctaggcctataacctggatgattgccgattcctgtaatctattctagtactggtggtaggcccagtcactgcgtataaacatatgcatatgggcatgtacgtgttaaagattagaggacaatcatcactctctgtttctgtaggccccttcttttaccagcaaacgtagcatgtctaaataaacttgatttgtttcccattaactaagcattaagggcctgtttggttggtgccctgaaggatatttgcctgaccagacgtaagcctgagaccagccgggaccttgtttggttggtgccctgaccttagtttctccttccctggcctgagctcttttggagcctcattagcctgagtcaggcgaccgttttcggtcgcctgagctccagggcggcgcagctacgctcattaatcctaattaccgcttataataatgtagtataggtactgtagattgtagaagcagccgaccatacaaatatattttatttgtgctttcaaggagggatacagcccatccaaatattttattttttttctaacactttataacaaccgtaataattaaaagcttaatcacgtttagttttcacaggcgcggaagaacaaccaaacagacaagtgttcaggctgcctgagcaggcaaaatttatcatcctatcaggtagctctcaggcacccaaatttttcaggcatgtaggtgtgggcatcaaccaaacaggccctaagtcataaaacagccttttgcctggttattgtggcccagtgttattaaatataaatgcatgtatactcaaatttgattggccggtctaagtctgtgattgcctggattgtcgcctgaaattttcttatctcaccattttaaaggcatacaaacgaatcataatatttaagagggatagactatggattcacaaataaaatgagaaacgcagtaaagcaacatcacagccaccggttaagcgtacaaggttgccaaaccttgtcaagaattgtaagcagttgatttacatggttaagcatgagcatatgcggataagcggcccacttacccggttaccccacatacaaggctgattaataggcccatgtatgactttcatttattaaaaggcccatgtacttctgtatgacttttattctttaaacctatgtttattgttcataaagaaagatgtgcctcgcatgttagactaaagaaatttaaaatctcttacacggccactttccgcataagatctacaaggtggggtgaccacactgcacagctcactgtcttagaacattgaagaaatttaaatagttaacctaaaaagaattgaatacacatggtatcatttgaaaaggtcaatgctgattacatatggtagaaatccttgtagtttattcaatggcatataagtacttacaaaaatcatttggtaaaaatctggtgattttgatcctcttttgtcctgcatcatatcctgccaaaaaaatcaagttgagttcccttgcagttatctgccatttataacatatcgctaatcattctttcgttgtttaatgtgtaagtaatcagggagagatggaaaagaccgccttccatttgaaactctctagatcttatatattttccagcaatctatgtcaaaagagcgtgatggattgggtcagtttgctgggccctagccaggtggactcgctaccgtgccaagggctgggcgtgctagttacaagggttccgtgcatgctctttattttatacccaaaaaattaaagacactgagaaggggctagggtaaaatgcgttggtcagcaggattcacatgctggcaacagctcatgccaatttgatttaaaaaaagttacttttttgtacataaagcagcttagttatttctcttttgaacttgctttgcaatcatttgttccaaatgtttacaactttaaatagatgtgtcctttctctcatgtggaactgatgcgtgtcaaaacttgtttgtacatgtgcagataaaagaagcagagtcacaatctttggcaaacattaataagattaaggaactacaagagcaattacatggtgctcaagatacagtggcctcccttcaaattgaactgcagagatcaaatactgaactggagcaagcaaggagcactttggctgaggaaagaagaaataaccttcgctcctgcaataagatcaattctaataaaaatagcagctcttcttctagaaagcatctacaaggcagagtatcctcaaagagtaaaaatacggcaaaggaaagtggagctgttgaaaacttggagacactgtaccgttgtgattctgatctgggttcattcatggctagaactaagaatcctgagctgtatcgcaatgggtgtacacaacgtatccgtgcaatcaagcagcgaagtccaaattcggatacatccctggtagaaaacagcaagcaaactagtgcactgaatagccgttctaagactggaaaaactgataccaacagaaacccacagagcacaaggtccatcatggaacagatacttcaaacaaaatttctggccaactgcaagagaaagagaggtaggcgaagcaggccaagttacatgcatgataattctggtgagcatgggcaaacagagtacaagtcgtctgatacatctgatggaaatgggtgtttgctgctacttcaggctcttgaacaagatctttcacctctaaaggcgtcttctggaagtgttggtgagggattagctgaccagaaggatgaattgctcaaggatgaaaaggatgctgacttgaatcttcaccctgcttcccctggaccaaatgatgtactttcagtaaacaacatgcagatgaaaaggaggaaaaggtctaagactatgagagtctttgaatctgattttgaggcaaaagctgcccctgaatttgggaacaccctgccaaaatcaagtaataataatagcatgctaaatagtgaacagagctctgatccacctgctggaaacaatggtcctgttttgcaatgtactgctgaaaacttgatgcacgtgactgatgctgcaaatgctgatcaattaaagtctgagaacagctccccgctagtccctcagtcaacagagagtgaaattggagatgaaggtaccatttagaaactttgtttttttaatttacaacatatgcctctgttattactttctgaatatgtattgagccctgagcatggttaatatgatgcaggtaactcgcgagtggatcacaaagagtgtagaacaccagataataatgcaatagtcttggaagaagtgaatgtggataaaagctgcattattttagcttcagatggagctgattcttcgatagtcagctccctggacaaagaagaaaatgcaaaagaagcaacttctggagttgccgtgcaagctgaaggtgccagatatatcaaatacacattcaatcgcaggaaacgcaaggccgcgcctttagacagcactcctcaaggggctgtccctgagaaaagcagtagtgtggtttgcccatctgagaatcatgagcctcatgcaaagcctgagacgcaagatctcgtcatagagtcacctccaggtgacaatcaactaatccatgttgcccagcaggtatgtgctcctctttacatttggcaccatgtgtgaacttgttcaacatctctgcactcgcttctgaaaaatattctcaccgtccaaaaccgtattgtttttcagctcatattgctgtcagcgcaaaaatgatgaaaattttgtgatacatcaaagcggaaagagggattggttcgaaagaataatgcttaagggacggctccaataagtggatcatggatcgtttgataatatgctaaatgcagttgagttcttcaacggagggggagagacttgtggtggtagcggcagagaaatcaagaaagctagcttcatagtgtagttatacctctacctaagaggtgttattatagtagtgtataaattaggcaggagttactatttattttgtagatgataaattttgaactattggtttaagaaggttataaattttgaagtggtactcagttattaagtcggttcaaattcagaggtgaaacatctgctcatgtaaagcaacttacttttctctagttttggggaaaattttggtcatttgatgggaatattcgcgcagatcgttgcacagtatgtgtgctacgttggaacagtacaagatgcgggggttcaatcaccaacgcgcgtgcattccatcagaagtactctgctactttatggccatacaattacaatcgatcttccgcgcctatgtaacatggggaggtgacgagttagtagcagtaaccgtagtttttttagtccatcacatttatgcatttacagtctatgaccgtattaatacttttgaaaggtatgttattcctcgaaatttcttcagtgtaggccagtatgctttatcagcccatacagatcggaaacagtacagttggacatcttaatacaactaaaatagttgaagtatctagatacagctatggcattataacctgaacccaaatgataaatggtatttcgtccgtttcactgtagttgccataattcctctttatagcgatcgcagagggtaaagctgaaatagccgactcgtaggtcgacttgagacgatatatatatatatatgcttagatcgttgatgcgtttgtcaatcgatcgcgttgtagcgagtgcgactgattgattgcactaatgaacaactccatccatggtgaaaaaaaaaaacaatttctaactttgaatctatacaccctctatattcaaatttatagtcaggaattgatttaattttttttaaggatggagggtgtgctcaagtacatatctttctgtgccgctagctgaaaagcagcctgaactgaaaacattcaccatatcatgcataacatcagagtcagacacatcaccatgctctagcctactcgatttacttcaacctaaacatgagatatacctccgggtcgtactttgattcaagatctgcagtcaagtacacttctacaatactcactccgttgaaagatacaaggcagggtttcacttatcgcatgataatcacacgattatcgcgggggtacggtaggagaaatcgacgatatggtttggatgaattttgaccaaattcaaaattccggaaaaaataaaaaaaaattgaaaaaaaatcatggatatggttcttgatttgtaattgtcaatggtgaagaatttttttgaaatagagtaagctatattcaaatttgagggcaaaaccgagaatagtttacaaattagaaaagggaagataatattgggccttaagtatcctacatattcttccaattattcttaatttctagttttctacacatattcaaccgtattttttatttttttcccctatttattttgtatttacataatttcagctacacagcccgcgataatcgtgcgaataccgtggttatcgcggtaaaccatgcgattatcgtggtgaaaccgcgaaaccaccgagttttgaattcgaatttttggatgtgatttttgtgtgattttagacgattatcacgcgattatcgtgtttatcgcgctaccgcagggtggtggttatctcggcccaaacgataaggtaaaccctgatacaaggtctatcagttttaaatagacttcaatactgaactttgacagttattttctttcaccatgtttcatcaatagtacaaaattaacatgataagaaagcatttatataaatataaatccaatggtatcacttgtgtcactaaacatattgtattgcctttttttttccaaatacataacacaccttctatttgattcaacaaatgaagtagccttgaaaagggcaggggaggtccttaactagtaaactctgacattgtgtgcaccacgatatcacattagagcacccttggtttcaatctgtaaatattaactgtaaatagatttgcataatttcactgtcctacaatatggaaagggaaagcataaatcttaaagcacaatttatgcacatggaagtacctaggttattctgttgatcatttgctacccaaaatttcagaaaagagggtaaattagctcaacagaagcaattgtgcatgagatacgcaaaggaatgtagtaccattcctatgtggtcacctaattagttaagtactcacaatgaaaagacaacaacttcatcatatgacggagataatttaagtagcaaatccagcccaacaaataatgaaccgtattttagagagaaatagaattttaaaacaaaaacgaaaatatcttgtaaaaacagcaatatcaaatcctttatcaatacatttatacactgtccaaagtggtaaacaaacatattttcttcataatccagaacaatatgaaacccaaagcgaagaaaaagaatgcaccatatgagaagtaaacaaacatctttaccaagaaaaaaaagtccattttacttccccgaactatttcgcctgaccacttagccccctaaacaatttttcagctcattaaaatggacctttttctttcaatgaaatgaacttttttctttcaacaaaggctgatcttacaatataacccatatgatcgatttaggaattcaaggtttatcaccgtggttacatgttaacccattcacccattcactttactaggattttcaacaaaggttgatcttacaatataacctatttgattgatttaggagttcaaggtttatcaccatgattgcatgtggcttactgctacctgatggtgcttgtgcattctatgaaagtaaaaactaaataccaagagggaaggagcaaggtaccatactcaattcgaatgactgagatttaattccttgggtagatatcttgaaaagatggagggaaagaattactgatgagcagcctgaaacatgagccaagcgatatctaatagaaaataatagcaaataacaaaacaagtaaatgttgcacgctggaacagaaaatgacctggaaagagatgcatttgtccctagataacatactactagctccgtcccaaaatacttgttgctttattatcaaaagtactttaagtatcacttatccttttttatatttgcactaatttttcaaataagaggaatggtcaaacgttacaagaaaaaagacaaagtgaccactaatttaggacggaggtagtactagataaatccaatttaagtacacccatagacaaaggcatgcataattcgtcaatgataagattacctattaagaaagaccagaaaaatgtaactagaaagtgcagaagattgaaagaaccataaagggtttacaagctaatacaacatagttactgagtagataatgtggattgtggagaacaaatagcagatttcacaagtcgacaacaaacaccctgtatagctattatttatagactcccacaccatgaataacaaagggtcctctcagcaacatattcaccatacacaaagcaaactcatcaaaagtcaacaaattactggggaactttctattacgattaaacagcctatgccgatattcacatttctttatatgaaaaggcaaacgtaggtaacataccaaacagtaccatgcatagagaagaactgtgatgattaactaggtcataaccctgccatcttagtatcttggacccatactacaagaacgggacagacgtaaattccccatctcacgttcacttccaaccgtttctccacctgaagaagctgagatgtactgcttcctgcaggcaggacagcgcccatctgcctcaagaattctcttgtggcagaacagacacagatgaaaaccgcaggggcaagggaggaagcttgaatctgttggatcaaggtcctcgtagcatatagggcaggatgtcggctttgaggggactcccttttgtgcagatcctatccccattgccacccaacagttacccatgctagctggaaagctgacttgtttggagaggctgggtaaactctgtggacggaatgcatcatctgggctccaagctcttgtactactcttgattggttcttgccttgttgctgcattagcgggcactggacaagatgcaggtacaactggtggatctgccggcactggatcctggtgattatggttgtcatccactgagagtgcatcggcaacagcttcccaatcatccaaaactccatcatcatcattctcggggctaccaccagtgtcatcgtcagaatcagtcacactccgagagctggaccaagcactgctgccgctgctgaagctacggccaccaccattgcccgagcagtgcttctgctgcaagcagccaataggagggttgtaggagacagggctgtgcaacggagactcatgatcactgctaccaacatcctggctagcgccaactgaatcctccttgaaatcctctggatccccttccctcgtccgaatctctgcacgccggcgagggagtggagggtgcggggatgcgaggatcggcgacccggagttggctcctgccgctgctccaggggataccacagccttcacctccttcccatccttcactagaccaatccaaacagaagatggatcagattctgagcaaatggccaaatgatcaactaatgattgaagctttctcaccccagatcccaaatcaagcaaaacacatcaaaatgggaccaaaagaccgaaacaaagattccaactttctcacccgacagcgcagaattcatcaaaagcatcgcctaaaaacccatcaaagcaaaaaaagaatagctctctttaggcagactccaccaatacaatgaaccgaatttgagggcaaattgaaacccaagatcccaatttccccccccccccccccccacccagatcacctgggccgacccaacaacatccaaaatcaaacatgattgggaaaacaaaaaaaaaaaacagattaggagcgcgagagatcagaccctgcaaaagccactgctcccgccgcacgtcgagcttgctctgcttcagcttcgccgaccgattcccctgcaaaaacagaaacacccaccaccaccaccaccacccaaaaaaaaaaatccccacggatcagcacccccatctcatccaatcgaaaacatccgaactcgaatcggagagaaccccccacccttatccgcttcttcttcgcgtcgcgcgcggtcgacggtgaggacgcgtcgtgggccatggcgtcgtatcccatcccctccccttcccttctcccttctttacacactgccgcagcacacacgcgctcgcaacctcgccgccgctggagccggaggaggaggaagaggaggaaggagaggaggagtaaaccctagcgcgagccgagacgaggcggaggaggaaggaggagcggaagctgcagctgatgaggataatacggcgtggagaaaaacgagtcgatgagctgacgcaaaaataaataataataataataaataataattaaaacaaaacgttttctgcttccgcacgacgagctggacgacgacgacggcggcggcaacgggagaaatgacggaaatgccctcctccgccgcggcggagcgcgaagcggtgtggggatgcatctgggccgtcggattgatacggtcggtgccaatacgtgtggccgggcagcatgccacgtcgtcagcattagtaagtgagagggaggatggatgtgctggggagaaaatagaagtgtttttgttttgtcccgtttagattctaacttttttttttcaaactttcaacttttccatcacatcaaaattttctacatacataaactttcaacttttttgtcacatcgttctaatttctttaaacttctaattttgatgtgaacaacacaatccttgttgaaggaaaaagattggaagtggttgcgtattctgtaggattttctatcacacttttcttttcaagagttgcagggttgacctacaggagatatgattagagtatttggtagtacgtcgaatgagttttatgcgtctcgaaatttaagtaaccattcaatgcaatgtcctaacataaaaaaaagggtgaatagccaaagtggttctccaagtttcatctgagactcagtttagtccttgatgtttcaatatatccatattagtccttcaagttttcactttagttcaaacttatccttgaaccaacaactctcttcataaatgacacttatacccctcatcattcacatgtataagagagaaattgcatgcttgaatttttttatagataatgcatagtatattatgtaaaacgaaaaaaattatgtactagcaagtgtatacaatagcaattgcttaagtttcatgtgcatatgttgaaataatgggaagtacatctgtaatattgtttattcaggttggctttctcttttctattctagtatatagatgtatacaaattaagggcaaaaatgacattttctaatagaaatattgactagaaatagccatatggcatattaagtggacccaaggatgatttcaaaccaaaacaaatatttgaaggatctatgtggacaaaatgaaacgtgaaggaccaaattgagccttcgctgaaacttgagggactaaattagctattcacccaaaaaaaacttaaaatatgccggacggatatgatttagtagtgcatgcgtaactgtgtagatataaatgaagatgcaatcctcactgacttatacaacgatagtggtatattcttaaaaaaaataaaagaagcattttcaatcctagcaaaaagaaaacgaaatttaagtagttattatagtgttattacattcttttataaactacattctgatacctatagcttctctaagaatcactctaaaactacattcttttataaacaaatgttttatggtctatttacgggagtttctgatacctatagcttctctaagaattacaaacttccataaacaaatccatttttctttgttgtacaaagaaaatgaacaagaagtcacaagctagttgcttaagttttaatttttttttcaccatctagattctcacgaggtgcttctcgtaatataaaactctacaaacaagcccttaagtaaaactacactcttctatagatctttgagagagagagagagtgtgtgtaattttatcacaatcaaatacatacattttccatgtacacttattatactatattcctcgtcataactatttggcgtgcatttagaattcacctaagattttataattaaccattaattttatattaaataagttataaatctaatacatttatgatattatgatagtacttttcaaaataattgtgcacatattgtttttatttttaaattaattatcaagaagttatcgaggataaatgtcctaaaagtttaaacatgccttgtcataaatgtactaaacaaagttttgaatctacaatttacaaccaactaaacctacaactcaacgtacaaacatgtcacgtcatcatccactagctataattgcatatcaaactcacaagcatgtaaaatcatcgacaatttattgagttctacaggtcatacatgtatatctaatcatcacccctcatatcattttcacaatatttcaatatatctattcattatttttacaatacttaacaaatatttatcaacatattctacatcaaagtgcgaggtactatttagtttgtttcataattagagcatgtttggtagagctcgtctggagtggagttgtggagctgcctaaatctaactccatctctctagtttattttgtgagagtgctccacctagctccgctcgtttaggtggagctaaaactgtttagttggactctaactccaaaaaggatggagctggagttgaagctatgccaaacaaaaatactaataaaaactgatcgtatttaacaaaccgatctccgacagttaaaaaaaagcgagctgttttagtgaaaaccgatcagttttattaacattgacaatgtgttttcatagaagtagttctgaaagcaaaattgaaagctctgggaaatttacaacacttttttttttcaaaatatcttcacttggcaaacattacctcagctcatctatctccattaacatttttcaggagattgaagctagcatcatatcatatcatacactgcactctgcacgaaaactgctacgcacactacctcaaaaacccaaacctctatactacgattgcacactaacattcgtacacactacacgtctacacatccatcccttctacggcctccttgaccacgacgaagtcgtccatctccttctcctcgccggcgccgccgtccttggcagcggcgggcgccaccaccacggcggccgtgccggcgggctgcttgtactcgtggcgcctcgcgaacacgaggaacacggcgaagttggccaccccgagcacggccagcatccagtagaagaggtccagcctgccggcgtcgaggtcgttccgtatccacgccccccgcgtggcggcgtcgacggcgaagacgaggaagctgctgaggaagaatcccatggacagcgtcaccaggaagagccccgtgctcatcgacttcatccgctccggcgcctcgcggatgaagaactccagctgcccgacgtacgcgaacgcctcgccggcgcccaccaggaagaactgcggcaccagccagaacgcgctgatcatgccgccgccgccgccgtcgttggcggcgtcgcgccgcttcttctcgacgagcgcggaggtggccatggcgacggtggcgaggacgaggcccgcgccgacgcgctggagcgaggtgaggccctgggggcggcgggtgaggcggcgggccgccggcacgaggacgcgctcgttgagggaggtgaagaggaggatggagaggaagaggaagacggagagggagcccgccgggatggcgaacccgccgggggcggcgcccgggcggaggtggcggtccatgcgggtggcctgctcgacggagaaggtggtcatctgggagtacaccgtccagaagaggatgcaggtcgaccagatgggcagcagcttcaccaccatcttcacctcctccacctccgtcaccgtcgccgccggcgccgccgatgtctggttcgtcttcgccggcgacgctgccaggtccgcctccatgatggccgccctgtccaggcacctgcatggcaaaaacccagtcagcaacgtatgtacggatccaagtatctaacaagctaggtagcaagtaaaaaaaaattgacacgtgtgtacatatatatacgacagagatcatcagatgattttcagttgtgttcgtgttagcaaaacgcagatgccagatggatgtgaataagtgattttcagatggagatttaacaatagaatcgttcttttgataagtgtctctctcttcttcgatggtggccggattttatccattatacaaaaaaagatggatgtgaatgattgggcatcttttgtgatcaaaatgaagcgaattctttaaggatctgaacttctctagcaatgcacgtataggccggccggtgcaccaatctgactgtttcagatatgcatctcgagcctcagttaatgcaatttgtgttgtgtacacaacacatccctgtgtcaccaccccacatatgctcgcgggcacaatgtcaaatttattctttttatttgcatatatgaaatttggtttacatgcttattaagtgaatatatcatactaatacatcttgtattttttttatatatttttacttttaggtgacggaaataaacgacaaaaaatccacctctagactactgaattcacggctcgtcactctacttgtgatctgcttcgtccatcagccggccgcccaatttggtgaatgttatctctaattaattgggtgtctcacatactaattgggtgttctaatcaattcgatgtctcactcactttgaccactcattcatttcatctagtaccatgcatgatttgctcttgcgtgctgtgttagcaagagggcgaactgagttgtcgtcctcagcttcttctctatagctcgtgtccatctcagccttgacagtgacctaaccggtgaagccaattaagtaccgtgctaataatagattatagacttgtgatcgatagctagattaaccctcatgcctaggtagaagtacatactactagctagcaagctctaccagttcacatcctattggcaccagttgatactaaccatggaaaggctatgtggctagagctgaaaaaacggagtgttttgaaagctcagttctgccatgtattttcaaacgatacgatcgattgatagaatttaaatagcaagcaaatgttttggcaaaatcagcagccacaagaatccaatcctgaaatctgaaccctgatctcctatatgcaccggttgacagcagcagtattgtactatcagcagagcacatcgtgtcacgtaaactctgaagaaataacattcatccatgtctacttagcaatataatgcattttgcatcccaaccaaaacatgtttcttccagctatatattaatcaatcaacaaagctaggacagcaacgagttaactactaacggatgatgcctgatgacaaccacgagtgtatgatctgaagctaattttctatagtcgaggagatcatatatctaactgaactttgtatattattaggagaaaagagaaccacgtggcgattatacattctacggtttgagactgaggtggtattcttttcttctgaagatgaatattaagttttttttacgtaaaacgagatgatattaacatataattgattttgagttttaattatttcaaatttaaaaaataaattaatatgatattttaaagcaactttcatatagaaagttttcacacagaacacaccatttagcagtttgaaaaacgtgtcacgaaaatattaatctccattcaactcttgtgggagaaaagagcgggatctcccctcatgaaagattgtgcgttgattacctgaggcggtcggtgtaggcaaccttggatgtgtggtagccgtggagctcgccggcgtcggcggggagcggcaggcggcgcttcctccacgccgttgccagcacccgcccgatcacggtgagcgggctcccctcggggcggcggtaccggtacttgggcgtgccggcgacgaggacggcgacggcgaggaccatggcgacggcggagacgccgtagccccagccccggccgacgttgtcctggacgtacaccagcacggtgaccgcgaagagggagccgaggctgatgcagaagtagaagcggttgaagaagaacaccatggcgcgctcctcccgcgggtcgccgccgtcgaactggtcggagccgaacccggacacgttcgccttgagcccccccgcgcccgccgcgaccgtgtacagcgccgcgtacagcatcgccagctgccccccgcgcgccggctcgcaccgcaggtgcgccccggcgccgcgcgcgtccgcgcacggcggcggccgcatccccggcaccatcgtgtccaccgtcagcaagctcaccccctgcatggcagcagatcgtagtgagattcctgcaccgcgcgaggatgatcgaagatgtgttgttctgtgtgtgcgagagcgagagcgtacggtggcggcgatggtggcggagatggcgatggtgaggtagcggccgagcttggcgtcggcgaggaagccgccgacgagggcgaggaggttgagggtgcccatgaagttggtgacgatgttggcggacttggcgttggagaggtgcaggtcgccgacgaggtacgtcaccaggttcatcgagatgcccatcacgcacacccgctccgccagctccgtccctgcaaattaacaaccaccgccgccgccatggcatgtcatctcgagctcaaatcaaccaaactttttcccacgatcgaactcgcgagtcgcgaccagcagtgaagacgacgcgtacctaggataagcccggcgccgagccatcccccggtcttggacttgtccaccgggttaccccggtagtcgacaaccatgccgtcgtcggcgccaccaccatgacctcctccggcagcaacctgcacaaacatacatccagcttaacaactcaatcaccaaaccaaaccaccaatgaaaacatgcatgcactgtcggtgtgtgcgtggtggtatatattttttttctagttacggctttataggcttacaggattgtaatcttgttatttttttcctgctctaatagaacttcgtataaaaaaaatacatgcatcctgctgcatgcacagatacagcacaagcaagcattgtttatgttaccattttcttctgctgctgagatgcactgtctaccgctgctgcaagcagatgagaagagaaggcagcaggcacaggatagtgaggagagaaaacgtttgtgcagtgaggatgaggaggccggcctgatcgatcggaggatttatagagtggaggcgtgcagaggtggagaggttttgatcgcgagattttctctcgcaacttttttccttttccgcttgttggtttcgggtaaggtgaggtggacgagatgattgctgcacgtacgtacgtacgtacgcacgctgcctgcccccgcctttggcgcggaaaggacaagtaggtgatgacctgctggcgagttgtgtcgtgtggagggtggcctggcaaaatctctgggtgagggggattttgggccacggattgcagggctgggatcctctgcatgtgcggccccggtgaattgaatggaggtgtttggtttccgtgtcttttattatctacagtaaattggattcatgtcattgcaaatatacttatttagatgaatactttataactcatctatttgtagccatgtcactatcatcacgtttttcatccatctatttttttttccgttttcttctgtcttcttcccttgagcgatggcgatgaggtggcaacacggagaagaagcacagtggtgttgtccttgccgcacgacttgcatgaccaccaggccgtggtggtggtgtcgtcattgggtactgcagcggcgtccgccttcatctcgaaacagtaggactgggcattgtcgggcacggcggtgggcagtgttgagctcaacttccttctcaccacaaccgtcgcgctgttgacgccacgtgcaccaacgcctggcactactgcttccaggcctgctctacaccaccacgtcgacctctgtattcgctccaccaagtggctcaccgacgtagcttctccagcctggcgtgcatccactcgttctccatccgcaccaccgcgtcaatctctgctctttgcaggcacaactccgacactagtgcatctcccaccgctgtagctgaggcggccgaccaccctactcatcgacgtcatcgtcgactccaccagtgcagccgacacaaccagcttcatcatcctcgagatcgatagcagcaccgcagacgataatgctattgttatagcaaccacctgctgccaagaacattgctcaaggaaaaaggacgggagaaagaaggaacaaaacagaaaagaaaaagaaaagatggatggaaaacgtgacggccatgatactattttttttataaaattttatgaaagggtatgtagcctagtggttacaagagcatttaacggtatcgcactttcagtggtaggcgatgtatacatcgacagacgagtcttgttaatgaattactgatgttggactgtttagctaggtgaattaatgcacagaaacagcatctattttgcttaagctggcttgtttacaaaaaccgagattaggagacggcgtcgcaactcggcacagccaccgcggggactccgtcgtcgccgtccgtcctacgtgtgcgcgcgcggcaggtgccgccccgcccagcggcccacacgtgcgccagccgcgtacggcaccccggccttcaccacccacgtgccagcctcgggttggccgagagaggcgccggacgacgtggacaggtccgtcctccgtcaagcagggagccgagccgaggactgcggagatggacagcccgtctgctgtatgtacgcgcgcgcaggcaggtccatgtggctgtggcctgtggcacgctgaaaatctcgccggtgaacgcgagcagccaaacagcccaaccaagtaaccaaactgcatgcggtgggtggcatatggctagggtgcgcagaaaaagatcgaaccaaaagactgaaccgaaaagaccgagaccgagaaattcggtcctaggtagtgaaagaccgaattttgttcggtcaattcggttagtctcatcggataaccaatagaccgaaaagaccaaattataaaaaaaagtctaaatgcaacctacaatctactatgtttaataggattaaactctaattttcacatccctacttcttctaggcatgcagcttaataggagtctttactcataagtgcttacgaatttttttaaagatttttatgttaaaaatttccattatttctttgcatatatgaaaatattgttgaatttcggtcaggactgagaccgaatttgtcggttctgacatttttgcgctgaaattcggtcttcactttttaaagaccgaagactgagaccgaaattttcagttagaccgaatgcccacccctgcatatggcacgcaggcgcagcgttctttttgtcgcgtgttgcatggctgaaatgtttttttttttctcatctgcgtggtgtgttttttttcctcttcggcgtagggttgaaaagtcaccggcacgcaggcatgtggaggcagagccgtataagcgtacaaccacatggtattttaatttctttcgaaaacgagccaccacatgatcttttgctcaaaaccggcaggggctctgctccgccgctgcgacgtgcgtgcgtatgccatcttcttttgtctcttctccttttgtggccgtgcacgcatcggcgcgcgtctctgtctccgtggcgagaacgcgtcttctgaaccgcacgatcgccggctaattccacgccgtgtactggtgtgtaactactcctacgtggtaatgcatgatgcaaactacagaacttcatttgttccaaaataaataaatttaatataaaatatgatacattctaataccataaattcagcatctgtaatactataccaatcttaatatcttatactccctccgtattttaatgtataacgtcgttgactttttgacaaacgtttgacatttcgtcttatttaaaaaatttatgtaattataatttattttattgtgacttgatttatcatcaaatgttctttaaacatgacataagtatttttatatttgtataaaatttttaaataagacgagtggtcaaacgttggttaaaaagtcaacggcgtcatacattaaaatatggaggcagtattaaatttgtttactttaatatgacttaatatagaagaaaaaactccactaggcatgattatgccatgtgtcacttgatgctgcctagtcgtgaccatttttgaaaggatccatttgtcgtattgaagtaggagcaactgaggaaggcacaacggcagattttttctgtctccttttttgctgatatttttgttctcataagcagcatatgcgagctttatgattaggcccggtcgattcacgataagtagataagaacacacaccaaaacatttatcttcattttattacaaagagacggcacagcagcacaacgcacaaagagatgaaacgatagctcgtggaacacttgtaagcaaaccgatcgaccgatcatcgatcgttagcactgcagcacggtcactcgtttataccttccaacatctcttgtcccaatctttatcacgatatctttgttttatgctttcccctttgggtcatcctaaaagaagaaaatatagatatggcctaatcatgatatgttcttgaatattctcaaaatggacacattaccccatctagaattctagatgatcaggtcggcacatgcctatggattaaagcatatgctttgattttggaatatgatatgcatggatgcttcaattaaccagcctatcacaggggtgaacagtagtggacgataaaaatgaaaaaacttcaccccagaacaaatagcaaagaaattccacttgattatttgactcacacaacctgattgaccgtccggatgtttattagttattactttctccgttctagaatataaaaaattttagagttggacacgaataaagtaggtagagttaaatgaaaaaagttgtgatggttgagaaatggatgtagatgaaaaaagtgaatagtggagggttatgattggttgggaagagaatattggtagagaagttattatattttaggataatttttaagtgttagaagttgttatattttgggacggagagagtacctctaatccttgattcttttaaccacgactacgatttcacaaaatgtcacacctaatgacctatcattagtttagctctgggttctttttttttttcttttcataaatattacaacacgacatcccatccaaacgatagctcatatatccttttttccctagctccctcttcctctcccactccctcctgcctttccccacttcctcctgccttttctcctcttatgcagggaggccgtcgaggaggacatcacctaatgtgggctcctcctcccgggtgcgttgtcgaaggtgattgaagggagaggccagtgaaagctactagatttggagcttggtcagcaacaatgtagtggtgatgacatcatgctccttgctagtattgtgtgcgggtacatcatgtagcgcagtagtgttaatgtcaaaatttgataagcccgaaatcatcattagcttagagtcaatattagctttagagtacaggaatcagccgatggaagtcgtcaagtcaccagtagttgtgttcttgatggagtcggatcaattaaaagaagcttatctagaagagtccgagttcaaggataatgcggcatggcaagttatctattaattaggaatagtttattagttttcttttatctttaagaaagtgtgtttagtgtctgataaggactttatgttttccttttatctttgggaaaatttatttcttgtcctacaaggaatattatctccccatgggtataaatatgtacacccggggtcattgtaatatatctctccatcaatacaactgctctcggcgcatcgccaccttctttaccgaggtttttacttatcatccgacggaacttggcacctgacgcggggctgcattggtttgcgatctccggcgaaggggtaagtcctacgttctgccggccctggtgaatctattgactacattagtgttgttcaaggctgcatcgcttcgatctcttggatcgctctggtttggttgatatatttgcttacctgatatctcaattctatctctaattgcattgtgtttagagacgcatcggtttagttggaactgtcttggttaggtctgatcttctgtcttagccgatatatctctacaatcacaatgctgttgtaaatagatttgttatatccatcacattagacagatctatcggctcatcgagtattagattatcatatacaatctcgtgatgcatcggttaggttcgacctactagattgttgttgataatataaatcttgttaagctgataggttcatgctaatgttttatcggggtgctagccgataagttatctggacgttgcatcggcttgtaaggattgcatgtatatataagttggatttagccgatcgcaacaaaggttttactgtttaatctaatcttgtggattttatgacatcagacatccagccgatgtatgctttaacctttggatcagtgcttattctactatatcatattgttagctgattggtttctactggattatattatcatcagccgattgcctttatatcattatctacattggacatatagccgatctctcaaaaccctatcgctatcggctggcatcggctatcagctggaattactccatcggcttgttagccgatcggctatttgattttcaatttatatcttgtcatttacagggtcaaactggctggcacgcccgcatctcatcaacctttggtcctgcactggagctaagcagatctcccaggccagtgtgtgtttttcgcgtcaacaagtagaggtcgggttgctcctttgtaggaagtaccaagtctaccagtggtggcggtggcggcaacagtgacaagagggcgaaagagagataagggcaactacacacgtcggttgtgctggtagttgccactgtcctcatcgtcggcaggttgcagttgtcgcttgcggggaggacggggaatgccaaattggcatggaggacaacagggaaggcgatgatgaacgacgacggcgaatgggaaggccatggcaagagatatgtaggagagagggggacggggagaaatccgttgtgggacccacaaatggttagccaaaatagcatggggctagtgcataagagagtttggctagtcgaatggcttatccgttcgattggtatggctgttaaagttgatcttaattgacatataaaatcgacccgccagatttttgtgggtgagctgaacccgaatatcagtggaatattaccttttgagccaacccatcccacctagtcataaccaaaaccaaacatctataaaaatataggtttgacccaacccgaccccttcaaccaaatacatgcaaacatatctatgtaaaattgttaatagtactttgggctccgaagaaatgaatggtgtaactattttttttttttacgaaagagtaactaaaaagttattagtaatacatcgaacaagagacatgctctaaattaacctagaaactaaggctgtgtttagttcagcgtaaagtttggattttagttgaaattagaaatgatatgactgaaaaattatgtgtgtgacaggttaatgtgatggaaaatgactgaagttttggatctaaacacaacctaatttaaaacctgctaaaacttgcgagaagcaaacagagtccaaacctgccccaactgtcagactgtcagtccaacacccccattcccgctcctccggtgatctcccagatccaccaccgcgacggcagcgtcggcgcctaccgcgcaacgcaagcaatggccggccgcgcccgcccgcagccgcagccgcagccgcactcgccgtcggcctccacgcggcggcgcgagcggtggctggtcgtcctcggcgtcgccctccacgccgtctacatgctcagcatcttcgacatctacttcaagtcccccatcgtccacggcatggcccccgagccgccccgcttctccgctccccccgccaagcgcctcgtcctcctcgtcggtgcgtcccccctctactcatccccgacgattgtgaccccccgatttggttgcgatgtttgattttggtgaggattttttggttgcgtgcgtgcagcggacgggctcagggcggacaagttcttcgagccggacgagcgggggaggtacagggcgccgtttctgcgcggggtgatcgaggagaagggcaggtggggggtcagccacgcgcggccgccaacggagtccaggccaggccacgtcgccatcatcgccggcttctatgaagaccccagtgctgtcaccaaaggtgtgccatcccatctcagctctaattctggccatttcttcatgttcaatgcaaactaggatgtcagttggtaagaattcaaatgtaggggttattactagcttgttcatgtcatagctggtagacacagatatggtggtccaaactccaaactatttaggaaaaccatcaaacatggtatcttcggtgctagctagactgctacagtaagttcagtaggactagaatgcaatgcggtggcatggtactcagagaagtttcagctctagttctagcgtgccgctactggttatttttcatgtttgatgcaactaggatgtcagtcggtaagaattcaaatatatgggttactacctagttcatatcataaatggtatacatagattatggtggtccaaaccatagaggaaaaaacaccaaagatggtatctgcagtgctagctagactgctagagcaagttcagtaggactagaatgcagtccggtggcatggtgctcagagtagccgaaacctttaattggctctgatttagcgaatccttgttagtagctatgcttcttctagaaaagttaaatataatttgcttataggttaacttctattttgcagtattgtacttagcggctgattttcttagcctttttctgtggtgttcagagaaaaaggctaagaaaataatcattcccttaccagttacatattcattttttctttgaatttctaaatattctggtaaagttcaattaaacttgctgtaactgaactttaccataatatttacaaccattcccgctgatacctgtggtcagtgtacaactatagtattagtgctactagttttccgctgacatggcatgtcaaaactcatgtactggtatttgttcagttgtagaaactgtgagcattgttctacccattgatatcctaggttatcttgtgctggctgtggcctgtgggctactttacttgagatttattaaggacctattttgtgttgaaaatttgggatacacggtccgttcagacataatttagaaattgatgatatgttttaagagaatcatgttttaattccatatcaaatgtctgtaatgttcacaaaattttcttattacttttttgcaggatggaaggccaatcctgttgagtttgattctgtattcaatcaaagtagacacattatctcgtttggcagtccagatattgttcccatattctgcagcagcctacctcacagtacctggggtacttatccccatgaatatgaagactttgcgacaggtcagatttaatgcagtacatttaggttgctgaattatatatttttttatttccattcggtttttgtgatttccagagaatcatcttctgtttttattgacataattagaaattttttgtacctactcattacttgtaagttgtaacacacaccttttcggagtattccaatgactctaaaagtttatcggcagacttaatgatgataatgtgtaataaatggaaaaagggctctatagctcttctcttagttttggttagagttttttttttaaaaaaaatgaaaactcacaactattattgatgaatccagcaagcttttgtacaagtcatgggtccaaacttgtaaaaattcacaagaagggatttacacgtccaccagaaaaataacaagggatttacctgtccacaagaaaaataaaagtatttttaccaaacatcgcagagtatgaagcatcaaggctctaccttttgaatttggtttgctttggaaccttgtgtttacttgttctgagaccttgattgcagatgcatcattcctggatcattggtcatttgaccagtttcaaggtcttctcaacaggtcttttgaggatgctaaattgagacaattgctcctacaggataaattggtcatatttctgcacttactgggttgtgatactaacggccatgcacatcgaccctattcaaacatctatcttaacaacgttaaggttgtagatcaaatagctgaaagtatgtacaatctcatggaaagctacttcaacgataaccagactgcttacgtgtttacagcggatcatggaatgagtgacaaaggtacgcatactcacaatggtttcatcaattaatttcaatgacccagccttatatggtttgacaattcatgacatgagatctaaatactttctaatgcacttatttttgttgaactttccctgagacagcctcatcagaatggtgactgtcttttacctgctactaatagcaatgccttattcttttcatattaggttacaccatgttatacattatttatgatgtcaatataactcaaagttctactgataggaagccatggagatggacacccatcaaacactgatactcctcttgtagcgtggggggctggaattagaagcccaaagttcttggcctatacagacaaacctgatgatggctttcggtttgttgatgaccacaaacatgatatgcccacaccacaggattgggccctcgaaggatttgaaagagtggatgttaaccaggctgatatatctcctctaatggtttaaaattttccctaggcaaacatattatcatttttccttcagcataattgcttttatcctcaattgtttacaaaaactgcaggctacacttgtgggtctgccatgcccgctgaattctgttggaagcttacctacgcattatttgaaattaagcaaggtcagataataaacactgaaatattatgaaaaaaaatatgtttatgcttccgttgttttctgctcttttggattttctgtttatttccccattatttctgttcaggctgacgaagttgaagcggttctagccaacacaaagcaaattcttaatcagtttcttcgaaagtcacgtatcctttcagaacatgatttaaattttgcttactccaattgtctaaggtccttggatattcttttcttgatggtctcctgctgtcctgctgaagtgagttattgatgagactatataattattaatctgctgttgaagcccacagtttactagctgtgagcctgtgaatatcatgtcaattactttctatatttttatgcaacattatactgcctccgaaatggatatggtggatcatattcatactcgtgaacatgttttccctaacctgtctcagagatgaaacaatcaagttcactctacttcaagccttttaagccactggcaaactattctttagtccttgatcaaattgaagatcttatatctgcaaaggactatgaaaatgccatgaagcattctgaagaactccgaagtatggctcttgctggtctccattattttcaaacatatgactggttcatgttgatgacaacaattacccttggatatattggatggatggtgaacctcattctacatgtgctacagtcttatacatcatttcctgctaatcttcaaaaaaggactcaagtgtatgctaagaacacctctgtgaaagtaagatagccaacctacctgaccttcagttcttcacttaatgagtttatgtctaaaattgatgtgttatgcatgtatttttatgttgctatcttttccagattactcaatctggagtgtagtcaacattttttttccaacttcagtatgtttgtttctatccatttttccaagaaccttttctttaaaaaatatatcagaatttaggttctgttaaacttcttattgtatttaagaggtttgctgctgtctagagctacaggcatttggtagaactctgtgcacagtataggcttgatactagttcattgttgtgaactgttcaaagttgctgttcgatattgcagaattttattggtgtgtgtttcttattaatcctgatgtgtttttcttacactattttggtctatctcatctctcctggttgcaggtatacatagttggatgcttcattatgggtttttcatccattatactacttttagagaaatctccacttctttatcatgcttatttatttatgacaatattcctttggacaagaattgttcaaaattttgaattcatcaaggcagtatggagagaattatctaatatgccattcaagtacaccatgaatcttctgaacatttcagtcattgcgctgttcatattggagtttctggtatgtaccttttgttattggcacccgaagcgtttgaggactacctagatttggcatgaatttcgatgctttctgtgcaggttatgagcttctttgataggaagctttatacttggtgctttttgatccttgggatacttgcttcatcttgtgttgcaatatttatacaagctagctctgcacttgcagtctatgtgtggctttcatgctggttcctatctttattcacattgatgccagctgaaattccagaaaacaacaacttggtgtatgcttctttggccgacaaccccccacccccttccttttttttttccattttgtcaatattagttgcgtgttcattctgtcatataaaattctcttttctagagttaatgcagctggtagcccttattttttttataattattacgagcgtttggttgaaactttggtctgatgaatttttatatgcagaatttttagtggggccttgataatactgactgcaatggcatcgagatggatggccacaaataataacaacttttggctatatcttactcgagcaaataaacgggatcctcaattctctaagctattttttgttcaggtgaaaaatgcaggcaattctttcttgatgttggtatttgttttgtggaagtaatattttggaacaatgttgactgctgttacaatgctttaggttgtatttgttgcgatatcttctataatggtgtggatatcgacctcgcaccggtctcagaacaaacagctgcacccattgcaccagatgatcaactggttaatagctggtaagtgatgatcaactgcaccctctcatctctgctgctaatttctccaatgtttccctggttgacttgtccatgtcccttttcagtttttcagggccatatctgatatgttaacttacaagtgaaaatggctctttaacagataatcttctctagtagttcaatttcctaacatgcgtgcacattgcgccaagcttgaatatggtttgttcagagcattgacaactataaatattccctcagattacatagcattgttgtaacagaagtacctctgattccaaactaagccgttctagatttatcaattctttcccaaatataagacatccaagaacctcaaggcagttttcactcctttttttccccttctttgccctagctaaataatcgttattattctcatcaataaacgatacaccttttccaatgtggtataaatggaaggcaacagtcatttaatttcttaatcttatgcacatgtcttggaattaaaagggagcgcaaacttatttatgcatcaacgatccatttaatcaggataattatatcacagaattgagaacttccccagacgatgttcagtaaccaccttctttcagggtaacagcaggggagagtcataccaatatacacggtacacagaaagaagcaaaacttaatttatcccaacctattggaagttgccgtgaccttagtcagagtcattttatcttctaaaaagtatatatcagttaacaaagattttttcatctaaataaagttatctggcagcttaaatatgaattgatttgtctgaaatcacaggccaactttactctttagttaatgttatggcctggtctattgctcttgctaaaattctaagagttttggttgtactgattttgtgctttaactgattatgttttgacaggttttgctatggtgctaccacttttttcaccatcaagtgttctatctcgccttacatctatcttcttgggatttgctcctccatttctattgctctctattgggtatgctgttaacttctcttatagtgtccacatatatcaagttctggttgccgtaatgttcatatattcatatatcatcaaatcttgacatctgcagctatgaagcggttttctatagtgcttttgcaatggtacttatgggatggatatttgtggaatctgccaacttgtattgctcagaacaaaatggttctgcacgccgtagtagcattgtggagggctcaattttcggctatgatgaaagatgcttacaactatctgatctacgaatccctctgttatttgtaagatgacattctctttcccttgttatattgtgggttgctatgatttatgtaaaatactcaatacattctgtatcttaccgcctttgcagacgatcttatttaatgttgcgttctttggaactgggaattttgcgagtattgcaagctttgaaatttcatctgtgtaccggttcattacaatatttagtgtaagtgtttgtgtcttatgatttcctctttctctataatattaggttttcttttctattattctattactgatcgtctttcatcctctttccttggcagccgttcctgatggcagcacttcttatcttcaaattgttcattccatttatgcttgtcatgtaagttttctcagtgtttactatgatattggaccatcctgcggtgcagtggcggaggcaagatttttgtcatgggtgtacaaaaccgattaaatactccataaaaacatgaattttttttagcaaaaaatatgaaaaagtagttctacatgtgatatgatgagctgaaaattgttgtttctagtgaaaagacaggtatttagccaaaattatattatgtatacccaacaaaaatatcatagttttgacttgaagtaaaggaacttgggtgtacatctgtacactcatgaccctatacagcctccggccctgttgcggtgaatggctgataaaataagttgatacgttgaacatattttgtacttctgtacatccgcttcacaaaatataacgttgaatcattttttgttgcaaaataggtgatgttttaagattcaaaaataagaaaagaatacatacttttagcgaaactaaaaaatgtatccacactctacgtttgtttgttttgtgcgcgataagctatctgaagaacaatatttagagtttggagaagattaattgttgtagcgacaacatatatatttgcctttattccttcatcatgcttttgttccgcagttcataatataccgtgtttgattttaccttcgttttgatatcctaatgggatttaatataagatgcgtaatcttcaaattagttattagtggactgtttaagattgttttagagttcctttttattccttactctgaactctgaagcataatagtaaaggaaaacataaacaaagatgagccaccagattagatgcaatttgtgattaagctgattcatatgttgcgacttattgcagatgtacatttagtgccataaccaaggttgtacgtataccacggctgggctgttatttccttgtaatactgctgtctgatgtaatgacgattcatttctttttcctggtatgtgttcttttcccctgtgtactttgaattatcctttatagtactttgtgctgtagctcttgcttgtacagaaaattgtaagccaaatgttcttcattttacccacaggttcgaaatacggggagttggatggaaattggcaatagcatcagccatttcggaatcgtgagtgcccaagtagtttttgtgttgctgcttttcgccctcacaaatatattcacaaaagatattgaggtctcatctcggcaactaagctcaaggaaagttatgtaattgttccatttgtttggagatcgacattatactttcagttttgttagagtttaacttttgggcgtggtttcgatttttctgcccaagttttgtaacttagctagtagatggtgaactttgtattagatggttccagttatcatcttctttacatgtaagagcattaggagcatagaaaattttctcgtcgagaatttagttcaggtttgtcttcatgggctcacggctaccgtagtcgtcaacacgcatttttttcctccgatatatttcacggctcgctcagtttgtaaacatgcagtagtgtagtgttggggaggcgagcagagattggcctcctgcattgattcaagatttccaaatggtaattgctgtaacttgagtgatttctaagcaagattagcactaccggttttgtatgtaaatgttgttgttttgtgatttcttgctctgctatcgctcgacaaataaaatgagtagttactactgatcgcatgtttgtaacttggcgtaatccttcacggcgagctatgcttttgcccccacgagaccacgaccagtggaagcatcactgcctcactggctcactgcatcagttgatcgcctccgtgcggtccgcccgttcgttatccgaatccacccaaacatcccgcgttatccagccacgcccccctcccgccccgccacgtcaccacccaccgccacgtggctcctctccactggctgagcggcgcccacgcgggataaggcatttctccctccccgaaatcctcaccttaataaccaagcatacacacccccgcgccgccaaaagccgccaccacccagctcaccgcatcacacgcagcagcggaagaagcagcagcagcagcagcagcagcaatggcgtcgctcaccatgatggcgtccctctccgccgtggcgccggggcgcgcggcggcggcggcgccgcggcgcggctcgctggcggtggcgagggcggccgccggcagggccgagtgccagcacgaggcgcaccactgcggcgaggggtgcgggtgcaggggcggcgccggcgccgagggccgccgcgccgtgatgttcgcggccgcggccgtcgcgctgtcggcgatcggtgccggcgccagcggcgccagcgccgcgttcgccgagtcggacgtgaagcgcgggacgcccgaggcgaagagaagtacgcgcagatctgcgtcaccatgcccaccgccaaggtctgccacaactgagctgtggttagagggaagaggggctatggatgcagtaaatacatgtacggttttttaatctcctgtctattaaaaattcgagctctgattagactgtcgccatggatggcatcgaaatcaagttgttgtaatatgatgatcattgcgaattcgaggtgaaaccgtacgttctcttgtttcgttcgttgcgttggcgttgcacatgcattcacgcatgtatcgtaggacatgcattggctgacgcattcacgcataaatcgcagtaaaaacagacattgtttgtcacatttatgccttgaaataagtctattttacctccctcatctcttgccccctgtttgaattgtctccctcaattgcaaaaccggatataacgtttcccccatcttacaaaactagttgaattgtctccctcaattacaaatccggatataacgtttcccccattttacaaaacttgtgtaaattaaccctttaggtaatttggaaagtagtttttctgacgtgtcgaacccacatgtcatagactctcctcttccctctctctctcttcctctctcttctctttttatctctctcgtcggccaccggtggaaggaggacgcgggagctcggggaggccgtggtggtggcatcccagctccgtcctcgttctctgagacgggggactcgacaaggtcgtggcggagcaggagctcgtggaagctgcggtggcaagagaggacgcacgagctcaaggaagggggagcggatcatcgatcgcgaggtcgcggccgccgcagacgaaccccgtgttcgcggcgttggcgccgctgctcgcgtcgaccacgccgagctcacactaccgtagcgtcgcctcctgtgcgagcggctcgtgcacgtgaagcgtcgcgccgaagcagacggcgccgacgccgtctccgccgccggagtccatgacgaccccgtcgctcttgttcgcgtctcgctcgaccaatgcgacgcacgcgcgctgggctgctcctcgatgcgctccgcctcaatcgaaaggggtcacgaaccttgcgatcctagctgcggccaatcgaaagggtgcgacgagaaatcccggtgactcctctcgcatggtctcgattacgacgaactgcggattattggcgagcaaagaactgaacccatggcaacaaatttggtcaagccaaacgagaaaaatcttttgctgctaatgggcaggggcggatccagaacaagatttaagggggactcatctccttcttccttcttcagtccccctactcttcattttcttcctattttttccctttcatctccacttctatcaatggtgatccagcggggtaggggggactcgagtccccctagcacccacgctgaatcctcccctgctaatgcggtaagattcctttcgagagaatccactcagcaccactgagtttttgttcttggcgagagcgagaagggggaagggacacaaaatattagaatgactgccatgtggagttgttaatttttatttttttctcacggacaggtatgggtcccatgagcaccacttaggataaaaccatttctgaaatcaccgaaagagacgatttacaccagattttaaagatgagaaaatattatatccgattttacagttgagggggccattcaacctgggcaagaagtaagggatgtcaaatagacttatttcttatgcctaacagggcctcaaggagcccatcgatcaagctctaagccttgtttgtattacataacatatatctcttctagattctactcgaaatgaatacgtactccctccgtttctaaaaaacaaacctaatacgagatgtacatctagtactataaatctagatagatttatagtattagaatgtatatcatattttatactagattttcttttatacgacggagagagtacaagttacacacttgaccattgtttggttgaggccttgagagaccatggcaacatttgccaatcttgtggccaccaactttgttgctactccctccacgtacaaatatatatacaacactattgacatggtctttaatatactactttaacaaataatatctataaaataaattattttaagaataaagagttacatatttaatagtaaaaatattcttacgaaattaatctatgtttccttttttttcaccgatagtaaaacttgaaaaatgtttaactctacactgttccaaaagtccttataactagacatagggagggaacgttcgataaaaaacaaatctagggccggatgtgacatattctagtacaatgaatctagacagatgtatatctagattcgtagtactagtatgtgtcacatccagtattatgttgttttttatgggacagagtgagtatgcaatatgcccaattgaacatcgctatcctagtttaggctttaatgagatttattgtagagggctaaatagttccactttctctgtccgaaaagtatgctactagaagggaaatgctacaagatgtacggtatccggttaagactagatgatacctcagaggcatcgcctaatacctgatagatgtcagctgataccccgttcgaacgggatggtacctctgaggtattgtctggtacctaataggtatcggatgatacccaggtatagaagatacctctgaggtatcatcccgtctgaacgtaataccattatgtactagaattgaactcgatcaaacaccaaacaactctcaatgacaaatcatcaatttttcccccaatctatctcactaccttcggagttcagacacataaattttctgaattttcatgtaaatcagttcaatcttcacacaacaaaaaatcatacatttaaaaggatgcatgaccactatactacccgtatcagtatggcatgcacatccaaacaaacgggccctagcatccacatacgttagcctaattaacggcctaacagtacgacacgtttgacctgttgaacgattagtttactacgactgtgtcagctgtgtctcaacaagtagcgtgtatacctaacaagttcacttcacgtacggcgccgaacattcttccagctacatatattcaaagttgcagcgttgctttgcaggccagggcaggatttagaattaattaggcaatgcaaagttcttagaaaaaagtacgcattcagctggagccgatcgatgaaacgatccatcgatgggattccaacaaagcatatgcacgccggacaaatttgtactgaccttcctatacgggacattgtgtacatgtgttattccaagagtattctcgagcactcttgagtctaatacttgccattttgttttctctgaatacctttacgtctgatgactgacggccagctgcatatatgtacctatacagcatgcacatatcttagttcttcgatctgcaccctctgttctgtttacacacaggaaaaacgctagctacgcaacaattgcaaatatcttggttctttttccaaagactcgcacgagacggtgcgaagttttattgatagagcaggaaaaaattacaagattacaaccctagagggtcgtaaccaggcgaaaggaaaaaaataccaccacccacataccgacatcgccaacacacaagcccaggagaaggttagcaccggaccgaccgccgctaagcgtgaccgacctccactaaaccaacaaagggacacagatgagatcgtcccctaggggatgccaaaacaacgtcttcaagaacagaagcgacggaaaaaccgccgccgccgtccgtcgggactcaaaggagccaagactgggctttcgcccggcaatcacccttgaggggtgagacagcaacaacgccctcaggaggggaaatgaaccatcattgtcggtccggccaaggccggactgggttttcacccgccgctcaccacctgcgaatgcacggctgacgcaccgatgctccaccaccacacaagctctgccaacatgtgggacccctgcaccggcatcccctgccggccagccttcgtgtgtccaagaccgcgccacccactggcagctcctcctcacacctaggtcgcctcctccactgccggccgtgcctctcgcgccaagccagcctccatctccgccgcccgcgcctctcgcatcgagccggcctccgttgccatcggctgcgcctctctgtgccaagccgatctccgacttgattgacaaagcaagagtggtgaccttgcagattgcacggctagcacattacaaaatttctcatacataatagatatacttacacattttattgtgaaaggaaaatactaaaagatgacaatataactttaaactctggtccaacttgatcatatatatattttatgcctgatgttccaattaacatgtaatttatttattccctatgtttatttattcatgtttaacatgcattattcattaatatatttaatctatattcagattataacattcaacaaattttatgaaatttgcatggcaattcaattgctaattttcatattaaagattcagctatattctccattgaatggtatcggtatggactcttttgttcaaatttgtaatgtttgcaatttttttataccaattcttagtgttttagacattttctatgaacttctcagtggaatcaattaatgttttattttttcaatttatagttaaaataactctaatatttttacatggactatacttttggtattttaattgtaacttcagatatttatataaaaactgtcaatgcaaaatttacattttctttcatatttatttatttatttatctatttattttgtttctaatgttggtgattttaatttggaattcatattgaaataaaattgatggctttattttttaattttgaattgcaattagtaccatattgtgttgtacattgacttttcttttttcttttaatttaactttatttgattatcatatattttaaattgtatttctttatgaactctttgctttaatctatactgccataatttagacccacaatttaatcatcggcttaatattcttcctttacctcaaatgctgttgtgtttttatgctgaattgtttaataccaacataaccacactatcttatcacaaatctgaaatctccagctccaatgcatctcgagatgacctgttgacacatgattaatttggaagcttcacgatcaggttggtgagatatataacacactatccaaagttcccctgttgcgtttcaagccggtcgatatgatgcagcgcaaacgacgacagagacgcacctaattaagccaaagccccaaaaatcaagataacgcctttagattgctttatgcgatgccatacggatcgatgcatgcacaaaacagcagctaagcatactgtttgccagtacacacatgtagctttatagtacttgtgtagctatacttaatttggagagatgggatctgccttgatctagcatatgcttagagcttaaggatatgaacattatgtatatatacatgtatccatacaggcgtacatggtatagatgcatgtaaagtagtaaaactgtatctagctggttaattaagctgtcactgaattttacatatgtccttggcaagctctagctgacagatggaggaaaagcatacaggtatatatgcacgcagcatcagagcaaattaaaagggggattatatatttgatgatcgacggtgtgatctgatctgatgagatgtacgttcctcgttctttccagtggctgagatgcgttccccagaaagactatcactagaaaattagtttaaagataagactacattaattattgctccttatattccttaatagtttgctcattatttgtatattaatgcttcttcttcttcctggtggcttcgtggctcaagggaagggtggcgggagagtatttcttttcggcctactcagctgctgcctgcagcacacagatcgatcgccggtttgccagctactttggaggcagaaaaaaaatgcattaatcattatgtacgcgtacagagcctgatactggaaaaggaggctgatcacccttgatcagtactgatcaccgctgaacaaactaatcaatctagcttctgttccgcttaaatgccttaatcagtacttatatataagtagagtgattttaggtgtataatttgatatctctttataccattcggtactaatagataccaaaattcgtattaaaaattttgagaaattttactatcattgggaggtaataagaggccggtactaatttttttttatactaacattggtaccttttaaaattagaggtagcgagaggtatcaaattttacactaaaatgttgtaccttccagtcgaggtattgtaataaatcactaaaaaatttagtacctcttagtattaaaaattataaaatttctcatataaattaattccatggctgatctaatctagacatatgacagtataatagtatatactcccttcgtacatcccgaaaaaagccaatattgtatgtccagattcgttgtattacgatgtgtcacatcctagtacgagattatatgtctgccctaaattaataagggatagattacgtgtacccgtctgttaatgttataaataagtcatacccaataatcttgggttagtctctgcgggacccaccatatacccagttctatacggaatcatacattatatacggaagatattttggataaggaaggggaagtaaagttctactcgggcactataaggactactcggatcatattcatactttgtctctctagttctatttggacaagggggcacctgagggtataaatacatgaccccctagaaggagatgagagatggcaagccagaagatagatctagaacaaatctacacaagccaatacagatttagagaatccaagacaagccaacatatatacaccagaacaagcctagacaaatccaatctgaagctacaaaggcaaacatgagggatctagagctacctccaatctcaccgagttcacattcgaagaaaaagactacactagctgttggctgcatgtaagggtgcaatgccgctatgctaacaaggattggattaagtcatccaattattgtactaatgagatattgatatataaaggtaactctggatttggctaatatgagtagggctattacttgtcagttaagggggccgaaactatatataaattcttgcctattgtctcttttaccctaatatcgcgtacaccctgataccgacgaacaccataccctacaaataccgtagtcacgatatagcctatcgacatcgtcaaaattgttacttccttcatcttaaaatataaacttttagttatctaaacaactatatatctaaatttataactaaaagttgcttataatattataggacggcagtaatactaccaacaaaagcacccatgcgctagtctatgactagggatcatcggttggcctaataagccaaagccaaatttaaattttttatcttaattttgaagctaattttaagatatttttaattttttatattggtatttaaattttatatataaattaatttttattttttaataaaccgttttgatttattagaaaatgtggacaaccggccgtagaaccccgtggtatgtcgcttcgtccagaactatccagacctcccatatgcatgatcatggagctagttaaacgcatacacagaatacaaaaagaagcgacacacactacgtacataattaaattggatttacgaatccaccaggggccgcaaaacggaaggttcgaagctaggcagcgcgcctaactatttatggttgcaatttgcaacatagtttatccttaactttaatcctacattgtaaaagagctgtcctacgtgcatggtggcatctataaaatgttcgacattttgtgtaaagaaattgagaagtggaagtggcgatcgaatttggataccccactttgatctcttctcatatcattggacaacggtatgtacgtacaccgatcatatcgaaccactgcacaaaacagaatggaagctcgatcgaggctgcagtgctccccaaaatactcgacaacttgggccaccagtaaattatcacatgcttaatttaagaataatatatattggttatgtccctaaaaagacttgacttacaccattaattggttgatactccctccattctaaattgatctacatatagttttttttaggttatttctaaatgatctactgtacatatttgtgttcatttattaaatatattcgttatttgtgcattggagtaaatggacattgatgcatgcatccatgcacacaagtatttataatccacatgcaatatcttgatttgctattggctaggaaatagtggggatgttgcatgcatcgagtttgttgctagggtaaatatagtattagagagttattagtttttcttggtcttggtgtaccttacaaaatatgtaaatcaatttagaaaattatgtagatcaatttagaatggaggaagtaaattacaagcgaggagaaaaaaatgcatgcatgggtgctccttgttaataagaaagtagtgttatcaagtgattacaaggtatgtgaggggtgttgaaagaataaaacttcttgctttatgactcgagagtaggtaaaaggacaagtgataacaaggtatgtgaggggtgttgaaaggataaaacttcttgctctatgactcgagagtaggtaaaaggacaaaatgaactatttttgacaaattttaaacgtaagaaaatttgaggatattcataatttattggtcttgaaaaaagaatctaacctattcttgtttaaatgtaaaatatttaggcaaattttgctatgcggttcaaagtttgggtaatttgctgatggatatcgaaaaacgtgtcacggttggagaacacccaaaaactggtaatttgctaaagaattaatatttttgtcaaattggagagagaaattcttttagaaaaagagagaatgcccctggggccataagtttcgaacctaactgagatgcagctctcaatttgccttcaccccaactacatattgctaatatatatcatattttatttttattccagcgtcaggttagaaacttgtacctctagagatactttttttaaaagaatttctctcttcaattggaccgaaacttttctctaacaagttattagttttctgggttctctagccgtgacatgtttttgcggtatccaacaacaaattacacaaaaatttgtatgtcatgtattacaatttgctaaatatttatgactggagcaacttatgtaaaatggtactactcgagactgtaggattgttcaaggaaggctaaacgagaccaacttgcagtaacccttaaatcaagtgcttccttagcagctgcatgcctgcatgtaaggtacagattcaaagggtaacctaattaagttaactaaagcagattgttaaattgaattttgaccccctttgccttttcaaaggaagagcattccacttttgtgttaattaggagagagcatgcacgcagctagcacgcagctgcaagctaaactatagtacaactttttacactgcatgttatgtacctaattaaactgcaaattaagcttatttcatgctatgtttaactgcaagttgcgaaatgcaaacaaagccagcccagtacacggtaccacacacagcttaattagcaacgcacatgagatgatgagatattcttttcttggatatttttcatatgccctttctgcatagtgctctccaaagctctctttgagagtgagagagatagtgatgtatatatgctgccaatgatcatcatcgatcatcgattcatcctgcaattcaattaagcatcagttgaatcaagctgtgcagcagcaaggacggcccagagagagatagccagtgagagagagagagagagagagagagagagatcagttcatccatgcatgctttgcctagcttttttccaagttcttttttctccttggtctctagcttagctatagcctagcttagcgaaaactaaagcagaggactggaaaccgcgctgccctgcccttttccgccatagctaatctagctatcgccggtttcgtcatcaataatcttctctgcctcttcctctctaatccaatagagagaattaaacatacatgcattcgctttagcatcttgccccttttcttaattggcatcgtttttcgcgcgctcgcgatcgatctggtccgtccaatacctgcctcctccctaccccgatccccctgccgcgtatacgtacgcgtgctccttaattttttttagagccctagcttaattaatcagcttagctagcttgcatccaccatagtacatgtacagttccatccatcagcctctataaattgggggtttgtgctccaagccgagcacctcagcctcagctcaccttgtgattagcatagccactgcagatatcgaatattgcattaagctagctagcttaattggcatcataagcagcagaagaagaagagaagagaagagaggaagctagaagatataggagaggaagaggggatgggagggaagtcgtcgttcctgtgcccgatcttcagcttcctgtcgtgcaagtcgaggaggtacgaggacgacgacgacgacggcgagctgagcggcgagtggccggcgaggtacgggagcaaggtgaggtcgagcgacgaggactacggcgcgtggtgggtcggcgagcgcgacgtcgaccgcaaggcctccgactacatcaacagcttccaccagaggaagcaggtcgccgccgcctagctagctcgatctacacatctcgatctccaaccacacccacagctcaacgataccaatctttcattggatcgagggggactagcgtacgcgcgacggcgacggcggacgacggccgccggcgcggccatatatatgtactgcatctgttgtctcaaccggccatttgtgtaccgcaccgcatgtacgtacgtaggtctccgtttacataattaaattcttctcatatatgtatatgttaaattgttatgtatgtttgttgtggattattatgttatatatgtttatttagaccacgaataattgtaatgccggttcacagatcgagatcttgccatgtgtatatgtatgtggagcatgtgaactcttttaatcctactgtcctatggtactttgcatatcgtttaaatagttatatttttttaacaaaataataagataagtagtatgtgatacatctcactatatatataaaatatagggttaaattaatttgacttatataagttgaaaaatcaaatatgactatgagcatatgtatactagattgacttaaatttattatttttgtcacatgtgagcatatgtacaacttatatagagattgaattttaacatgcatataatttcgccttttattaattcgttgcaattttcagaaaggagctagctatgatatacctccaacttttttaataatagaatagaaatctcaaacgactctacatcatatatatgacacacagccgacttcggccccgtatacctaaaattaagaaacacaaacaagaatgtggaaattaattaagcagcaacacatattaattatatataagtaattctcaaaaatatatatataaagataataaacatattttagcatcacacttttgcatgcatggaccatctttaatggaaaatatttatgaatttgatgtttctagatcatatcggagtgtatgtcatgcagactagaaatacctgttttaattttccatgttttttttttacgatggacctgctgccttctgatctcccttatatatttactgctccctccgttccaaaatataagcatttttaacatagtaacaagttaaacatttttaactttgactattaatagaaaaaaataaaaaacatcaatcatgtaaaattgatgttactagatttatcattgaacaactattaaaatatgtaactatttttatttaaaacatcttactttgatagatattgttggtcaaaatagcatttcgaagaccgtatcagagtaaaaaatgcttatatttttagatgaagggaatatgtgtttttgtccgctctgtgttattgtactgactgatactactaatcattagttcgatcatattgttaaaagggagtcaatatataccaccaatacttcagtcactcatgtcagtccgatccgatcgacttgaatagtgtctttttcgagatatacgtagctttaacatagctatatatcttcttttctaaccatccatatatatcagtgatgctaaatagccgaatccctcaaaaaagcctcaaccagaagacactctttaatttgtactcccctttgactccaaatactatatatgaatatatcattttagagctgtacatagaaaataagagaactgttaaaatgatcttgttgtcatatacagttatcgtatacttgaaaggatacttcatttatatatttctaatttctatactactaaaaaataatagtgatgatggtgattcgccaacaccactactacttttgcaattttacaagaaaaaaaatcacctatgacatattattatatattttatttaattaccaatagtaaagcatgggcattttgctagatttttaaaacactccattgatatatgagagtggtacgtagcatttaattaacaagagtatgaaagaatattatactaccttcgtactcacaaggatgttttgaacatttgacacaatctcgaatttacgtggttaattactttctcaaactatatgtctataagaaaactaaaaataaaactacatgacacaatctttcatgacaaatatgttgaaaatctaatcataattcagtatattttaattcagaaaattattatactaaacatgacataaaagtaatagatgattcaatgatagtgctaataatattaatatcatcatagtaacatgtttaacactaaaataaaaagggtgcgtaatgtacagaagaataatctgaatccagagacggtggtgttggtgtagtcgccccagtggtcattgccgccattgtctctgtttccggtactaatcaacatggtccggaggttgatgcagaggaagtagagatggctcggtgtagatgaagtagcgtcagtttgacgcagagcagtcgcatgaaggatgcgctccccaaaaatttaatcaccacctgcccttgcaggtactctggtggatggagttaagacctgctcgtccgaatacttgtgtgcgcaagtgctcaggatcggggagaacctaagtgcagcttagaaccatatgaatggaggtgtctaacggaggagagccaaaatcaagggagatagaatccacgcctcgcccggctcggtgcgcgttcccaccaccattttaaccgctcaacagacgctctcaattagcatcatacttttaatttgatacactactaattagaaaggtctagaaaattctgaaagacattttaagctgcaaatagcctttgcaaagctagccgcaaatgcatggggagcgtctcctccggttgattccgcggcatcgtcacgcgcagacacgtacggcaaagcgggagcgaacctgccagaaagctctgtagctatgcatgaagagaccaaagcggtgggtagtttccatgcatcgctttggtgagcaacggcctgcacatagcgcccagaaggaagctaggctagcctcaaaagccgcgatgctatcactttctgcctcgggcgattcattaattaattgctctccccgtttgaaaatatacctcggtgacatttcctaaaatttatattcgttgtacatgaaaatatcttagtttttttttattttttttaatgagagaagtaagtagtactgtacccatctcaatataaatgtaatctaatatgacccagttcttttctccaacaagagttgaatgaagattaaaattttggtggcacgtttttcaaactgctaaacggtccgtttcgtatgaaaactttctatataaaagttgctctaaaatatcatattaatctatttttaaaatttgtaataattaaaactcaatcaatcatacgttaataccacctcgttttgcgtaaaaaaacttaatcttcatcttcatctccatcttctggagattcaaacaccacctatatatgtgatatatctcaacatagggttgttcatcgacggtttttagcggtttggtcagaaaaggcaaaccaacccagaaatactagtaccggtttatacggtttgttttgaacggttttgacaggttaaaccgggattaagcagaagaacagcaacacaaccatggatgtccttccaagctcaacagcgggcgattgcaccatggctcttagcctttccatgcgatggaggcaggcaggcaggaagccagcggcggcggcgagctagcgattgtttcctccttggatgggagccgccgtttggctgcctcggcatcctcgccggcatcggcgccgccggcaccaacgtctacggggttgttcacttacgtgcgtgctaaatagccgatgcttgcttggtttcctcgatcacgcagatgccttcgccatggcgtcttgctgccgcggaagctatcaggtaatggcagcgcaggtcctgaaggacgagacatggccgggttcaatgggttaagctggtcccaaaccagcccgtgaataaatggaaaaacggtttgggttggtttggtttcacgggttgaacggtttgagcccaaaccgtgaacaggctgatctgaacacatatcgcacgttcttttctcctgaagatgaagatgaaatgaaaatgaggatttaagttttttacgcaaaacgatgtggtattaacgtatgattgattgagttttaattttcacaaacttgaaaaatagattaatatgatattatagagcaactttcatatagaaagtttttttacacgaaacacaccatttagtagtttgaaaagcgtgtaatcttcatctaactttggttggagataaagaaaggaccatatactgcacacggacgtacacagtccaaaatcttgctgagaatgctgctcctctcctgtacacttgtcatgtcgtaggtgtaggggaagaaataccgggtgaatatggcccagctgcccgcggtgccgtggtggggggcatgtgggcgagacggtgtgtggcccggtggtggtgggcgcgcggtgcgtgaccggccggccatcagcggagctaggctggcaggctgcctgcctgtgcctctggctcgcttgctttccatcgccgcgcgcgtgagctagcggcgtgtcgatcgatcgatcgtccatgggaagattgaatttgcgctgctccctagctacccttccgacgtcacggtcgtggattccctctccgagaccatatttctcgggggaatcttggcctcttggggttaggagtagtcccctactccgagcaaatatcggccagctttgctttcgcgatttgggtgaaaggagagagagggagagatgcagcggcgcgcacacaggttcatcgattctccatctgcttttctgcacaagcttacaacgttagcgcctcccttcggaggtaggcccgtccggaaatcgcgagacgtttttttcagcttagttatcgaattatgaactattattgttaccacggttctcaaactacaatttctctgtcaaaattttctgcaacagcgttgcttatataacctgttctaaactacccctattattctaaactagaaatgtagctcacacattctcacggacaccttattgaaattgtcataattttttgctattggcattttgaccattatgatattgtattattttgaatatttttttgataattttaatatttgtattaaaattattttgaataatttggataatatttgaatattatatatttttaataatattgtaaacgtgcgcacagtcatctttatgaacgcacaacatgcacattgtaccctcttaataatctgttagacatttttctagacaaacgaagtctactttctttttagagatgacgaagaagatagtagataattaaaggatgctacctccattctaaaataagttaatctagaagagaataatgtgacacatactactgctatgaagaagctatgtggctgcttgaaatccttttggagaagattaatggacttttagtatatacgtgacagtttgggagtgttttgagaaagccacgtgataacataagagcgttttgaggaagtttaaagtacttttagtatataaaatagatattgacgatatttctcttagttcatatcgacttctctctaagttaataatatttgtcgttttatataaggacagtctccaagaaacaacaaatggtcactattttataatatatatatataaatatcaataatttattgaagtatttttttaagacttatctataaatatggtttccatatttctaagataaatattttagatgttataaagatcttaaaatttgacaatagtcttattcaaatcagagtattatcgaccagagggagtagctcgtgtgctttactatacaaatccatgtggcttcattcttcacataagactggttacaatatggaacctgggaagtgaaataattatcgcttcacacttcacgattcgcagttcatctcgcaagatgcaaactgcacctcccagcatacaaagtgatcgtgggcagctgtaatgtagtttaatactgatagaacgatagtaatagtacacaatttcatataatggtcatatggtatacgtatcttacacaaatgaccaagaaagggttttagtatatgtagactgcatttctggaattatatactacattttcgctactggtacacctttcggtacatttcaatctctacaagaactgagaagtcaaagaatatcttctgtgatgatcagccagagggaaggttcggagtgcgacctctcgtgcatacaatgcatcaacacacaaatatcctaccgggacagaggaaatgattgctcggctctgtagcgaattcgcatgaacaataatactcatatccaaacaatctgcacatgttccctcatccaggaaaagaattcatcataagctgagatattggcgttcctagcatcatgagaagatagaaaccagatggttcagcaatcaatcttcatgctcgtcttcaccttcagagtctgcacataaagcagaacagttttagatggtagcaaactcaaaataattttcaactcacaatggtggttggagtaatgcatgttataagcagactttgtcttgtcccaatgcagatgggactgaaaataagaccatgcaattttgcatgctcatcctgtgcaaaaacaagattctaagggggcagagcttaccagatcgaacatcatctccaacatttcttgtcttgatttgtctcacaagcatccgatatatcagaacccaccaatatatgtgaagaacaagtagtgaaaataggagagaattgaacacatagtaatatataggaccatcaaaattgtgcttcttcttgtccaaggtcaacaagacttcatagctgaagcaatcgggacttagtcagctcatgtaacttctaataaataaggaatgaaaacaccattttgttacatgctgggacaatgggacagcaagatactattgtacatagtattctagtctgctatcacacatatattttgtacaatataagtatgattatcatggcatagaaaggatcggaaataaaatccaaaattaatttcagcatgcggtggcatgatctagataagtttgttttcaagaggcataagatactgtgctatgttcaaaggtctttttcctactggatacaattactgttttctaactgaattacttgttggcttgggtttcttttctccccttaaaatgaaggcattggcaagaacagcagaattcaccatccaaagttcatatggtacaaatttcgcatagtaaataatatgcttgcttttgacaattcacaacatctatagtacttaaaatgttagaagtggtggtgtccatccccacaccacccctaccactaacatctgaaccccacaactattacaccacctttcaacaagtcatcccccatttcactattggctcccctaaatttcaaaatcacttgttcaataagaaaaatcatagtattacttagaacaaataagtgcttattgattgatttaataagctaaaaactcaatttgttttccattgcaatgcacgggttctaggctagttttcaaaaaaacttctttctcacaaaattctggctgacttttctaggcatatctcaacaaggtcagtacatcacatttaccttgtacttctgagaatccagaacggaaaatatgtgagacggagaagaacccatgaaacgacgaaaagaagaaatgcaacattggcaagcaaatcacaatggctatatttggccattttccctacttccaggaacacatcacttgcatcatgaattgccaatactactgagccaactctagcaaacctggttcatgaagaaaaatttcagaaataaattagttaagtgttaataaaaatgagtgaaataaactcagtgaagataaaatattaaggccctgtgctactaactcatagagtaatgcttgaatcaaggtaaaaaaagttcatattcaagaaacaacaaaaattaaaagttagacaaaaagagacctgaacacataagataaaactatcagcgcaacagttgcaacatgatgtgacattgacacgccaaaatctgaacgccttgtttcccaaaacataagtgcaaatatggaatatgtgtagaatccagcagcatacatatagacagccttaagtttccatctgtagataaggggaaaattgttagatatacaccagcctgagaactagtaagaacatgaagcaataaaggaccaattcgtattactttatcttttggtcaggccaaacctggtcaccaggtccaacccagaaatatttagtgtttgtgaaccaaggctcattatatgtaactgacaaagataaaatctctccagataggaaatagacacatttccaagctgattccttaaattttcttatcttctttcttgtttcctccttctcataatcaaccttttcctttccaaatataagttttcttccaatccactgaaacgaaaataaaagaaaaacaatgaaagtgtcaacattaagctttagaattacattaacaattgaaaatgttaattatttaaagtaaaaatatctatgatacaacgtggagcctgagagaatctattagaactatacaggaacaagagtaattttctggtgggttcggaatacagaattaaagtagctgttgtgctcaacctttcaccaatcatgtatttaagaagcataaattactttagaatcataataaccctcatagtgaagcaaatgatctcatctagcaaacaaaaaaaatgtctcaaacaaatacagaacaaatggtaaccagatggccatgtgccataattgcagtaccctgtgatgtctgtatattgtagtcatgcatctgtctaaataattttcttgtgaaaaaagctatatgtaatcaacttaggtatcgcactccaacctagactttgagttagtaaatgttcataaagaaggcatcattgtgtgcttgtgcttaagtccatccatattagaagtgaaagaactctccctcactagtgtcttagttctccgtcctgatgacttgtaatgatcagaattaccttttaaataacataatggtatgtaacataaagatgaatagcatgctaacatatacctcaacatacatatcaagattatctaaaaaaaatctcaagaaaacatcacgacacaaatgttttcctggttacagatagcccagtggaaaggtatactactcatacaataaatgtggcggttgcaactattcttactgcaatgagatggttgcaatttgcaaatttataaccgcgaggtatttctagtttttgagggatataaattacattaaccttgctcaagatgctcacacgagagaaatactgctctctttatgccagaaaccactcagatctactcgtggtctgttgctgcactgagctgctgacaacctcaaattcgcagcacatcgctgccttatgccactgataaacagtaaattgtatagtcgtgtgataggttatgagagatatcaactcaacttgcaatccatttctctgctcgcaaaacccttctccttgcatgaacttttaccttaataaacttgtgttcaggctggcccagtaagtccgtcattgttcgcctcgaaaaatacattatatatgtattttcttaatggaagacaaactaacccagggaatcatatatggatcttgatagctaaatcactaaattcttattgtttaagatgttgaaactgtataccattattgttatagttgatgcgcctatgcctcagagatcacactattcatcaccaaagaacaaaccttaaatcttaaaccattatactccctgactaaccactgcagcgcaacacaacaggggcccctccgtaacaaaaaatcagattcagagtaccagataatcattagacaagagaagaggacgactctccaatacagcaatgccatgatgtaccagcacatctctcctgagaatccgagcgtttgatctctccccccacaattccaggaaacgcgaaacgcatgccaagctagcccgacaagcaatcattaaaacgctaaaaagctagcagcgcctttgtttccccccacacacataaactaaacccagctagctagctatccaacgcgatcggattggttggtgattcctccaacgcgaaatccagcccggagaagaagaagggaaaacacacacacaccagcaaaacaaaagcttcgctgctttccgcacccaacaggtcaacagtaacagattcacctcgaagacgaagcagtcgaggaggtagcggacgacgaggaagaagacggcgaacaaggggagcgcgaagaagtcgcggtacgccgggtaggcctcccgctcccagtccaccgccgccaggagccggcccgccgccgccgcgacccccatccgccgccggaggccgaatcgagtaggagcaagaaatcgatctctcctccgccgcgccggccgcgaagctggatgaagaaggatcgagaggggaggggaggcgaccccggttggggccggggtggattccgattggacttccctcctctgttcctcttcgccctctgactcagccgacgcctctgttttaccactacgagtctactactactccccacttgtttatttttattttatatttttcctttttttattattagtctcgcagtggttgcacggagtggtacaatagaaagcgcgtaatgaaccgtgttttataaggggtgtctagatagggctaaaactttttagcccatgttacatcggatgtttggacgctaatttggagtattaaatatagactaataaaaaaactaatttcataaatgagagctaatccgcgagacgaattttttaagcctaattaatctataattataaaaagtttactgtagcatcacattgtcaaaatcatgacataattagactcaaaagattcgtctcgtgaattagtccaaggatatggaatatgttttataattaatgtatgtttaatactccaaattagtattcaaacatctggtgtgacatggacttggaataagtccgtggaaaccaaacaggcccctaatcccaggaagctgggaattgtattgcatctaccgttgaaaagaagagatgggaattgtagccaggttgacttttcaaccatttttgacattttttttttgacttggtgtactatgattaataatccgaaaatggttatgataacttgtttagcgagttttgtgggttttttatcctatgggtaggattcatcgagattcaaaaataattgtatatttcttgtgtgtttgtaaataatcaataggtgaattatttgtaacttattcatacagctgaatataaatgttatcatacaaaggaaatgcatttggagaaaaaataagatcagaaaaatattagaccacaaggcaatgtcggtgttttttttttggtgtaaccttaacatgtatcccataaataattgatcattgttaaagcaattctcacaattctatagataggatttggtcacaagatagacccacatgagataaaaaaatgctttggctctgattaatgaggtgaatgcgagaggaaaataatgatttctttttcttgtggtagaccttaagcataagcataaggtataccataaggtaatactactttccacaatgtatatgactcactttataacttcaatcgttattttaaggttatcttttcatacattgtggttgtcctaagggtttataattattgttccttaacagcactgatacatcttttgttagagatattcttaaaagattcattttaaaagtattcctacaaagttagtttaacttctaaatcatgaatattgcacatctaggaattgtgagtgtattaatctactatataacaagatttagatcatagtgcccataagcatgactatgtgtagagtattggttaatacattcacccgaagttatacttctattgtaaaaaaaattaaagtactcaagtacaaaagtcaataagtgcatcacatatgaggattacgatgtaaatagaacattgcaaaagaacaatacatgatgtgtgagaatatatagtcgttttcccccttaagtatgttattttaagtttctaaaataaagtatttaaagatataacttgtacagtaaagtttccccttatgctatagtaattttttttcttatgttttgtaggcataggaactgttcgagtgttgaactattgtctttatactcaattctaagtagtagagagtcatatcaatccaaaataataaaggtctcgactaaagacgcacaagaataaaagagttaaaccttagcacatcttgatattgtcccttttagttagaggcttagagctatatcgtcaacatgatcaccatttgtttatggtcttagcaatgttgaagatggaggagcttgagttgtatggagtggttgctccttctactatgatgtgacaaggctaccgacatcaagttagatcaaccctaataacccatggataatatagatcaacctagaaagcgatgtttatctatggattagttttggttccactaaaaagttaagtttagttttggttccactcaaaagtttaagttcagtatgaaacctaccaggcatggatgcaagtaaatcaaaccataaattcacttaatagattaatcaagtggattgaccctgtaaattacccatctatttagtccaagttgatggatcaacccatctctaaccctattataaccagaattaaatttgaaaatacattgttcgttcaattttttctcaggaatattcgggatacaaatttttttgcagaaatataccgtcggtttcgcacaaccgttgcgtgaaaatgacgtggaatgacgtcgcggacggtattgcgcaaagaaaatgtgagaccgtgcggtctcgcgtagcgacgcgacgcgagaccgcgcggtctcgcggattataagtgcgacactgttcggtctcgctcaagcaaggagcgataccggtgccattatgatttaattagcgattaattatcctaattagtgattaattaattattaattaattgctaactaggataattaatcactaattattactagttgattgttaattgattaattaattactaatcaaatggagatattggacaatttcgctgtttgatttcacgagagcgtttggtctcgctctttcattccgcgagaccgcgcggtctcgcgttatctcgtactttcatcgtgcgataccgtccacgacgtcaccatgttattttcgcgtaacggttgtacgatatcgataatatatttctgcaaaaaaaattgtataacgaatatttctgaggaaaaattgaatgaacattatatttggcatggacgatttgagatattttgattgggccgatctctagcccatatatacgtgtaggccggaaatctgaaaattctgtccacgtgggcccagaaaccttatcccctcacattaaaaattgcttaaaaatttcgaacactacacctgccgtctcctcctattcactccacccacctcgccggaatgctcgccgtcgtcttctcctccggtcaccgcctcctccccctccccgtcctccccggcacattcaccacccctcctcctcctcctcctcctcctctcctatcccctcgccgtcctctgctcgcccctcgccggcgccgctgcctatgcggcggcggcggtggcggcctcctcctccttcgcgccgtcgccgcgaggcgcgcgggcatcgtgatcgacgtcgacgaggtgggcgaggtcggcgaccgcgacctccccgtggacgtgtcgttcacccggaggctgccgccggtgctcaccctcggggacggcctcgccgcgctgcggcgggccggggaggaggtgaaggcctgcccgcctgccgccgccgcgagcggcgtcatccggttcgaggtgagccgcccagcgaggctgtgtgggaggggatatgtcgtgttttacagatttgcagttggtttcgttgtgagcagccgctgcaatatttgctgcgcggcggcgaggcgacatgctcccccccctcccttacgaattttaatccagcactgtgaaattattgaataatccactcagctccttgacgcaataggcgtaaatcgagctcgcgtctagctcattgtttatgctttgcgatgcatttggatttgtttatcccttacggtctaagcaacaagtgaaacaatgatgattaattctcagttctgacaatgcaacggtgcaggtgcttgttccacccagtacgaaggcgctcaaatggctgtgcacacagtttaagagatcatcattgtttcctcagttttatttgtcgaggaagcaaaccactgattcatcaattcagcttgaaatctctggcgctggctctgcaatttgctttcatggttcctctcgagtagataatgggtttgatttgatatcaaggtgcctcctctctattgctttccgtagcgtacgtgtgatgcagggtgtttctaactaaattaggacctgtttgtccctgcagatatctttcgtttaattcacacttgattagagcctatggatcagtaggtgttaaatatgacaaggaactattgtctttagaggagagaattggttcattttacttctttattcctcaggtaacaactttcagtattctgtggtgctactctagctacctgaatatttatcaagttggtgcgagatacagactatgtgtacaagccattttgaatttagcaaggaaaatcctcgaagttctgtgatatgacattccctgtataaatttggttacatggtttaatatcatattgtcagacaacagaaacagttttacacctgaatttttcttgttagcctttttatgattgtggtggggtcctcaaagtaatccgttggtgcaaagaaagtcctattctgaacatgcatgagtggcacaagtactgcacttatatctagaaaaatgacatagaagttagcctattagaacatttttttaatgtattaaaaagatctacataaacaatttacaagaggatcacaacgctttatgacctactttgactggtaagttattgcacagaaagtaatgcaaatgcaaagggttaaaagtggaggtcaacttggttgaggatttttcttgcattcttgcatacaagtcacataggaggcagtaagaatttacagaattctttcttggttatcttctgcaggcataatgtagatatttgatcttatagcattcgtgatgatcagcaaaattgaatttacaggttgagctgagtgaatttgatggctattccatgttatcgtcaactattgtttgggatgactccgtgtctcacacatttgaggattctgtttgtttatttgaatcttgtttcagtcaggtatgtggaactaactagattaagaaaaaaatatatttaattctgtttaactttctttcatattaatatagcatttccatgttcttttaaaacaattaattttctgttttgtattttcccctgtaagatatggagtagctatgattcttcagctactatctgttatgaaaacatggtaacaagttacattggagaatcgcgtatgtcagagagcaggaatactcagttggtacatatttctatcaatcttaatcactttgttaatttcatgaatttacgcttgtgccatttgttctccactctgcaaagtccatctgtgatgaagcttcagttgtatcaggccttcacatgaacactcatattcactattccgatgttcttacttctatgccttaattagttcacagggttttgagtctgaaacattatttagttatattacggaggattataatagcagagttttgtgatgtgctctactgaagtttgcaacaattgcttctccaatctctaatggccattcttcccaccattttgtttttggttgaatgataaaaaaaatcctctttttcaacaaaaatagataaatgaaacgtctatgccttttaacatatagaacatgctggcttccaaaaaaattagctatggctaatgatatagattgggtgctcatattgtattccatacagagttttggctattcatcgttaaccagtttgtgagttatggaacatagttctagtttgcacgcaaacactctttatagctgtttatgtatttcgacagttatctgctattcctattatcatcagacatcaaagtgctcaatttgattttgttgaatccactgttccaggtatacttggatgctgaatttctcgctgtaatagatggcaaagctgtcacggaaaaggtatcctcttaaccctggtaagcttctttaagctatttcattactttgcaattgagattaatccctggttttaatataagaaatgccccttgcaaaaaggaatattatgtttctttctttgcggtttatggatattttgtctgtatcttgctggaaggcacattcacacctatcacatttataatagtaattcaagattattttttttacgtccctgctgccctgcattacctggtaactaacaagtttgcctacctgttagttagttgaattgcttttgaccaactccacaaattcatggaccaaaaagttaaagtcaagaagttcatgggtacacatagacctcgccacaattattaggacagacataattttcctattatttcctttttaaactttttgttgttcatgttctcttataagactagacacaataaacttgaatttatatccctgatcggatatggaacttattcttttgtctgtaggagaattgcccaacttctgatcagtcatttgttcggttttcgccgcagttcttgttttgtgcaaacatggtaatggtttctacctgagtttctttttttcataaataaccattaaattattttgttaaatacttcctccgtttcacaatataagtcattctagcatttcccacgtttatattgatgttaatgaatctggacatatgcctatctagattcattaacatcaatatgaatgtgggaaatgctagaatgacttacattgtgaaacggagggagta

SEQ ID NO: 10001 - DNA, 79932 bp, Oryza sativa
acaacgttagcgcctcccttcggaggtaggcccgtccggaaatcgcgagacgtttttttcagcttagttatcgaattatgaactattattgttaccacggttctcaaactacaatttctctgtcaaaattttctgcaacagcgttgcttatataacctgttctaaactacccctattattctaaactagaaatgtagctcacacattctcacggacaccttattgaaattgtcataattttttgctattggcattttgaccattatgatattgtattattttgaatatttttttgataattttaatatttgtattaaaattattttgaataatttggataatatttgaatattatatatttttaataatattgtaaacgtgcgcacagtcatctttatgaacgcacaacatgcacattgtaccctcttaataatctgttagacatttttctagacaaacgaagtctactttctttttagagatgacgaagaagatagtagataattaaaggatgctacctccattctaaaataagttaatctagaagagaataatgtgacacatactactgctatgaagaagctatgtggctgcttgaaatccttttggagaagattaatggacttttagtatatacgtgacagtttgggagtgttttgagaaagccacgtgataacataagagcgttttgaggaagtttaaagtacttttagtatataaaatagatattgacgatatttctcttagttcatatcgacttctctctaagttaataatatttgtcgttttatataaggacagtctccaagaaacaacaaatggtcactattttataatatatatatataaatatcaataatttattgaagtatttttttaagacttatctataaatatggtttccatatttctaagataaatattttagatgttataaagatcttaaaatttgacaatagtcttattcaaatcagagtattatcgaccagagggagtagctcgtgtgctttactatacaaatccatgtggcttcattcttcacataagactggttacaatatggaacctgggaagtgaaataattatcgcttcacacttcacgattcgcagttcatctcgcaagatgcaaactgcacctcccagcatacaaagtgatcgtgggcagctgtaatgtagtttaatactgatagaacgatagtaatagtacacaatttcatataatggtcatatggtatacgtatcttacacaaatgaccaagaaagggttttagtatatgtagactgcatttctggaattatatactacattttcgctactggtacacctttcggtacatttcaatctctacaagaactgagaagtcaaagaatatcttctgtgatgatcagccagagggaaggttcggagtgcgacctctcgtgcatacaatgcatcaacacacaaatatcctaccgggacagaggaaatgattgctcggctctgtagcgaattcgcatgaacaataatactcatatccaaacaatctgcacatgttccctcatccaggaaaagaattcatcataagctgagatattggcgttcctagcatcatgagaagatagaaaccagatggttcagcaatcaatcttcatgctcgtcttcaccttcagagtctgcacataaagcagaacagttttagatggtagcaaactcaaaataattttcaactcacaatggtggttggagtaatgcatgttataagcagactttgtcttgtcccaatgcagatgggactgaaaataagaccatgcaattttgcatgctcatcctgtgcaaaaacaagattctaagggggcagagcttaccagatcgaacatcatctccaacatttcttgtcttgatttgtctcacaagcatccgatatatcagaacccaccaatatatgtgaagaacaagtagtgaaaataggagagaattgaacacatagtaatatataggaccatcaaaattgtgcttcttcttgtccaaggtcaacaagacttcatagctgaagcaatcgggacttagtcagctcatgtaacttctaataaataaggaatgaaaacaccattttgttacatgctgggacaatgggacagcaagatactattgtacatagtattctagtctgctatcacacatatattttgtacaatataagtatgattatcatggcatagaaaggatcggaaataaaatccaaaattaatttcagcatgcggtggcatgatctagataagtttgttttcaagaggcataagatactgtgctatgttcaaaggtctttttcctactggatacaattactgttttctaactgaattacttgttggcttgggtttcttttctccccttaaaatgaaggcattggcaagaacagcagaattcaccatccaaagttcatatggtacaaatttcgcatagtaaataatatgcttgcttttgacaattcacaacatctatagtacttaaaatgttagaagtggtggtgtccatccccacaccacccctaccactaacatctgaaccccacaactattacaccacctttcaacaagtcatcccccatttcactattggctcccctaaatttcaaaatcacttgttcaataagaaaaatcatagtattacttagaacaaataagtgcttattgattgatttaataagctaaaaactcaatttgttttccattgcaatgcacgggttctaggctagttttcaaaaaaacttctttctcacaaaattctggctgacttttctaggcatatctcaacaaggtcagtacatcacatttaccttgtacttctgagaatccagaacggaaaatatgtgagacggagaagaacccatgaaacgacgaaaagaagaaatgcaacattggcaagcaaatcacaatggctatatttggccattttccctacttccaggaacacatcacttgcatcatgaattgccaatactactgagccaactctagcaaacctggttcatgaagaaaaatttcagaaataaattagttaagtgttaataaaaatgagtgaaataaactcagtgaagataaaatattaaggccctgtgctactaactcatagagtaatgcttgaatcaaggtaaaaaaagttcatattcaagaaacaacaaaaattaaaagttagacaaaaagagacctgaacacataagataaaactatcagcgcaacagttgcaacatgatgtgacattgacacgccaaaatctgaacgccttgtttcccaaaacataagtgcaaatatggaatatgtgtagaatccagcagcatacatatagacagccttaagtttccatctgtagataaggggaaaattgttagatatacaccagcctgagaactagtaagaacatgaagcaataaaggaccaattcgtattactttatcttttggtcaggccaaacctggtcaccaggtccaacccagaaatatttagtgtttgtgaaccaaggctcattatatgtaactgacaaagataaaatctctccagataggaaatagacacatttccaagctgattccttaaattttcttatcttctttcttgtttcctccttctcataatcaaccttttcctttccaaatataagttttcttccaatccactgaaacgaaaataaaagaaaaacaatgaaagtgtcaacattaagctttagaattacattaacaattgaaaatgttaattatttaaagtaaaaatatctatgatacaacgtggagcctgagagaatctattagaactatacaggaacaagagtaattttctggtgggttcggaatacagaattaaagtagctgttgtgctcaacctttcaccaatcatgtatttaagaagcataaattactttagaatcataataaccctcatagtgaagcaaatgatctcatctagcaaacaaaaaaaatgtctcaaacaaatacagaacaaatggtaaccagatggccatgtgccataattgcagtaccctgtgatgtctgtatattgtagtcatgcatctgtctaaataattttcttgtgaaaaaagctatatgtaatcaacttaggtatcgcactccaacctagactttgagttagtaaatgttcataaagaaggcatcattgtgtgcttgtgcttaagtccatccatattagaagtgaaagaactctccctcactagtgtcttagttctccgtcctgatgacttgtaatgatcagaattaccttttaaataacataatggtatgtaacataaagatgaatagcatgctaacatatacctcaacatacatatcaagattatctaaaaaaaatctcaagaaaacatcacgacacaaatgttttcctggttacagatagcccagtggaaaggtatactactcatacaataaatgtggcggttgcaactattcttactgcaatgagatggttgcaatttgcaaatttataaccgcgaggtatttctagtttttgagggatataaattacattaaccttgctcaagatgctcacacgagagaaatactgctctctttatgccagaaaccactcagatctactcgtggtctgttgctgcactgagctgctgacaacctcaaattcgcagcacatcgctgccttatgccactgataaacagtaaattgtatagtcgtgtgataggttatgagagatatcaactcaacttgcaatccatttctctgctcgcaaaacccttctccttgcatgaacttttaccttaataaacttgtgttcaggctggcccagtaagtccgtcattgttcgcctcgaaaaatacattatatatgtattttcttaatggaagacaaactaacccagggaatcatatatggatcttgatagctaaatcactaaattcttattgtttaagatgttgaaactgtataccattattgttatagttgatgcgcctatgcctcagagatcacactattcatcaccaaagaacaaaccttaaatcttaaaccattatactccctgactaaccactgcagcgcaacacaacaggggcccctccgtaacaaaaaatcagattcagagtaccagataatcattagacaagagaagaggacgactctccaatacagcaatgccatgatgtaccagcacatctctcctgagaatccgagcgtttgatctctccccccacaattccaggaaacgcgaaacgcatgccaagctagcccgacaagcaatcattaaaacgctaaaaagctagcagcgcctttgtttccccccacacacataaactaaacccagctagctagctatccaacgcgatcggattggttggtgattcctccaacgcgaaatccagcccggagaagaagaagggaaaacacacacacaccagcaaaacaaaagcttcgctgctttccgcacccaacaggtcaacagtaacagattcacctcgaagacgaagcagtcgaggaggtagcggacgacgaggaagaagacggcgaacaaggggagcgcgaagaagtcgcggtacgccgggtaggcctcccgctcccagtccaccgccgccaggagccggcccgccgccgccgcgacccccatccgccgccggaggccgaatcgagtaggagcaagaaatcgatctctcctccgccgcgccggccgcgaagctggatgaagaaggatcgagaggggaggggaggcgaccccggttggggccggggtggattccgattggacttccctcctctgttcctcttcgccctctgactcagccgacgcctctgttttaccactacgagtctactactactccccacttgtttatttttattttatatttttcctttttttattattagtctcgcagtggttgcacggagtggtacaatagaaagcgcgtaatgaaccgtgttttataaggggtgtctagatagggctaaaactttttagcccatgttacatcggatgtttggacgctaatttggagtattaaatatagactaataaaaaaactaatttcataaatgagagctaatccgcgagacgaattttttaagcctaattaatctataattataaaaagtttactgtagcatcacattgtcaaaatcatgacataattagactcaaaagattcgtctcgtgaattagtccaaggatatggaatatgttttataattaatgtatgtttaatactccaaattagtattcaaacatctggtgtgacatggacttggaataagtccgtggaaaccaaacaggcccctaatcccaggaagctgggaattgtattgcatctaccgttgaaaagaagagatgggaattgtagccaggttgacttttcaaccatttttgacattttttttttgacttggtgtactatgattaataatccgaaaatggttatgataacttgtttagcgagttttgtgggttttttatcctatgggtaggattcatcgagattcaaaaataattgtatatttcttgtgtgtttgtaaataatcaataggtgaattatttgtaacttattcatacagctgaatataaatgttatcatacaaaggaaatgcatttggagaaaaaataagatcagaaaaatattagaccacaaggcaatgtcggtgttttttttttggtgtaaccttaacatgtatcccataaataattgatcattgttaaagcaattctcacaattctatagataggatttggtcacaagatagacccacatgagataaaaaaatgctttggctctgattaatgaggtgaatgcgagaggaaaataatgatttctttttcttgtggtagaccttaagcataagcataaggtataccataaggtaatactactttccacaatgtatatgactcactttataacttcaatcgttattttaaggttatcttttcatacattgtggttgtcctaagggtttataattattgttccttaacagcactgatacatcttttgttagagatattcttaaaagattcattttaaaagtattcctacaaagttagtttaacttctaaatcatgaatattgcacatctaggaattgtgagtgtattaatctactatataacaagatttagatcatagtgcccataagcatgactatgtgtagagtattggttaatacattcacccgaagttatacttctattgtaaaaaaaattaaagtactcaagtacaaaagtcaataagtgcatcacatatgaggattacgatgtaaatagaacattgcaaaagaacaatacatgatgtgtgagaatatatagtcgttttcccccttaagtatgttattttaagtttctaaaataaagtatttaaagatataacttgtacagtaaagtttccccttatgctatagtaattttttttcttatgttttgtaggcataggaactgttcgagtgttgaactattgtctttatactcaattctaagtagtagagagtcatatcaatccaaaataataaaggtctcgactaaagacgcacaagaataaaagagttaaaccttagcacatcttgatattgtcccttttagttagaggcttagagctatatcgtcaacatgatcaccatttgtttatggtcttagcaatgttgaagatggaggagcttgagttgtatggagtggttgctccttctactatgatgtgacaaggctaccgacatcaagttagatcaaccctaataacccatggataatatagatcaacctagaaagcgatgtttatctatggattagttttggttccactaaaaagttaagtttagttttggttccactcaaaagtttaagttcagtatgaaacctaccaggcatggatgcaagtaaatcaaaccataaattcacttaatagattaatcaagtggattgaccctgtaaattacccatctatttagtccaagttgatggatcaacccatctctaaccctattataaccagaattaaatttgaaaatacattgttcgttcaattttttctcaggaatattcgggatacaaatttttttgcagaaatataccgtcggtttcgcacaaccgttgcgtgaaaatgacgtggaatgacgtcgcggacggtattgcgcaaagaaaatgtgagaccgtgcggtctcgcgtagcgacgcgacgcgagaccgcacggtctcgcggattataagtgcgacactgttcggtctcgctcaagcaaggagcgataccggtgccattatgatttaattagcgattaattatcctaattagtgattaattaattattaattaattgctaactaggataattaatcactaattattactagttgattgttaattgattaattaattactaatcaaatggagatattggacaatttcgctgtttgatttcacgagagcgtttggtctcgctctttcattccgcgagaccgcgcggtctcgcgttatctcgtactttcatcgtgcgataccgtccacgacgtcaccatgttattttcgcgtaacggttgtacgatatcgataatatatttctgcaaaaaaaattgtataacgaatatttctgaggaaaaattgaatgaacattatatttggcatggacgatttgagatattttgattgggccgatctctagcccatatatacgtgtaggccggaaatctgaaaattctgtccacgtgggcccagaaaccttatcccctcacattaaaaattgcttaaaaatttcgaacactacacctgccgtctcctcctattcactccacccacctcgccggaatgctcgccgtcgtcttctcctccggtcaccgcctcctccccctccccgtcctccccggcacattcaccacccctcctcctcctcctcctcctcctctcctatcccctcgccgtcctctgctcgcccctcgccggcgccgctgcctatgcggcggcggcggtggcggcctcctcctccttcgcgccgtcgccgcgaggcgcgcgggcatcgtgatcgacgtcgacgaggtgggcgaggtcggcgaccgcgacctccccgtggacgtgtcgttcacccggaggctgccgccggtgctcaccctcggggacggcctcgccgcgctgcggcgggccggggaggaggtgaaggcctgcccgcctgccgccgccgcgagcggcgtcatccggttcgaggtgagccgcccagcgaggctgtgtgggaggggatatgtcgtgttttacagatttgcagttggtttcgttgtgagcagccgctgcaatatttgctgcgcggcggcgaggcgacatgctcccccccctcccttacgaattttaatccagcactgtgaaattattgaataatccactcagctccttgacgcaataggcgtaaatcgagctcgcgtctagctcattgtttatgctttgcgatgcatttggatttgtttatcccttacggtctaagcaacaagtgaaacaatgatgattaattctcagttctgacaatgcaacggtgcaggtgcttgttccacccagtacgaaggcgctcaaatggctgtgcacacagtttaagagatcatcattgtttcctcagttttatttgtcgaggaagcaaaccactgattcatcaattcagcttgaaatctctggcgctggctctgcaatttgctttcatggttcctctcgagtagataatgggtttgatttgatatcaaggtgcctcctctctattgctttccgtagcgtacgtgtgatgcagggtgtttctaactaaattaggacctgtttgtccctgcagatatctttcgtttaattcacacttgattagagcctatggatcagtaggtgttaaatatgacaaggaactattgtctttagaggagagaattggttcattttacttctttattcctcaggtaacaactttcagtattctgtggtgctactctagctacctgaatatttatcaagttggtgcgagatacagactatgtgtacaagccattttgaatttagcaaggaaaatcctcgaagttctgtgatatgacattccctgtataaatttggttacatggtttaatatcatattgtcagacaacagaaacagttttacacctgaatttttcttgttagcctttttatgattgtggtggggtcctcaaagtaatccgttggtgcaaagaaagtcctattctgaacatgcatgagtggcacaagtactgcacttatatctagaaaaatgacatagaagttagcctattagaacatttttttaatgtattaaaaagatctacataaacaatttacaagaggatcacaacgctttatgacctactttgactggtaagttattgcacagaaagtaatgcaaatgcaaagggttaaaagtggaggtcaacttggttgaggatttttcttgcattcttgcatacaagtcacataggaggcagtaagaatttacagaattctttcttggttatcttctgcaggcataatgtagatatttgatcttatagcattcgtgatgatcagcaaaattgaatttacaggttgagctgagtgaatttgatggctattccatgttatcgtcaactattgtttgggatgactccgtgtctcacacatttgaggattctgtttgtttatttgaatcttgtttcagtcaggtatgtggaactaactagattaagaaaaaaatatatttaattctgtttaactttctttcatattaatatagcatttccatgttcttttaaaacaattaattttctgttttgtattttcccctgtaagatatggagtagctatgattcttcagctactatctgttatgaaaacatggtaacaagttacattggagaatcgcgtatgtcagagagcaggaatactcagttggtacatatttctatcaatcttaatcactttgttaatttcatgaatttacgcttgtgccatttgttctccactctgcaaagtccatctgtgatgaagcttcagttgtatcaggccttcacatgaacactcatattcactattccgatgttcttacttctatgccttaattagttcacagggttttgagtctgaaacattatttagttatattacggaggattataatagcagagttttgtgatgtgctctactgaagtttgcaacaattgcttctccaatctctaatggccattcttcccaccattttgtttttggttgaatgataaaaaaaatcctctttttcaacaaaaatagataaatgaaacgtctatgccttttaacatatagaacatgctggcttccaaaaaaattagctatggctaatgatatagattgggtgctcatattgtattccatacagagttttggctattcatcgttaaccagtttgtgagttatggaacatagttctagtttgcacgcaaacactctttatagctgtttatgtatttcgacagttatctgctattcctattatcatcagacatcaaagtgctcaatttgattttgttgaatccactgttccaggtatacttggatgctgaatttctcgctgtaatagatggcaaagctgtcacggaaaaggtatcctcttaaccctggtaagcttctttaagctatttcattactttgcaattgagattaatccctggttttaatataagaaatgccccttgcaaaaaggaatattatgtttctttctttgcggtttatggatattttgtctgtatcttgctggaaggcacattcacacctatcacatttataatagtaattcaagattattttttttacgtccctgctgccctgcattacctggtaactaacaagtttgcctacctgttagttagttgaattgcttttgaccaactccacaaattcatggaccaaaaagttaaagtcaagaagttcatgggtacacatagacctcgccacaattattaggacagacataattttcctattatttcctttttaaactttttgttgttcatgttctcttataagactagacacaataaacttgaatttatatccctgatcggatatggaacttattcttttgtctgtaggagaattgcccaacttctgatcagtcatttgttcggttttcgccgcagttcttgttttgtgcaaacatggtaatggtttctacctgagtttctttttttcataaataaccattaaattattttgttaaatacttcctccgtttcacaatataagtcattctagcatttcccacgtttatattgatgttaatgaatctggacatatgcctatctagattcattaacatcaatatgaatgtgggaaatgctagaatgacttacattgtgaaacggagggagtacaagctttctgtagtaagccttttcctacagcattttctactttccaatttaaaaaaaatgatgcatataattagaatatgatataattggtgggttagcttaaaaacagatagtatgtaatttgctctctgtaattgaagttgtacttatctaatttttttataggatttatgtttgcaaagcaacaaaattgaatctttcattaggagatgctctaacattaatttggcatgggcatccttcatagttgaagaatttgtcaggcttggttttacggtaagcttaactgaatacatagctctagcgtttttaccatgcctctgacctggtttgctttagtacttctgtatagctccagggtcgagatcatccccacttgcactttctgcttcagtccatcctttgacaacctgcatatcatgttatgatgagcgttcacttggatttcatgctcttggctatgggagaggttctcggaagcctgcaatagtaattacatcatcaggaactgctgtatcaaatctccttccttcagtgagttggaacatttctctttcttactttttttatttccttacttccagcctttacagaaatacccaccatttgctgaaatcacaattcaacaagtcttgttgctataacttcatctgtgtagtgtatacctttatgctctctatgtgctactacaggcaatccatgcagtaatggatatatcaactattgagaaatagtctatagtgtttaatcaagattcatatgtaggtggtggaggcaagtcaagatttcgtaccacttattttactcacagctgatcgtcctcctgagctgcaggatgtaggagccaaccaagccatcaatcaggtattgtaactgaatacaatattacaaaaactaaaagtttctggcaatagctcctattctgaaaagagcttcgaatcagcactgttaattcagaattttggctaccttttaattgccttaaattgcttataagtattgtcatgcacataaagccaatcatgttgttcccttaactatgttttagtgtttattttatttctcagcaccatcaaaattatgtcctacctgtacaatccatatatattcctcacatgacctatgtgtctcactcaagcaaagacatatacagaacactagtcaaacccatacagtgaacttgagaagcaaaggcctatattcctcacgcaataagacccatacagtgaacttggaatttgctggattaccattccagtttatgcatatagttttatgtttatttccttttaatggcatactgcctctatagcatatgcaaacttatctggtaagcctatgatgttcttctgttattcttgtgaagaactcgtcacatttttttttaactattttcaggtaaatcattttggcagttttgtaagacacttttttagtctccctccaccagatgatcatatttacgcgagaatggttcttacaacagttgattcagcagcctactatgccatgcaagcaccacaagggccagtgcatataaactgtgcttttagagaaccactagactacggatatcaagattggagtgttgactgtttgaaagggttggacaaatggtttataaatagagaaccatacactagatacctaggaatgaaaatggtttctgcattaggtaactattcttgttcagtaagggaggttctggagattgtaaagaacgcaaaccaggggcttttattagttggtgctattcacacagaagatgatatctgggctgtgactttactagctagacacctttcctggccgattgctgctgatgttctgtctggattgcgaatgaggaaagtacagaaatcaattccaggactagataagagcatttgttttatagaccacatagatcaaattctactgtctgaatctgttaaaagctggaaaactccagatgttattgtccaggttcatctcctcactgattcttctttttattccatacttttgcattacctaatcatttgaattccttttcattatgtgatatatttataatgacacctttctttttttttttgcttgacagattggaagccggatcactagcaaacgagtgggaacatatcttgagtcctgctccccgtcttcttacatcttaattgatgcacacccatgccgccatgatccttcacatgttgtcactcacagaatccaggctactataactgaatttgctgctagtctgtgccagtgtaatttccaaacaaagacaagcagatggtcagatattttaatggttctgaattcagcggtatggtccataagagggtagttatcttgaaaatatgcaacaaaatattctgatagtatggataggataaaacttgtccttatgtgtaagcaaccttcctgaaccttagtcatttgtttcaatcattttctgcagtaaactttggtattatacaccctacacccaggttatagtataggtaaaaggtcaccacaaattgatttgaaatagtattgacattgaaagttgaaaactcaattgatatttaatgtctctttctgaaatctgtaaatagcatgcatgaaggggtttatcacttaaccaactgcctctagttcatatatttgtccccatggaaacttgactacataaggaattcaattctgtaagcatgcccttgaacagattttttctggaaataactaacaaacaccttttgttgccatcatctgcttttttctaatcctgataactgttgtttattccaggtttcacaggagataatgtttcaggtgcattcagaatgttcacttacagaaccatatgttgctcatgtaattggagaagcactttatggcgatgctactatgtttattgggaatagcatggtcattcgagacttggatatgtttggcaagggctggattgaccatagtacaaatgcaaataatgctatgatgcaccattttccaggctttcttggtgcaccagtagctgggaacaggggagcaagtggtattgatggtttgcttagtacatcaattggatttgccattggatcaaacaagcatgtaagttagttatttagctcatatgggtacttcatgtgatgaaatttgttaccctagatatggaatgcataaatgcgcttgctgcagctgcacaaacttggggacaatgaaaaacactatgcttcaaagagaatattcctaattttcatcacagccacctgcagttctcaaactactctgattatcttataatatttttattgtgtatttcctagatactgacagttgccaatgcatttatgctgtacttctttttgagtaagcttttggcagaaatttgacttggctgcactattttcaggtattctgtgtgattggtgacatatcttttcttcatgataccaatggattgtcacttctgaaccaaaggtttacagtttgaatctattctatgctatccaccaccgtttgtttttctgcgagtcattggctcattgtcatttccttaatttatttttcattgacccaagcatttgtttttgcattactacttagtcaaagaaataaaaagaactacagatattctctctgtaaagctattgtataaccatctacttaaatgaatatttatttctgataaagtgataatgcatctcacattcctgaaggacgcagaggaaacccatgacagtaattgtcattaacaaccatggtggtgcaatcttcagccttctaccagttgcaaaaacagcttcactccaaattttggagaaatttttctacaccttgcatgacatatcgatttccaaactctgtgctgcacacaggtaaaagcgattgttgtattctggtgcttacatacctcggccttgcttatagaaatacaattttaacaatatgcctgcctgatgctaacgtagcatcgctgttactgattctgggatttattagatgttttctgctgagacttctgcctgttacattattggttatggagtcagctgtggatacaacaaataactttctggtggcaattttgcatccccagcattctcatgagttgtatttcaggataaaacatattctagttcagacaaaagctgaacttcatgatgccttagtgaagtcccatgaggggcatgttgattgtgttgtcgaagtggagaatcgcattgttgataatgccaactttcataggttttatattcaaactagttcttttgattattttggtctacatcgcgtttatatgctcattctcattctgcagaattataagcatgttcacagaccatagtgcaaccatgcatctggcatatcttctgggaggtccatattgtaaggatggggtaaatggcttttctgttggtagaatacatgcagcagaatacatgttttacaggtacatccttaaccaatcaatacacacctcactcctgcacaggtcacacagcctggaaattctaaacataagtgtagctaaaccatgttttggattttgcagctgtacaaaatttagagaaaaaaaacatgcagggcatgctacaatgtgcagagacacaaattgtgcaaatatatgatcaaatgtattgtgtatcaccacacacaaaagacaagaaagtcatgttttggattttgcagcttacaaaatttagaaaaaaaaaacatgcagggcatgctacaatgtgcagagacacaaattgcgcaaatatatgatcaaatgtattgtgtatcaccacacacaaaagacaagaaagttattgtttgcaaaagttctgataagtcatttattttccttttggtacagtacaacgattatatttttatacatatttttttgagtgaacatattttaacatagatttttttatgaattttcaaaagtatacaatgacaaattacaaagtgtgtaacagtagttagaactgggaactctcttattttaggatttaccttctatgcaggatccaacttgctgcaccacgtacatctgggatatcagaaagcagcttctttcatgaaggtttcatactaaagttatgtgtgggtgacagcattgtgggattcggcgaggtttgattttattactactgtaatctgtctgttttttctaactcattgtgggccttaattactgttcttgaattatgctatactaaaatgttatcttagttgtctactcacagttttcaagtaggaaatggactggtctggagcatttctcctttacaatttttttagcttgatccaaatactcatggaagcatggaagtgggtccagatctaaactctgactttaatactagaaaaaaaccctcagaaccacagagtgggtgaacatttacataaaacactaattaaaaaaatactccagttaacataatcatttgaccttgtatattagctgaatatatgttatagcagtttaaggttacttttcatgttgtgcttcaaccagaatatctggcaaacttgtagtaggcaggatatttttcctcgtgcaaattaatttggtctaaaaattaccttacctcacagttttatacttgaagaagatgttatccttcaaatggataatacagaaaaatgtttcttatgcatgcccatgtttcactgaaggaatatacagcatattactggaggtttggtgttggttttacagtagttttattttatgtttattggcttctagtttttgtaaacttagttgaggctggtctgttatttcttcattcctcttaattgattggcagaactcctaactttgtttcgtctaaaaatatattacatgttgcaccgtgcatttatttagcttttattaagtattattttttacccttgtaaaataacaggttgcaccaattgaaattcatgaggaggatctgttggatgttgaagaacagcttaggtttctctttcacagaatgaaagatgctgagctagatgttgttcctttgttgagaggatccttctccaattggatatggacaacccttgggattcctgtaagttgacttaagaaaattttctgtgaaaaacatacgagagactgatatttttccgcgtgttcttcttcacagccttcttcagtattccctagtgttaagtgtggtctagagatggctattcttaatttgctggagtcacaacgaatagatagatcctatggtatttttactggctccaatgtggtcgaatataatcagagcagcactgcaaacatacagatatgtgcactcgtagactcctgtggcactccaatggatgtaacacttgctgttgtcaaacttgttgctgaaggtttcaccaccgttaaactgaaggtaaatcttctaccagttcagtaattataggaagttgaatttattagcttctaaaagaatctgtacattgcttctttttaaaatctcccaaaggttgggcgtcgcgaaaatcccgctgaagatgcagctgttattcaaaaagtaagggaaattgtaggatacaagatcaatatccgtgctgacgcaaataggaaatggacatatgaacaggcaattgattttggatccagggtaaaaggcttatgtttgcaatacatcgaggtaatctgccttttattcatctgatatgcatcgaaaatctaaaatagacaaagcattaaatttgtacccagcatatcataatactggttggggaagagactgtttttcatgcagttcttccttgagagtcttcatttgttttaaccacaggaaccagtggactctgtaaatgacatcatcaagttctgtgaaaatagtggcttgcctgttgcactagacgagactatcgacaaccttacaggggatgtaatccctaagctacatcaattttcacatccaggaatagttgctcttgtgagttcaaactttacgggctagttttcaagctgatgcttcattttctagatttgacctcattttcatgttgatattcaggttataaaacccagtgttgttggtggctttgagactgcagcttatatagcaaaatgggctcacatgcatgataagatggctgtcatcagtagcacctatgagagttctgtaggtttggcaacctatatacagtttgcacattatgttgacagacaaaatgacataacatccagaataaagaacagaggttcttgtggaaatgtggcacatggacttggaacataccaatggttaagggaagatgtttcagatcaaaagttaaaaatccatgcgccaccacttggtgatggaatcagagcttcggcagaagatgcccatggctatctccagcatttagttataaacgacaagaagatagaaagaacttatagtgaagaaaaattgaggtcatatttcatccaagttgatggggataatttttcttatcaagtcaagcttcaagagggtggtgattgcacacatgtaagatttcttcaattttcttttgaaaaccaacagtttattaccagcttgttatataagagggtttagattagtgctcagtgtctgacacgagatccatggctagatatttgcagtatgagagcaaattagatgattaagttgcaaacagcaggagctattgctagtagcatattaactggaatatattgctaagcatatcatagtttcaaaagatggaattcttttaatcgacatgtatcctactttactcgggatttaaggaggtatgctgtagaccgcggaactatcacaaaggtctgcagaatattgttcacgtattgatttaaaactactgttcttagtactaacagttaaaattcaagtgaaaacattattatctccatatgaatgattcaataatatatttgataggtccttggttcatttcttgaaggaagcacattcataattacatgttttctcttgagtttgtctttcttgctaattatgatgttatctgttttctattcacatcattcaatcaatggacaagtttcatacattctgggagtgctttgacgctctcttttcatttgtgtgccttgttcctaatctcagtaatagttaaatttctgcttatgtttttactcctttgattttggttgtccagttatccacttaaaaaccagatgcaagcatatgttcaattatctaagttttacttgcactgtatacttgagatactggtagtttctccgtatgtagtaagatggtgctgtcacagtaactattgtcatgatttaaccaatgtaggaaaaggttattctctttcttcatggatttcttggtacgagtgaagactgggttccaatgatgaaagctctctctcctagtgcacgggttatagctgtcgatcttcctggccatggcgagtccgaaattctacagcatgatgttgaaaactccaaccaaatctccttttcagttcaatcagttgcagatttgttactgaagttgataagaaatataactgatggagcggtggttgttgttggctactcaatgggtgcaaggattgcactacacatggcattaaatcaaaaccacaaggtaaatttctcgacattgtaccttttgtgtttatttctttatttttatgattctaacgcagtcccgttaagacagataagtggagctgttataatttcgggtagtcctggattgagagacgaggcaagtaaaagacgtcgtagtgctattgatagatcaagagcccacttcttgtcttcttgtggactggaaaattttctcgagacgtggtactctgcgaaaatgtgggccaggtaatattgttatgcagtgacaatatacttttgttttgccaaaaatgtattgacatgccttttttcttttccttttctgggatattttctgttgatggatgaccaaatttacagtttacgagaacatcctaaatttgattctctagtgaggacacgaatgaaacacaataatatcaaagctctatctaaggttctcgctgactcaagcatagggacgcaaaagtaaggcttgccttcccatactccgtattatatttttcattgatgatatccataaagtcatgttccatcgagtccgttagtaattttgacgttaatagtggtaaaaaatatagtgtgccgatgatacatatagagcctgtgaacactttgatggtcatattacattagtgattgtgtaataagaaaatcatgtgtgattcgatctcatgttagtttcaatgttctaggtccctgtgggaagatttgaagcacttgaagagccctctcctcatcgtcgcaggtgaaaaggacccaaaattcaaagagatatcgcagcaaatgtgcagggagataagaaagcacaaggatcgcgaatccgatggtctatgtgagatgatcattattccagacagcggccacgccgtgcacgttgagaaccctcttcctttagttagagcaatcaggaagttcttggtaagggatataccagacgtgatatccaagtagattacgaaatggaattatctatgtagaggagttcaagttacagcgatagccagagacagcagagcagaccaactctttggtgcggatgggtgcggcagttctggatgctattctgccgccggtagtctcacctacaccagcccgggaactattctcattgtggactggtgggggaggattaaagattagatccagagagaagggatgtgactccattatcatgcaaagttcctaaccatgtgacagacttggtaaggaaagaacgcaatgcgagggtcttcagagatgaagattcttccctccaacgagtagcaggaaaaatcatcattgatgagcttcacgtatagcggtataggagtacttgtgaggacgaattctaggagtacttgtgtgctgcagcattgtcccgagctgtacagtgctcttttcatattttgctgctctgtatatgctgttgcctgttggttagttgccactctctctcgccgtgacccttttttattaatacaaaatgatatgcaagtcctatgcatatccgtgaaaaaaacatgttggccagcttcacatccgagctgagctcctgacacagtgacactactggggaaccctttgcaaaccgagatatctaatccgggactaagatatctcgaatggtgttgtcaatcgggactaaaggtatttttttccttttttttcattgtttattactacttgcatattacccaaatccgattgaacgtacatactcaacaacaatttgataccacagattgaatgaacatattcaacaacaaaatcatacataactcattgctatgcacaactcctaggctgtgtttgtataacgatgcgttttttacaaaaagtttctatacgaaagttgctttaaaaaatcaaattaattcatttttgaaaaaaatagctaatacttaattaataacgcgctaataaaccgctccgttttccgtgtgagagggattagttcccatcactggaatccgaacacatccctagtctcacttgcaaaaaggggactaatttgcagctacacttcttcaaacagaagattaattatatacatgaacattaattctgaactacagtccttcagaaaataagaaaaagagaagagaagaacaaagaaagaaggagagctcctggccgcgctcgccgcgatgctgttcgttcgcgccatcgccggcccgggcccggcgctcctccctcctgtcaaggacgaggatgccgacggcgatggcaacccggaggccagcggggaaggaggcggagtgcctccggtgacgataaggtgggcccgcatcacctgtgccgcctcccacccgccgacgcctgccaccgcccgctgctgacgccgccgacagaggggaaggggaggaggggagagcggtgtcgccgcttgccgcccgctgctgacggagaggggagggcgctgtcgccgctcgccgcccactgccgacactgcgacggcagagacgggaaggggaggagaggggcgggggaggcctaacatgttgattgctaccggttaaaccgcagtagtcctgccgtagactgctcgccaattgtcggtctgaccatcgggatccaaaaatcacatatcgacgagacgaaactcttgaaagtagatcaactttattgcatcaatatgtgtttacaaagtgtatctaaagcactcctctgtcaactagtattgaagcctcgaagcaaaactataacttttctctcctaaaaaattgatatacttctagcatcaacccctcatctatttatatcctcaacgtggctacccctagccacaaatcctacaagaactagaattcccaatcacataggaaacctactcaacaaggtaaacaacattctcatacaactccgcgctctaatctttctaaacttggacctcttcccatacgtacacaacactatgtatatactttatggaaaccttcactccacatgcatggtttctagcctaagcatcctgtgtgatatgaccatttggacctcaatttcttccaagcctagtcctgatccattaccgactatactcacataacctcaagcaacacctgcacataaacaacaaagagactctctgtattcgagtataagttcgcaccaacttgactcatatcagcataaaatagtatcacatacaaaaagaaacatctaaaagtcataaacatgaagcaatttagaaatcccacgaaaacaacccgaaaccaactacaacccagagtctgctggtctaaccgccgggctatccaacacctccggtctgaccgaccacccattgctgactgcactattcaccgaccgaaaacattattcactgtattttcaataaacacttacttttgacaattgtttatcacatagattaaatcaacacattaatttcacagtaccaatcgcctacaactacaataacactgctgatcacctaggtataaagcaacacatcattatggactttaaatgggatatggtgttacaatctcatctgctcaaagctgatcgaacaaatgaagtttgcagttgtaaagctagaaatgaatctgcttgatttgtgcaataaaactatgctcgaaaccacttgctccatgtgttttccgccttccgtttgcaatggtactgttgctaccaagttgccgcggtcggttacttttgtgggttaaaaccgtgtcggaattcgtaataaccagccgactgcacgcagagagaggcatctcacacctccgccttctgtgacttctgtcccgattcctgaatgttggtttttcaaaacttcctaggggtgcgagtcttgatccatcccgggtgccccttgccttggatcctggtcttttaacactagtgtcagtgccgtagaatcgctctacaacttccctctttttataaacgagaaaacctgccgccgcgcaggcgcaaccatgtgagaagtgttgcccagtcacacgctcacacacgccctgatcccaacacaaaatttttcatcctgtcatatcgaacatttaaacacatgtatgaagtattaaatatatgttaagtaactaattacacagattacaactaatttacgagacgaaccttttaagcctaattgctctataatttgagaatgtgatgttacagtaaacatatgctagtgacggattagttaggcttaatatatttgtctcgcggtttattgatgattttataattattttttattaatgtcaaaacactctatactacacgccaaaactttacaccacccatgtattagaaaccagtctcatggcgaattggcgagatgtgtgtgtggtgttgtggccgattggccgcgggattccaacagggagctcaactcccgaagcccagccactgctagctcgatctcggcagaaggcacggcaccggcacgcattgttgcagagcccacacgtggtgcatcagtgcgtggcatatggtgcaagtgcaactaggaccgagctgtaaaaaagaacaacgcctaggcctagggcttgttaaacaagggtagaaacaggagtacgtacggcatataataacagtgtgtgtaagaaatctgagatgagttttgagcaaagcctttgaccacgccttcctctcagctgactgacaaattaagcggctaagcatttgccttcctataaagatcttactactcgatctaagcccccctctcctctgtacactgttaattttctcactcactgactgaccaagctagctaagctagagcagaagagcgtagtgcatccagagaaaagaagcacgtacgccaagattggagttcagttcatgttcatcatgagttgccgaaggacttcgagtcttcttgtgatcgccttggtcatctccttgctcttacttgaccgtcccattgctcacgcacgccattgtaagttcatattcatctttgcagcaattaattgttaccatagtttttctctgagaaaagcaccatgaaatttgtggcaggagcatttccctttttctttcttcgtatgttcaactattgttgattttaaccagtattactatcttttttgcagtgaagaacacgtccatgtcgagccgtggttcatcaacagaaagaggattagaagattcaaagaagaagctcgatgaggagaagaccaagaaggttgaagccgtgcaagttggatcaaactctgtccatggagggagcccggatgttcatcagtttgcgaagatagtagtggttgaacgccggggaccaacgcctcaccctaagaagcacaacttatgagtatagatagccaagatagatggatatatagctgccaagttcatcccgctgtatctattttgatttagactagcttttctttttctcagttttatctttctctccctaggctaagataggagaggagtgaccaaactccatagatcatagctagtagtgtactactttccagcagcacgtcgttgagaaattaacctcaataaagatgtcacatatagcatcttttcaattttgtagcctgtatttgactactgatttttcaatttatttagaattttttttgaaggattcaggggtatccgatccatggcgttctcttgagtccagagagtatttgactacggaattctcaatttatttagaaaatttttgaatatggaagggaggaaaaaactagaattttttttttgaagaattgatggatacccaaatatccaatgcgtcctcaagtccatgttgagagggagattgacaactgatttctctaagatttttctaaataaattagagcctcttaagagggggataaaaaaaagttgagagttggtaaagagggggtcaaagtgcgcgagccctttttgccccccacaagagagaaataagttcactttgggtccctctattttttgtccgggtatgatccgtcccccaacttacgaaaaccgggcaaacgtgatccctcagcggttttggctggcgtgacgcatacgtgacttgtttgaataggtctttcgtcccacgtggcattgacgtggcgcttacgtggcaattatatctaaaaaaaataataaaaaacgtggccccacatgtcagctgcacaaaaaaataattttaaaattgtgggggccatgtgggccccacgtgtcagtctcactcctctcttcttccctctcccttctctctcttcttccctttcccctctctctttctctttctcaggcagaggacggcgcgggtgggcggcggagcaggcgagctccggcggcggcggtggccgtggtcggcgccgccgctccgcgtgaaggcgagcagcgcggcggcgccctagacgccatcgacgctgccatccatgtcgccgccgccgaccacccggacgccctccgcgcgcgccgggacggcattgccaagcgcctctacaccgcgctcgtcatgctcccgccgctgcttgccgccgctccacaagccgtctacgccgcgctctcccctcccgacgccgtgctccgtctcctcgcctccctcccctgcgcccccaattccttcatgctcaacaccacgctccgtgccctcgccttctcccccaacccggcctccgccctcggcttcttctccctgtccgccgcgacagcggcaacagcagcggcagcggcggctcgtactcccctcactccctcccgggcacgcgcgtatgggaaaggggaagaggaacgaaggagctagagccgtgccgagctccctcctctcccgccggcgagctagaagggcggcggacggctaggcgagctccctggcctaccggcgagcgcgcgggcgtcgctccctcctctcccgccggcgccacacctgtgcgtcagccatccgtgtgcggtccgtgcgaggcgccgctccaggcgtgcaggcttccacgcgcctccttcctcgctcgccgtcgccctcccttccactggtaagtgattcgctctgctccatgtgcgtgagtggcttcgagttcgagatggcaaatttgagtaaattccggagctcttgaacttttgaaattggttccgattctacgtgccttgttcttaatcgagtgtggtttcaatgtacgcgtgtgtttctggaagttcggtggattggaggaagggaattggtttgaactttgaactaacttggagtccctcggttggatttgagcatctgtgatgaagcagtggagaatcgcctcataaattgcttgtctatgtttgcattgcggtgatttgaaccttgctgctgtgatttcagtttggttattaggcgatcgcaacataacccagtgaagcaattctggtgctgctgtttgaatcctctagctctggattgtggttaactcttccattctgtcgcatttggccaactgaattgcctgttctgtttgcgtttctgcattgcagtatgtgaatctcgttgctgtgaactcaatttggtttgaagtgatcgatcgtggtcacaacttaatccatctgttgcgcaagagagagatggccgcctctgccccacgcgcctcgcgtgccgccgcgcacgccatcgcccgccgccagccatgcgctgtacatcgccggcgccgcctaccgccgccgcgccgcccgtcgtgctggacgccgcccggcgagaggagggagcagagagatggggagagctggagagaggaggaagaagaggattggatttgatcatttgggaatgacatgtcatttgggcccctccatatttatttttaaattattttttctatggttgaattgtgggaccacgatttttattacttttccaatatacaattgccacatcagcgccacgtggaacggagaactagtctaacaatccacgtcaaccaaaaccaccgagagaacttgtttgcacggttatggaaagttgggggacggggcgtagcccggattgggcgacaaataaagaactaaagtgaacttattcccacaagagaaggctcctcgtctccttactacgtggaagcccgcacctgtggctaaagcgcaacccaaagtacactcgtaaagcggtgcgagaacacatatacacagccgcctcccgcctcccccccatttatatccacacttgcaaacgggctcgcgaattatcacgatgaactccgctaagtggtaagctcagcatgtgagagttatttctgtccacagacccgcgacaagcacgcgaaatatcacgatgactgctttaaagttagtgggctgtgcgggggtaaaaagtttattttctctggggcctttatttttttgacatgggctctaccgacactgaccccgggagcaatgcctgcctcgggtaaacttagacccaggacgagagactagcgcccccacggatatccgactcgttaccaactctgccctccaaagaagctggagtttaaggcccgcgctaccaggcccggcgatggagactccggggcgcactcctttatcctgggggacgcgctccacggcgagcggtatggtactaaaaaataatagggtcggcggtgaaaaaaggagacgtgccaccggaacggtgagagaagcgcttcccctctcccctcccagtcccagtcccatcgcgacatcgcgtgatgaactgatgatcgccccagtttcagattccagcactttggtcgcagtttcagaaaaccagatgtcagttcagacttcagaattcagaccggaagacgaatattggtatgatgaagagaaaaggaatacgttctagctcctcaaaggctcaaaccagcaaagatcaacacaaactaatttttttttacagatagcaatgcaatccaatgatccatcaccccctaggctacacgctatttatacacctcttcactcctcttctcgctcacggtacagagttacaagccactgacaaaaccgacaagccatcttacctgctacaggaccaacaaaaaagaagaagcagggtatacatatatggcgtgcaaatcagacacttcggtggagttacagatagatttcgaccgacttcagcagcgcatcagaatttcagagattcttcaggaggtataagaaaaggggatgctcagaatttccagcagaggaagcccttattccagccacggcgccgcttgtttcgcctccgctccgctctcgccatcctcaccgggctgctgttccaatcccactgtaacctgttcatccaccaaagcagcacatacctcccaactttcagttttgagacaaaagttgttcatgaacacaaaagaaggtttaagtttatagttgtaacatgacagagtggatgaggatggatgcttacactggaaatgcgaaggaccgggtgcttgtcgtgctactatctgaccggatggagatgttgccaatgtgaccagaggtcgacactgggttgcacatgatgctaggcccaagagagcatggctcaaggggatacccattgccaatcagagattttccctttgcattattatcaggcacatctagttcatccacatgagtggaatccttttgcgcatcggtagaactcgtgctaattctgccatcgtttgttgcgtctgcgcagctctctgaatctgtctggttgaaatcatgcacatcagtagcaccatcgttgtcagagttcttgttgttcatctgcctatttgcatcactggactctacaacatgaggtgatgaggatgtggccactgcattttcatcctgtggatccgctatcggctcgctggtgaagctttcggggtggtcgttgctcttttcggatggttggacttctgaagaactacttgatgtcagagcatcaggcatggcttctgctgttccaacttcgttaaattgtttggagccaattaaaccgtcagtagtctcagcagtggacatgggtttatctaatgctgcggttgcatcatgtctgtcagatattgttgctgatgaaccgttggtgttattgatacttgatacgttgctagtaataagttcatcagtttttgatgcagttgcaacatcattgcagtcatttgtggaaacctgcaatgtggtgtcaaacctgtttgtcagtctaaaaaaccaatctaaggatgattgaacttctcataactatataattcaagttatcacccaaaagagtagggtcaggtaataaaaaaataataatgacaaacctggtgatagtggtaatgagaaaacaaatttgattacagattaagccagtaacttatgtggttacctgtgcaatagcctcttcatgaacagggggcatgtttttttcatttattgcagaagttgtgctttgatgctgggtctgggattcttctgcactttcaagtttaagtctttccttggattcttctgcactttcaagcttaagtaactcatgcaaacttattttcttctcactgatatcactagcagtatccctgctttcaagatcacattgtttctccgtgttatcgtcagcagcgaatccaacaggtaggagaacagtttttggtttctgtccatgtgcatattttttagcatcacctttccccccatatgttagatcactattcgtgtctatcattaggaaatcaaaatttggtggtgacttctcatctaactttttttctgctgaaattttccgatgcggaagtactccttcatcgatgcagacatccttgacaaaattgccaccataatcagaagtaacaacagtatctggcaattttatctccaaaacatccttgtcgtaagaaacatcatcatgtactacatgtccagttatatctatcatatcttgtgttggatttgaggcttctaccattttccctatcaaaacccagccaatcacttttctcgtatacttctgtgtccagtttcagtctttcagaccaaatgtagctatcaagctacctccatcagaaatttcaccgttgtcaaaattttcatcatctgtcaagccaatacaaaaatatcaaaactttcacaaggcaaaaaaatatatttttaaataaatgtcatgctagcataccaagttatcttttttgacatataacccaagactgactactaatacacgatgaaacatcatttgggcaaatcctacagaatggaatgtaaattcaacctaattaagatctctagcattgtcctcttccattttggttgctaaatcacttttaatcagttataagcattaaattttcctgtagtgacttgtgactgcaaactgccatcttcctaaaatatagtatatgaagaccatgatagggacaattctccccccagtctgaaactctgaacaaagaagctggtggactggtggtagtcttggtggaaccaacgtatatataagcataagaccacgtcaagacattgatttttcattatgagtatcatgccttcccacttaacaaatcaatttttgacaggtagagctgcaaggcctgcaaccgagatcgatcgagaccccgaatacacacaattggatccttttctcactcttaagaaaaggccatatcccctttcagtgtccacaagttgctgaaaaaaaaatgtagactttcattttgattgggatcaagttgaatttctgcattattattactaaaagtggttttcagtttttgtaaacaggctacagctatggagtcaacagagtaggttttaggtagtgaataatcagtgttcgcaactaacgatgaatcacttgctggatatcctaatttttaagtagcagttgactaccctagctactctcaacacagcagttgactgcacaatttcttacagcttacaagaacaaagaatattggcacccttactaaccaagcaaagttaacttgaaagtaaaaaaataatcctaaattttatcccagccacagtgatgtattgaccgtactagaaaacagttggtgttcttacctactgtgagtagacaagggtgcaactgaaaaggtcacctagtttcacgatatagatgcagatcttatggagaaaagaattgcttatgtcctgcatgcgaaagaggtataataagatgggaacaacggttaagcagcagcaatatgagttctaataattacattgaatggataaactcgaacaacttaatataatcagaaaagttactgcaagtattatttttttctgtggatattgacaatattactagcaacaaggaatgctgattattattattattttttgtaaactccatgctctcgcattatgttaacaaatccggtcaaaataaaatgaagaaaattaacacgaaatcttgaaagctgtcctgacgacaaactgaagcatctcacgtcctttgcatgagctagtagtagcctagtacaaaccgcaacatcaacagaaaaaaacatacacaacaagcatactcatctccaacacaaaatgaagaaacgtacggtttaagcatgctaggcatattagatttttcccaacagatggcctcgaaaatactacctcgatcgaaaatcgaaatagttgtttgtgattgtaacgaattctcctttctctctctggaaattaacatacagcctctaccatctgtttcagacttcagatgagggaaaacaaacgacactgcaatctattaacccaaaatttttcaagatttaaacttcctgtccaattatttaaacatatttttttctaacataaaactgccggtttatttgcatgatacggagtacggagatgcgccatcaattggtgcttctcctcgtcctagacatacagtacaatacagacactgtctcctactactcgtcaagaacagtttagaacacattacgcaacaacaaaatacgcagaaataaatcaaaacaagaatacatcgatcgggtctacggccacagattcaagaagctggcaggaaacgagaggaaaaattaatggacattaactacatggagcaggcgttgtctgcagctaggtggcgccctctccccacacacaccgcagttactacggcacaggccggcaggcaggaaagggagagcttaaccagcaagcatgaggagacgcaggaaaaaaaagaagaagaaaagattgctgctttgatcttgatgaaattcatatgagatgctcatgaacaaaagtttttttgaaactatgttgctttttactctgtccaagcccacatcagtttttcttttaaaaaaaatcagagtggagtaagtgagtttgacaagagagaaatttacagtagatgatgaggaaagaagaatcaaaagcaccaagaactcatcaacagaagattagaacgaaagatatgagcatagcgatcaaaagaaacgacgataagagagagagagagagagagagagagagagagaggaaagatcgagagcaagaactcacctcaagttcagataaactcggcaactaattctcttctcctacctcctcttccaaaatcgaaagaaacgtcaaggagagagtttgcaagcagcagagggagaaggaaggtatgagtgagcctacgggggatcgcaggaagcctaatgaacaaggaattcggaagtgaaggagaaaaaaaaaatctgaacggaagcatggacacttaaataaaaggcatgagggcgcagagctgtgcaataaattcgatcgatgctctctctctctctctcctccctcttccctccctctctggatgatggatgtgttgtgtatatttacaggccagtccttggattgcttacaacacaagttgctgggacaatttgttacaagtgttccaacttttgtggtttggccctagtgtgtagggagtattttctcatgagtttttcagaccaggtccgattcagttgggtacttgtatgttcatgttcactaggaagaatagcattttcaggtgtcaaaaccttgtgacctgaaatgtctttgaagcacactcaaaaaatgactttaaagagtatactgtaaagaaaaaaaagttcattttactccctcaaattattccaccagatcacttaaccccctaaattatttttggctcattcgactccccgaactattgaaaatggttcagcttgctcccctaacactatttctcttttttttttctctctatacaaatcatatttcgtaatcaaaatttggtagaatatagatgcatttagaacttacatatgaactttttttttgaatttttctaactatttatatagttcgaaagcacttaagactgatttaaacatcaaaattttaaagctgaaacaagcatccacgaaaaaattcgaaaacattttcaaactttaataatggtattagttatggcctaaaaaatttcaacttaaaatacaacttgtattaagagtaaaaaaatagaaatgttattaatcagtaaagtgatccatttttaattgtttagaaggtaaactgaggaaaaaaaaacctaaggaggttgagtgatccattgaattagttaagaggagtaaaatagaccttttttactgttaaaaataatgtcttggttgcgttggagagtatcgaaaagtaacaaaattcatatttagcgaaataaggtttatgtggctatatagatggttctttttaagctcggtgagaaatagagatgcttttttatttaactttaaataattattcttctatgcagtataattatttttaccatacaaaattttgtgtaggttatggatactccacggtgcatgttaaaatatgagcaagtaacttttgaacttattttctaatttctaaatgggaaaaatatttttcgcactaggccatctgaaaaaaaaactctaaatttgacaatgttgatagtttaagctgaattcaaagcacttaaatgtgggagagttgtctcttaggaatatgtgacgagatgctagattactactcggtccagaaaaaaaaaaagcaaattctagctacgaatctgtatacgcatatgtccaggttcggattggatttttttaatgggacgaagaggaacataattgatgttttcctagcatgttcttgagtagcatataatccatttagtatttcattatccatttccactcagtggattttcatcttacagtagatagaaaataagatgatgttgcatttttacttcgactaatatacataatgaatgtatacaggtaagaatgttcctagcaaaaacaaaacaaaacaaaaggaatgttcatagcataattctgttgggattttcaaatatattacaatatataggaaccaacttatggatctgaaattcagaattttgagactcactgcttccgataacatttatttttgaatcagagggagtatatatatcatagagcatatcgcgtatatagaataaatattccattttaagtaaatgaaactatatctagtgaatgtctggtaataacatattatgagcagggcattattgagaaatggtagataagtcaaaggagagaagcattaaatagaggaggaaatggcgaaatcaaaccagcagtagaggacagctctcccacatttaagtgctccaaattccaaaccacctctacggacccaaaatttattagacatactggtaccaacgaagcatttctagacagggaaaaacttttaaaattaaataaaaaagtaccaatttgatttttttgcttcaatttcatagtaaacgatgtaaccttttcacgtaaatagaatcctaattcttgctatttggaatggatccaattatattgagtctagctttcttcttcgagctaaactaatgacctttttgctatgaaaatattttttttccttcgaacaaaactaatgtgaagtccttttcatcatagtttaagactggcaaaacaaatattggggcagatgtactgactgtgaggtttgtgtcacttgataagatgttagcgtgcgaaataatatactctacacataacaacatgtcacgctactactcttacatgttttgcatcatggtactgtgtagtaaatgtggtactagaaaggtacatttattagtttctccaacagtctgtttttggacaaagttttgtttttcagtctaaaaatgtgttgctttctgtagctgtttgtcactaaaacatatcaaaattgtcatctgaaaaagacaaaaaaattgcaacactttgttttgtaaaaaaaaatttaacaagaatgtagtcttctttataataaagaatacaccttagtatattttgaccgaagttttggaaattttgaccgaagtttggaaattttaaccacataacgacttgctgcagtagctggaagtaatttgtggattatctgaaattttattggaagcaatatttgtttatttaaggtgggaaagtataaattaaacttgacaagttcatttccagtaattgatttagtatgtatcttggcgtattattctttccaaggaaattttacagcccaattagtgtgtatcatctaatgaaaacctataatcttcagagagaaattttggtcttagattgattggcaatatttcatcatatgaaattttgattgatgaaagccgtagaaagaatctctgaaaaaaaaaagttttgctatatggatctcattatattactacaagatagagacaagatgtcaccaaagccaagcaagtactctattggcagctcgtctgctaaattacaagcccaaccatgatttgaattttgaaatatttgataaaaaaaataaattttgaaatataattttaaatatatctagttagttttcatcacttttctattattcagtcttgtttctacaacgctaagagtagaagtgtaaaatttctgccttaaaatcgtttttggctgctactatattgacatactagaaatgctagactctcgaaatcaagaattaaaacattaatgaaatgcatatacacaacaccatcaagctaagccatctaaaccacatcctgccttccgttaggtttcgtccgatgctgaccaacacttgatggctcataagtttcaggaatagaccgcccaactaatcgaaacattgaaccgaaatatttcagcttagcttgcacactgacgacctgacagggatgcagtcaattcggcaaaaatatgtttaattcaattagccaggtcatatgatctgacttgtgttttcttatatatacaacatgaatatgtagtacacgaatgttataatattgtcaagggacaaacgctagaaacctggcctgagctcactagatttgattcatgagatagttttcagtgacagtgctaccatattactatattgctaactatgttctgtttcatccgatagatcttcctttttgaattcccatatctgaattccgcaacactgcctactcttcgttttgaaagcaaacaaaagaggagataatcttagaaggatctttccatgtgcgagagccatttggccaaacttaattaagcagagtgcatgttctcatgaacatgggatgcgcttcctgttagctaaagtaagatacatataagtgcaagtaattaataaattgtattgattcaagtgactactcttgtatgatatctgatcttgggctttgtccattcagaagggcaatgtgtatatttgcattgaatggaaagagactcagtattcagtatttgcaaaccacaggtaaaagcaatgtctcatggcatgggccgagcagatctaaatgtagagatgccattgttgcattctaaatgaatgcttaatgcgtcttaagtagtttggagaaagaatgacattacacagccgtgtctgcagaacgaaaacctgtacaacaccttgagtatcaagatctccattaattcatctaccctaggactagcagctggggaaaaaagatatcctttttgataccaaagtgacaaaaactggaaaggaagcaaatcaacctaacattacgatgaccgaaaagaaagacggcaatcaacctaacattctgaaaatatcctaggaaaatgttcagcatctgtgctgacagttcttctcctgaaactccccggtcaatggagcagagatgatccaccttctggcttctgctcgttgcagcaacgtgacattatgtttagatcctacaggatgttgggcacttgacttgagaatttctcctgcaattcccttatcttggaagagagctccaccttctgctccttgtagctctgaagcaggaagtccttcccttcgataacttcctttagctcaccgacctccctcttgagcatctccaccctttctgcctctcctttccttttgtcgaggccaataaaatgcagctcagggtcatcaacactgctgctatcagcatagccattggcatgcccattggtggcacctgactgccaatgcccagccagcaaaggtttatcatgagagagtgcttctgcaacacaatgatctgcaatgatcttcctcaggtgctgaatctctcgctcagattcgaagagatcacggttagcggaatccagctgagactgcaaattggtggaatgtgtctcctggatgttaagagagtttttaagatcagcaatctgagcttgcatctccatgatcatctcatcacgtttcttgagatgctgcctcagcttctgtataacctctttcttgctatagatgtcagatcctgattctgaaacacaaggagagccagaactgtttgagtactgaaatggtttacgaggatcctcaagtcgatcaggtgatgatatccacatgacgccattattctctttgcttgattctggtcctggtatcttcacaagtggaagggagggttccatctgttttgatgcaggacttgcaggtgcctgctttactcctactccattgcctgaaaaccctgcaaaaaatagcaaagaataaatacttcccatatgttgacaaagtgccatggcaacaaaaaattaacaaaaagtttttaaacacaatttacaatgtggaaactacaacacaatacaatgtaacttagttatattaattccaggaacataaatgtaagaacagataggaaacatgaaaattgcttaattgtctgtaaatgcttcacagccagaaagacaggaataaagtaaagctacaccagcactttctgtgtatcaaagtgctcgataaggaagtaagaaaatgtgataatgacaatagtactccactcatataaaacattatcttcttttctaattttctttctctgtgcataaacattcttctgtacagcagcataattatggtcttaactcttgactaatgactacagctggtaacagacagtgcaagattaggtcttagagttataacaaacttacatatcaacagataatttctgtatgaaccagaaaaattgagcaagttgcaatttctcaacactgttatttagttctcatttctggggatgttgttattctaccattcaaatcgagcaagttgcaattttctcagcagtgctatgttatcatttctgggttgttgttactccagcattttgcacgaaagcatcttcgtcaagagaatcctagtagacttagttactctgtctgtgataagttctcaaaagaacaacgatcaagtgcgctttcatttcatggaactaatcacactatgagctaaaatgagaggcaaacctgatggtagtctgggcctctatagtacagattatagaaggtagcgtggttatttcacggacgactaataactttttcatcccactagtagtgattttgataaaaacgtgcctggtttttggaaatgtcgaagaatgatgcttaaatattttttcccaacagtttggtgtacaactcataattttttttatgagttgagatcgagccttgaaagtgagggaagaagggtattcagcaagtttgaagtgctgaaacaaaatgttatgaatgctgcagaaagtattacgcctaatgtttttccattgaagctatacaaagataatactgcaaattatttttgaaatgcaaatagcatatatgcatatcttatgatactgtaactaagatagttttgcattttaactctataaattgaaggaagagtgataacaatcaaaaccacataggctggcaggtacagcacacagtgataaaaaggcaatagatcgtattaagttacagaagaagcacctgaattacaatggtagcagctcaggtgatcactaaaccggtagagatttgagtgtaactcacatgttcctggccttctttgggctgcaattttgcaaagtcagcagtcaacatttaaaacaatacagacaaggaatcaaggttacaacagcaaatggaggcattagacctttggaagtattactatttcgttgcttcgcatcaaatagttgtttcaatttgcacccaagtttaactgagagtgtgctcagcaaaactcctcccgcaacaagaacccagtttggtcctccttggacattatctgtttttctcgccttctgtatgctcctgttagtctttgacttcatcccagcttgtacgaactaccgatcttcagcgaactgtacaaatgcagtagcttgacctagaagacatgtataaaaacgcaataagcacaacagctcccatatcagtacagaattttcagttataaagacattcatagtaagagttctagaaaatgtatgttccataaaaaagtacagttaaaattgaaactgaaccatatgacttcattgtccttgcaagttgcaaaagaaaaaagatcaaaatgaatcggtaaataacataaaaaatctggctttcgaagataacagcgacaccttcatattcaagtatacagaggaattatctttagaaacagtataccaaggaaaatgacagtaacaatacgctactacccctaaaatggctttgcattgtgcctggctatttagggttcagtttaggttgccttctaaacatctacaccatgatgatatatatattcatagactaacaaacactgaactcacaaaggaatcagctagagttttttttaaagaaaaaaaaaagagaaaaacaactagagtttatacaatcacgttgacaattttttttcttcttctgaaaagtgaaaattacaggttctccctttccccaggagacatgagaacatagcgaattacagattcggtagatgtaaaccatttttcatggtaggacaattcacagaagtccatgaaccacaggtctgcgaatctacccgagttttccctcccctcccctccctccacgcaccgagccgattggattcaaccggcctccgccgtcccccgtcgccggggagccaccttccactttccccggcgacgagccagcttcaccgattaccccgacacaacaaggacgagcacacagaggccaaatcgaggaacacccccccccccataccataccagtgaggaggtcggaccagagtcgtcgtcgacggcggcggcgcggctccccgcccgctgaaattcaccgccggggatcggtgacccgggggggcattgccatcccctgctgctacgcttccgacggcggcgggcacagctccggcgccgccgcggcggaggagtggagagggagaggagatgcgaaggaagtgggcaacggagagagtgggaaggaggagattgtgtgtttgggagactcggaaaaaaaggtaaatccgtttttatccaccctcttcttcttcactcctctgcttcttcttttttttttcccctttggttatttttcgcttttaccttttcctttttggagattgctctgctctctgctttgtttatattcgccaaattcattttgtttgtttctttctctctttttttttgcgagaagaaatttgttttctttttttcatatttaggaatgcattggataattccagtgtcagtattgttgttgcaaatactttggtcaagcggtggaaaacgacatcgatatagaatacggaaaggacatgatacaaatgatagctttttcttaaccccgtaatgttgttgtgttctataagtactttacataatttatgctttgaagtacatctcaatgtcgaaaacattgtagtgttttaaaaatgcatgcatgtttgagcagggacggatctacgttactcaggccggtgtcaggcgacaccgacgactttcggcaaaacctataacaaaattgcttatctatatgttataacattatgatctaaatattattagtatactatggcaccgatagacacgttatgacactaacaaatcggttttctagatccgccactgtgtttgggcttagggtttttcttataaaccgatgacacatggcaagagtaatttcaagctaagactttaaagcatccacagtgaaaaccatcctaagagtatccttagagagagagcgtgtgctatgtaggatgatgccacaagtcgaaatactactcttcttacgatgcatagtatattctctctcgagtacgcgacacaaccatcacctccaccctcggatgtgtcatccttgccgcaagtccctcctcctctatggccgtcgtagccctctcctttcgcatccctagtgaactcgagcgcaacggcaaaagggttcgacgctggaaggcggggatgccaccactgctgttgctcctacgcaggtgtgatgatgatgagaaggccacgaagaaagaggcaatggagagggagtaggtggtcttaatctcgagggcagtatgctagtggtggcgcacaaccaacaatggtagttgcaggtgtaggtcatcatgggaataggaggagttttcgagtgcctcgctgtcgccggatgccttagagcaccaacatcctaaaatcgatatgtgtcgttgtttcctgcttttctagcgggtccaccacatttcgatccaactccatctctaaatgtgtatcacatattgacatgtttagacatggacgggtatcatttggtatcagacctaatattatcctatccagacgggatattgcagtatatcagttagatattataatcttgtaaaaatactcactacgcactagtactacttttgctcaaatgcaacatttatctatatatctatattcttgacttgctaaaaatattgatgtcttactgtcccttagccctatagaaaaccttttaaaacacgaaccaatccagtgttctaggagtagtatttaccaaagcaatatccatcaatgtgctctgctatatggtttaaactcatattatctaaaataaataaataaaaactaggggtaaaaccttccacgcttgtaattgaatataccgtatacagacagccaacaaataatccagagccataatcacccatttcaccaacacagccatactacaagatttgagcagtcaattaagttggaggtccacattaaccctctggtaggccagtacaatagggggaccaaaagcatttactcgtgtactgtggaacagtacctcacactcgcacagcctactgcctccggattgggagctcgtaccgtacgtaccgacgtcgagcgattttactcttccgaccccgtgggcccgccctgacagtgaccgttgtttgttctccttgggagcttgggggcgacgacgaccgtgcctttggctgcctccgccccggctgagctggcgacctgacgtggacagcagcagtggctttagcccacacgcgtggccggcggtgagacgctgacacgtcggcagatagctttctgggcccaactgtcaattaatataaaagccaacctaataatccatttatacaattagttattggttgtagataaatattgcatcattaatatctaatctacctatctctcacatagattattaagcacatgctgcagctagttataaatctatagcccgtttttcttgcccccccccaccaataagtacgaatataacgtggcaacttgtacaacctatttgcatcatcttgttatacctgctcgtcaccttattgtaccggctctcacagacgtgtctccaacaaactaggattctcctgcttcacagtcacatgacccacaggccacagtcaccatgattataagattagagtaacctggtccgtatcaggagtactccatgataagagcatattgattgacacctacacttccccatgcctttttatcacaaagctttttcttcaaagttttattaaagtgtggctatgagtttgctagccacaaaatttaacaaataaatactccgtgctcagtgacagttctgagggtgatccaggtgatcccttgatcaccatcaattttggtcccgaaggactccctccttcaaatccagccaatttcactttatatgaaacggcggattcaaaaattttcatgagtctggacaagtctaacaacaaataaggtatacacaaacctataatagataactttagtatgaacatttgctttaaaagtttgtgttgagcgtgtttgctgctttactagttgcattgtactgccataccggtgagtaagaaagattattgctaaggtaattaggcactaatttactggtgaattgctgcatgtagctggtagagcccgggccattgcccgtgcaagccgggccttggctccgccactgtttatatgcatggcttaatgactatatatgttgtaatttttacaaagctcaaatgctaattttagtggatttgtaatattatgaggtactatatgctatatttgtatcatacttctaagtaaatacgttagagaattttgagcatggagtagaatcacccaacgagaaattcctaaagctgccactacgtccgtgatttatccccagaagttggatttctcaggaacggagagagtatgtctaagatcggtggagcagaagtgtgatcaaccacggttatgacaataaatcaaacacccaccaaacaaagtgtaacatgcttatattccctcaatttcatattataagtcattttgatttttttccacttttttaagtttgagaaaaatataataatatttccaacacaaaacaaatatattattaaaatatattcaatgttaaacttaatgaaactaattaggtgttgtagatatgttgctaagtttttctataaatttgatcaaacctaaagaagtttgactttaaaaaatcaaaacaacttataatatatgaaacaaagtaagtattccctccgtcccataatataaaggattttgagtttttatttgcaacgtttgactactcgttttattcaaattttttttgcaaatataaaaaatgaaaagttatacttaaagtaccatggatgataaagtaagtcataaataaaataaataataatttcaaattttttttaaataagacgaatggttaaacgttgcaaacaaaaacttaaaatattatattatgagacggatggagtaacatttagtgtgacaaaatgtggcacctccatgtgctcagctatggctgcagcgtggctttggtttataacgctgtctttcctatctggctgggccatacattcagcctgaaagcccgattgtgagcccacgtccgtgacagcctgtcagacgccgatcgaggctttgtgcatttcgctgttttgagtgggccagggaatcttggccgtccgttaatagattcctttctttcccagattgtgacctggcaccatccagatggattattcatcagtacataaatgtactaagatggaatgcacaagtgagcatatatgacagaataacacataccgataccatatagtaactatacaagtagtgccatatgcatcctatgtgtcggtcttgaacataagaaatgagacttctgtagattgtcactatgctctagtcagctactccctccgtcccaaaaaaaaaaaagacaaaccctggtttccgtgcccaatgtttgaccatccgtcttatttgaaaaaattataaaaaaaattaaaaagacaagtcatgcacaaagtattaatcatgttttatcatccaacaacaataaaaatacgaattataaaaaaatttcatataagacagacagtcaaagttggacacgtaaatccagggtttgtcttttttttttggaacggagggagtatcccgttgcttccagacatcaaatcaagcgatataacagtactgatatcgtagcatcaactcatgatttccttttacagcgccaacgtaatgcaaatattattcgagttgcgcgtacacaccttcaagattgctgcttatttcaatattactggcagtgcaaacaagttagtagccgaccagattagttccttctcttggaacattttgtcagtcaattacagataaatctacctatattgcacatggaattagaactgaagattcattatgcaaaagttgaaagaggcttaccagtaattcctatgttgatgatttattgaaactgatcgctgagtgcatttccaaatctttcggcccttccatatattttactggcaacaatacttgccacccaaaaaaatcagatcactcatcggttcaacaaccagcatcagaaattgtgccacacagtaactcagaagatccgtgacaaaatcgtcgaatcaaacttggcaacctctcttcagatcaataaaataataaagtagcgaagcctgccatagcggtatgggacttttggctcctacaaatctgtaaacactatctgtcgacctgatatagtacaggcacacacacaatctggattcaaatgctttgcgctcatatcagtcttcaaaaatctgataatcactgctctacaaagaaaaggaacacggtattattagctttatgatcttttggtgatatcctttttctattaagcttcaaactcaagttatctttcgagtacagcgctacagctttatcaaaagggatgtttctgctcagaaaatctgtacactacgcatggaaaaggaaatccaaggaatggtctagagaactcaaggaacatataacaaaacaaagccatttttttcaagaaatcacggaattcatcatttttcctgacggcctatcaatttagtgatacatttatgaatgctttctctgaacacctcagatatatgtcaatgtttgtttcccttgataacccaagcaattaactaaccttgccaagtacagcaagttgttttgtatagctcaaaaatcttcctttgccaagaaaaatagttcacatgggtaaatgtcaaagttatactctatggaccttatttgtggatatccagacacaatgttccaaaaaaaaaaacaaagaattgtcaacatatagcatcaagtcgttatatgtgcttccaccattatctagagttcttttattttcttagttcaggagctacggattctcatgtggtgccatacattattcagtgaacacactgaaggctagagaatttagtatcaattcagtaagtaaagttaaggttagtattgatcaggtggaatgcggaattttatatttgtacacttcggtcaaaagctttatgggaagcaacacatatagtcatgtactgagagtaacaaataaatagcaaagtcataataccaagaaccagttttgtaccttccagagagcaaatagagcgtgaactcattttgtgtgtgagagagtatgttggatgatccatttcacatcacttggtgcaccttgtgcttgaacagcacctaatgagatgccagtttgcacagctgatggggatttcgcttcgagtgatgaatgagacttgtgtggcatattattccctgtcaggtaattcctcagtcagcattgcataggtttgatgacttggtctgcagttcatacgctctaacatgataatcatttcacgggatatatctgagtgacctttttttatcaggccatcaataatcactttccacacaatctcatcgggactatagtctttccatctagaattcatgaatatttctttagccttatctgtttgtccttcacaaataagcccagaaagcagatgttggtaggacatcaactgtggtataaaaccatgttgaatcatagagcaaaccaacacccatgcatccaaataccttttggatttgcaaaaacaagtaacgagagcagtatagatgtcttcattcagagatatactatcttctttcataagagaaactaacgatgtcgcctcttccgttcttccatcttcagaaaacccctctagaatggaagaataagttcctgaattaggaagaaattcgttcttcttcattacatcaaacaacccaaagacatcagtaagctctatggctttccacacaccagctggggtcaaaggcaacacatcctccactaatctcatgcgtacaagatgtctaagcaagataaaataagtaaactggtttggcacagaagcaacacttgtcatttgtttcaagattgagactgcatgatctgtctgtccaatacttgcatgtccatccatcagagtattgtatgccattgtatctacagtgaccccatttttgctcatctccatcaaaacattttctgcttcatttagtcttccttcaatgcagtaagcacgcatagacgttgtataagtgactacatcaggattgcaacctgatgaaaccatttcgccccaggttctcgcaaccaatccatagtttctctcctttaaaagcttatgaatcacaattgtataattgactgttgagggcttcacatccttttgtagcatctcccctataaaggacagaccttcttgtgaccccttcatcttgcataggtgttcaataaatgaactgtatgtgtaagtatcgggtgtgcaacctgcagaaaccatcttttccaaaaatttccatgcaatatcagctttaccagacttgcataacccatttatcaaggaattgaatgtcacggcattaggttttatgcctctagtttctagactatcaaaaagggagcaagcttgatcagttcttccatccttgcagagagcattgatcaacgcattatatgtgtactgatcagcaattaaaccatctccttccatcaaacgtagcaatcggaaagcactctctatatgtccatcaatgcattggccccgaatcaacaaattatatgtcacagcatctgggttgactccacatgctctcatcttgttcaacaaagtcatcgccttgtgcacctttccttcattacagaacccttggaccaatgcattatatgtccacacatttggcttgcaccccctcaacttcatcaactccaacaccctcaatgcatcgctcatccttccctccttacaatatgcatttatcaccgcagtgcatgtcacaacacacggtgccaatcccttttcaaacatctcctgaagcatttcctcagcctccttggccttacgctccctacaccggaaatcaaccacagctgcataagcacgggtgcttggccgccaccccaattccttcatcctacgcagcatgagaagcccctcctccccccgctccgcattacacaaccccttcactaaggctgcatacatgtgcatgtctggctggtccatctccccgaacaactccactgcctcgtcaatcctccccgcctcacaaagcccctcaatcagcgtggcgtaagagaccacgtcctgggcgaaccctctcaggggcattttgtcgaacaggtcgcgggcaacgtcgacctggttggtgcggcaatacccgacgatgagggagttgaacgtgtaggcgtcggggcgccagccggagcggaccatgaggctgaggtaccgcagggcgcgggcgaggtcggcgcggcggcagagggagcggatgacggcgttgtaggtgggggctgtcggcgccggcggggcgtggcggtgcatgtgggcgaagaggcggagggcgagcggcgcgagggcgaagcgggagaggtgggcgaggagggaggcgaaggggcggtcgaagagcgggcggagcggcgggggcgagagggagtggaggcggaggacgaccgggagcgcgacggcgaggaggtggcgggacggcgcggccaccctggccgccgcggcggcgaggcggacggggagcgggacggggagcgactccggcagggacggcgtgagcagggcagggaggcggggcagggaagggttgaggaaccagtcgggcgaggtgaggacggcggcgaggtgggcgaggagcgccgccgggttggtggagcgcggcaaggctggagacgagcccatgggagacgttcctgggtacgcgcgagccgggggacgcggcggcggcggtggcgtcgcccgcatgttggcaatcggcggcgagctcactgcgccgccgccattgctgggggatctcggctctgctcctttgccaggagccgggttgacggcttgacgctgcccctgcttcgagatttgcgcaaggaacaccaccaacggaagcgattttcagattccaatttcgggagcaactattttctgccgagattcatataaaaatgtgtcacattcctttgtagatttatttttaaaaaatggatagagttttgattttaaacctggtataaattaatgtattacatgaagcaacgatgtaaagtactgtatgaattacgaatggaggttctataaaaaaaaaatatgtagcgcaaacttcatatgtattacaaatatagaaactatcgtaggacaaagaaatgagcacttgacatttgcccaatccatttctatatcctacgtatttcaagtttacgctacattttatgtgaagtgagcataactcaatcggttatttttcttgtggtgaaaccaacccacatggtacttgcatttatagctaattattctttcagtagtatgcgatgtacctatctgtgtgtatacgctcatagaggtgagtgcacgcgcgttacggaaaatactttgggatctagaaatggacacctaagatttagctacgtcaccaataattgtttcctcggttgtgtttgagacgagaggaaaaaaagaatatggagaatatatgtaaaacgacgtgagttattaacacatgattaattgagtattacttcctccttttcacaatataagtcattctagcatttctcacattcatattgatgttaatgaatctagatagaatgtgggaaatgctagaatgacttccattctgaaacggagggagtaactcatttaaatttttttaaaaagtaatatgatcatttaaagcaacttttctatataattttttttaaagaacaccctgtttaataggtaagaaagcgtgggcacggataacgatataattcttctctcaatccgtactctctcctcttattacggcagacgatccggatccctctttcttgcttgtttctgacaagtggaccaataaaattatttattcgtcagaaccggttgcttcttctgaaatgtctttttcttagagcctcgtgttagtttctctactactatctccgtaccaaaataagtgcagctattagtttccacgctcaactttgatcgtccgtcttatttaaaatttttttataattagcatttttgttgttatgagataataaaatataaatagtattttactcgtgacttatgtttttaatttttttttaaaaaattttaaataaaacgaatgatcaaagtacaatatttaggacggagggagtacaatatttgagactggttttatgttcattctctctctagtaccaatccaaagcatacaaatgcagaaaaaaaaaaggcgctcttccagtttgcatggatgttctgtgatagacagaatgaatattgtgatatcaatggttaaatctagtttcagttaataagtacattcgagattctagtcccagtattttcccttgatcaaatattcctcaaacactaacagcccatagtaacgatctaatcgtccatattcatgatgctctggcacatttcaggaaccaataggacatcagaatcgatctcttacgaaggcacacatgaaataccttttcctcttgcattctactagtagttacctttaaatgtccaaatgtaatgataacagtgatatctgcaccgaatcatcaaccaaacaagtgatgacaaacttctgtagtactaattccagtcattacacgctcaagtcaaacaaccaacccttgggaaaattaggattgccagaagaccagattgaccagtccagcggtttcttctataattttataggagctttgctctagagtggcagcaaggaatgagaagcagttgatcaagatggaagtaaacagaagcaaacagagcgtcatattacacaccctttgacagaataaatccagcattccggtacaccgtactagtccaacatgtaaggcctacaaaactaaattcagagggtgctggcatgccagaattctgtcactggtacagttcgcgccatggttcctgaaagacgggtgatttttcgatccccctctgaagaacggtttctttgctgaattccaagttgatgtgcttagccaagtgatcacctacacactgcagcacctgaagcacaacaggtaggggtcggggtgagccaacaaatgcaagtataaaaactgcagatatattttgaagatagtggcaacaggtacagagaagttgaagttcctgggtgggagtgtggggcagacaaaattacgcaagaatccttatataattaccaaaagactagctccttgcctccttcacagaatcacagttgctcgaaactaaaaaactatttccttttcctacataatttttactgtcatgtatattgcttaatattgcagacttacatcatgaaatggaagtgctgaaagttcagatctctaaccattataatattatttccgacatcatgatgatatacatacaattatttggaaacatcatggtttctggatttctatttggaaagaagaggacatagagcacattttcctattactggacacatattttatagttcaacttcaatcttggttctaacataatattttcaagataccaagtctacaggttaaccttttctcatttactatattaccataaaattgacttcaagcttagccattaaaactgtagtagtttcctattctgcacttatcttcatttagaacaagagaaagaagaaataaactgcaaagcaaaattcaattggaactcagcagtcagtgagtatgtacctcaaggtccacatctgtagagctttttccttggtgctgcccaccggatgcaaaaagaataactgtcggtatattcaacacacgtaccatttccagcaaacagagtattggctcacttcgcacttgtaaagattgaggaagtttagtagttccgtcaactaacatctgagtaaactcagttgttgctcctatttcagcaccatggagtgtagctaactgtcctgtttttgctccatgataatagtttggcgatcttgtcataaatgggacaatgagggttggctgagtggatggagcttccgaagaaaccaatgctaaaatctcattcatagcacatgctgcaacaggaggcttatagtctggtaggacaaaaaaggacacctggcaaaagttaacagaaattaaatatatcagaaagaaatgaacactcccaagtaataataaaaagaaataggtaaaaaactatatatagttggtcagccagtcattcagtatctattggtcatcaaagaactgcagaactgtataaagtgacattgaaagagagagtgcatgacaacagttctacgaccttacaattgcataatgtgaaaactgcaaaagctatcaggtgccagctgactagcagttaaccataagacatgaaaattaacctttcctaacagggcaaagcaacatgaaatcaatagatctagggcacaaggtaaacctgcccatctgaaaaaattatgacaaccagtaaatcacaaaaaagtagccttttgcactggattgcctcaggttgttccaccataatatgaggtaccatttaatcaactgtaaaatatgtaatttttgcgctgaccaaatgcaacaagataatttagagcgctacatccataaccatgaaaacagaagtgtctattctatgtttgctagacaggaagtacaaagatcttcaccgacagaaataagcccagtatacatgaacgcatgcttatataagtcagttcaaaatgaagggtaataggctcgcagcaatcaaaagagtgacaactgacaaatacaactcaggcttcatatatcaagtgctcaaactgaatcatgatgaattgatgataatcagttccaaaaactcagatacaacacatatgttcatactgaaaccatcagttctctcttcctcggcaacaaagttttctgtgcctccaaaacacactcgccagtaagttgattggtgcataccacatcaaaccccaagacgcaagatttactaagtgactaaaccatatcgtaagagtaagttatagtattcacgcatttcagtaaaattgcgacatataggccgttttggtttgaagcctaccaaagttgttgtagggcaagaattggcatcaaacaaaacaacccatagattagcattatagatcggcaaattttggttccaatccaaatggccacatagtaccaattgaagctaccatttataactggtagggcaagaatcggcatcaaacaaaacaaccctatatctttcggttcactgacattgctccaaaacttctaactataataatcataaaaccaaacgaaaatatcctagtatgcagccaaacagaggctaatctgccagctcaacacagtacatttgtgcacgataactaatttccccctacaattgcttattccaggaaccgtgtggttcattcccccaaaagaaaatgctttccatttagctcaagcagctaattgttgatccaaaaccttcacaccacgcgaattggatctatcagacggggccaaaagccaaaaagggacgcttacctgcggatcgccactagaatcggagaagttcacgagctcgccggaggccttctccccgtcgaggccgtacttggcgagggggagctccaggggcgtggattccctgcaaaagcatccagcgacgacgggtcagctaccgtaaggcgctggattttggtccttttgtggagagagagagagagagagagagagagagagagagaggctagggttttagaggggggacctcgtgagccccggcgttgggcggagcgcgtcggcgagggcggcgccgtagccggcggcgtcgcggacgaggacgaggaccttgggtgccacccgcatggccgccggtcgccggtcgccgccgccgccgccgcgaatgatcggagggagagaggagaggggagggaattagcggttgagcacgcgaagagccagagatagagggtagaacggtaataacgagggaattcgttagaagtttagaagtccatccaattatttgtagtctcttcaaatttgaattcgtagtagtatttggtatccgtgtctgaaaaaaattcagattcttgattgttttttattcatcttatattttacagcatataaaagtttcttggatttgttcacgtcaccgtgaacaaaattggttatgaaacgtatgaatttagggccctttgaatcgcaggattgagaaaacgtatgaataggaaaaacgtaggattttgatagaaatgtaagtgtaaaatagaggattgcaaaacgcaggaaaaacacaggaatgaccgtttgattaaaccacatgaaaaatacaggaattggatgagagatagactcaaaggaaagttagcaagaggttgaagctcttgctaaattttctccaaaatctctataggattgtccattccataggaatttcaaagtattggataggattcaattctttgtttcaaagggcttcataagaaattttcctaaaatcctataggaaatttctatatttttcctccaaaacaaagaggcccttaggtttttatgattggagtataaaagttactcccatgaaagatacgcttatggcagtatatataataagttgtgttactgtgatgagcacagcaatatgcaaatagttcaatttgaaaatgaaaatgtaacaacagaggaagagatcatgctcatcaaacattaagatcaaacggttgtattattggctttgaatgtaatcacgaccatcctcaaaatttgcttctcttaacacctaactagcatggtggcccgcgcagattgcgcggctagcatcattatatttttctcatataatagcatatatgttttctcattatattattcaaatatattaaaataacatcataattttaaatttttcaataactttacgaaactacaaatgtgtaatattcatattgtattttacatatgtgttagttattaattatttttaatatcaaattttagttatttgtaaattatatatattcctatatggactctagactcatcttttaatatatttttttaattccgaattttctgtaaattgtatttctatatagactctaggctcttcttccaatattatttatttttatttctgaatttttattatttctaattgtatttctatgtggactctaaactcatctttcaatattctttaatttttaatttcgaatttcagttacttctaattatattcctatattgactttaaactcttcttcccatgtttttcttaatttcgaattttagttatttgtaaattgtatttttatacggactaaaactctacttttaattttattatgtttattccgaattttacttagttttaaattcctatatggactctatactctatttctaatattcattattttttaattccgaatttctatatttttcttaattgtatttatatatggactctatactctacttctaatattccttatttttaattccgaatttcagttatttcctaattgtatttctatatggagtctagtctcctcttctaatattccttattttttaattccgaatttcaactatttctaaattgtatttctatatggactctagtctcctcttctaatattccttatttttcaattccgaatttcagctatttctaaattgtatttctatatggactctgctttttctttttctccgattaatgtgacaatttctaggccatgagagcgaacgtggaggctcatttttctattcctttaataatataatagattgaaacatagggtttatattggcttcctaattagtgaggataagttactattggttgaatttagcgaatagtcgggggcgtggagtcatgggcgaatgacttcattcgtcggagtttaaattctggtacccacaaatattacgtttatgcagataggtttctaacgagattgtagtgagattatggatgtactactgagtatcatcttacgtgtgcagtgatgtgtctgcgtgtgtgtatgtcgtgtaattgtaaaagaagcccatacccaggcatagtcttttgatgctcttcttgaggtggaaaaactggttttggcattcactggttggagacagtgaaagcatcaaacattggattggatgtccaaaaacattggatatattggatgtcctagtcttgaagatgtgtacaggagaatggtacatatacactaaggtgaaaattttgtactgattggattttgatgacgattgtacaagttgtaccctttctttgaaagcgttattgtaggaatgaagcttgaaatatctcctcgctaaaaaaactattgcaattttgtggttggtcggcctatggtttcaatgacaggttcagattttttttttccatttcagaccagtcttagcattgataagtttttatcatgttgttctttcttcttagtcgttttaggtctcaattaacatttagctaatgtagtggtaatgtgcatccttaagttgacgtcggatgcagataccagggatttatacctttcttatttaaaaatgaaaactctcatattttctagagaaaggacaaactactgttctgttttttttacttgaataattcttcattgaaaatacttacgaacaagttcaacagttgcaagtattccaacaatcatgttggttgtccaagtttgttctagagggaatatatcaaggagattcgagtatgtcgtctccccctaatctactgttgtcatttcgtgacatgagcatgcatgatcggtacagctagctatcctatttgtcaacaaaataaacccaatttcccggtggtccatctcaccatgttgaaaaatgaacgtgtgaaaccgtcctaataacctaagcgtttaattgactcttggagcaaacatacaacaatccttgacttgacttcattcacggaacggcagttgtcccttggccactgatcgctgagcctaaataaggatttaaaagttatctcgttttataaaccaaaatggtagtgtataagttgagaaaagtccattagccagtacaccggaatgcggcttggtttatgataaaagtaaatcgaagaaacgtaaagagcctttcccacccaaaagctattcaacgaggtgagggaccaatcaaggataacctatatattataatctaattaagcaataggatactattttctatctcactctcaagtactagtactacttcaccgcatcatctgtactactctatcttatcctcttcgttcatagccattcaccgcatcatctgtactactctatctcatcttttcccccaatcttctagaggcatcgagagcagcaaaccgatggtgagcttggtggatggcgtagcgagctcgcgtgcgtggccgagctaggtaccggccgaagcaagcaaggcgacagtcggccgacgagctcgcgtgcgcggccgagctgggtaccgggcgaagcaagcgaggcggagcaattgaagcgggcgcacggtaggagcgagctgccaccatggtcagcacaagctcgagctgcgtggtttgcgactttgccccaccacgccgccgtcgactccgccacatagcgccgcccatgagctccctccggcttgagctcgaggggaacaggagagaggggggagaggggtggaaggggaatatggaggtggagcacccgtcgccgcaacgcgtgcctcgagcccgtcccctggccgaaaaggaggaggagccgcgtcgcccaggcaggagtcgcgtggcgtcgctgggggacggtgcgaacgaaaaaagcaaatggagatggacggaaggagctagggacacgcccctgaggctacccgttgctgatggaaaattcatgtgttgaatatattcgtgtattttgaatgcttcatgtcttcaaattccttagtttgaagagaggggtagaagaggaaaacaacacttgtggctttataggttgggattttgaggagcccatccaggggtgttctccattgcgagctgagttcccctacgagtgtcctcagttagtgaggacactctaggaatggcttacattgtggatgcccttatatattaggtctactttcacacattggtgtacctcaaccctttactgcccctttcccaccccaaaagctgaccaatgaggtaacgtgagatccacggtccatcaggccttcacacgtacctcagccctttaccaccccttcaccagatgttgaactaaccaggctctgatacaaattgtatgatcgtgaagggtattttccaccccaaaagctagccaatgaggtgagggggtcccccacttatatattaggccacttgcctttccacaaccaacgtgagattattcaacagatatgtactccatctgtttcaggttataaaaaattttgactttaatcaaagtcaaacggttttaagtttgactaagtttatagacaaatatagtaatatttataatactaaattagtttcatcaaatctacaattgaatatatttttataataaatttatcttggattaaaaatattattacttttttctataaacatggacaaacttaaatcagtttgactttgaccaaagtcaaaacgtcttataatctgaaacagagggagaataatttagtaaataaacttgtaaaattttcatttcaatttataaatttgcgtagtgcgtgtaaataatctgctaaatttgagatgaagcttacaatcacccaatagtttaactagggtggtttttgttttgtgctaccttactactgacaattaacatttgacaaatctccatttggaaatcagaaacggagcctagaaagctgatcgggactcaactcaaactaaaaagtgaaagtgctgaaagaatttgaagtccagccaagaagcaatgccggttaactatcccttttgcgtctggcatcagctcaaggaattaaaatagttcagaaacgggggcgcgacgatgacgatcggttgctatgtttaatcgatgtcgagtgagtgctgattggattctcgggatgcttcaatatctatcttctctgactctctgtactgatggtgacttgctacaggaattttttttttgtttaatcttctgaagctgcaatttggtttccatcaactaatccaaacaattaacggtgtgcgtatctagcaagttagcttctacttctacagttctctattccttgatctttatcagttattcaatttactgtcttttgcagttccctgttcctttgatcgtttactactcttctgtagtctctaaccgagatgaattgtaaatctgggagtagttttgcatcacaatctttaatagtacaagacaaagctaccactcttctgtaataggagaggtgttgttcttgcaagaacttcagataatctctgaagaaatccaagcagtaacagagttttacaggtacagtttttacgatatacagttttattattatacatggttaattcactaggttgtgcagcaaaagctgccaaattaattaaccgcaaaagaaagcagcaaaaggttaacgaccttcaaaaatggaaaagaacaaggcaagaaagcaacaagcaaaatcacacatatgtacatgcatgcacatatataggtaattttatggatcgagattaatttggtgctagagaatgcagcaggcgttgctgtcgctctcgtggtggcggcgggagcgggacaccgccttgaaggtcttgccgccggcggctgcggcggcggcgcggccggtgccggcgccggtggtggtggtggtggtggtggtcttcttcttggtggtggtggagtggttcatggggtggtagtcgtgcttctccaccagcggcgagtagatggccgggtggctgagcgccaccgcgcgggagtagctgctgccgccgtagccgtagccgccgccgccggcggccatcgccatcggcgacgggtggtactggtacgggtacgcgtacgggctgggcgccatggcgtacggcggctgccactgctgctgctggtggtacgggccgtacggcgacggctggtagtggtacggcgacgcccgcgtcgtcgccatcgccctggcggcggcggcgtccttgctccccggcgccggcggcggcatgatcatcccgcccgggaacatcgccgccgccgcctcgaacgtgtcgacggtcctcagctcgacgatctcaccggagcccaccttcctcttgagcttcttggtcagcttgttcgtgtccacgccctcgccgatcaccagcagcaggttccggtcgccgccggccagcgtcaccgactgcacccctgcagctcgaccggaatcaaatcaaccatgaaatcaacaagaacacaaccacgatttcgcattcaaaacaagatcaaaacaaagatgattaccgctgacagtagcagcctctttcatggccttcttctggcatttgtcggttttcacggaaatcctgataatgatctccttctgaaattttcaacgcatggatttcacagataagttcttcagacatggattaactaaaatctcgcctgtgtctcggacaaaaagtttcaagcagaccaaagcaaaatatgtacgtagaagaaactttcagaggaaacaccaattaaactctgcaaataaacctccataaaacacgcaccaattcgtggtgcaactcgtagaaattaaaacacaccaaattcgaactcaaacttgcagaaacacgggaatcatgagagaaaaggaaccatgttaattaccttcatggttttcgcttcgctaactgaatttgctcagtaaaaaaaaaaagtttgctagctatagctccaatggaggagagggctaaggagattagcaaccgtgtgttgcgtgcttcactctcttaagtactgacaggataatggcctgtgagctactgtggttagctcagtggtttgtacctgccatgtgtgacaataccataatatcttgtttatttgacaataccataatatcttgtttatttggtactagtacttggtagccaagcgaaagaaacacactgattagatagaccttgagagaaatgcatatttaactgttgactttgacctagagactttggctcggctttgtgtgtagttatctcgaaggggaggattattatacagggcatgtctcactgttgggcccccaaaacaatccatatggattttgtttatgcataaacaaaaggcccatccactcacaaatatcatacgagatatatcagccaaacatgccaggatctccttgctgacgggagcagacgtccaccaccacgtgcctttacttgaatttcgtcgtcgtcgtagtagtattgttttggtcacgtgtaattattttagtaaaaaataattcatgttggtcgataacttttccatgtaccataaaaatataccctattcgttttttttaaaaaaaaacctaaatgaagatttaacaccatctaaaacaataaatctggattcagattcgttgtccttcccacctaagttaatctttttcgagatgaagggagtagtagacaagtaactttaacagttgttgcatccaaatgcaactcaaaatctttaacacccacggttcaaaagctgttttcagtagacgatatcattgattatttttagcataacatttgaccatctgtcctatttaaaaattatataaaaattatatatttattatgacttgttctattattaaacacacttttaaatatgacttatattttagtatatttacacgaaatttttaaataagacaagcgatcaaacgctattttaaaagccaacagctttatttattaaaaaaaatgaaggtagtataagtttaaaatggatgaacatatacacacacactagaaagtggattgactaaatgtggttcttttccgcgcacgtttccactagctagcttctgcatgcacggcggagttaaaaagcatttgtagtagacctatagtcaagcagttgcaataaacaaaaaaaagaagaagaagatcatctacccgagatcgatctgatctgtctaagaaaattgatggcatggttatcttgcttgcgctctgtgtatcaaaacaaaatatttcacgtgcccgacgtgccaatatatagcctagcttactgtcgcaagttagttgtggagcaattccgagtgttgcacgcacggaggacatacccgatcgagatcggtctggggtatggcaaattaaacgaactgacaaaaaggagattagataatttgataccgacacatatagtttcagcaaatacatgtatcgaattaaagccgatggatatatatctacatgcatgatcatttaatttgcatggttcgtcggcgtcacatcatctatcgtcgattgttatccctcgctacacttgtagagatcggtgatagttatatttcatcttggcacaatgactaagaataagtaattttacttatcatttatttaaatatgctactagttatttctcataaataagtgattcattaatatttacatttctcgatgtccatataactaatcttgtgtagaagaatagagagtcatgcattaaatccgagaaagtcattaagataataggtggttggattgaaatatgcttatcaaaagtaaatttttcagatttgaaaatatgtctataaaaaaagatagagagagtactgaacagtacatacacatgtacgtacatggtccggcctaagagcatctccaacagcctccttattcaactctccaagttaaattttagcaattttaaagcaaatcatgctccaacagactagctaaccggatggctaagccatccggctagccaaactactcctcccgctggccaaatttggccagccaaaataacctagccaaattgtgggtcccatctcttttcccccttctctctctcgtcagatgagcgtcggcgccgcgccttcgccgcttcgcgccgctgcccgtccgccggctccgccccaccgcccctccgctggcggcgcccctccgcgccacccttccacgcgccgcccctacgccgccgtcgcccctccgcgccactgtccctccgcgccgcccctccacagcgccgcccctccacggcgctgccctctgctttgccgacgccgtccctctgccatcgtcgtcctttgccggcgccgcgccctccgtgcgacgatgagaaggaaggaaagagaaaaagaaaaagaaggaaggaagagagagagagaggggggggggaagaagaggagtagagactgacatgtgggtcctttgttattttggagaggatcagtagagagtctgttggagtgatcatctaatttaactagccaaattagatagagagttggctatatgagtttttggagaggttaatttgaagaggctattggagatgctctaagctagctcgctcgctctctatcggcgccaccgcccactgcttccaggagcaaatcgcgatgtaccaaacaactaatactaccagagtagggatcgatcggctcattaaccagctgtggccaagaactattgcatgaaaccggccaaattaaacgtcgtcgacggatcagcgagaaagatatgataaaatcaatcatatatggcgagaaactgaagcaccgagctcaagttcctggcaattcgtgccacgcgcaacgcaacgtgcgtactgtaccttctcgatcgtacgtatacgtgtcgtagctgctgctgctgctgctaggactagattgcttggacagggattcgaccacgtacaggatcgtaggcgcgagtcgcgcgcgcgcgcgacactagctactttgggtacgcatcgtatgccacatgggctagctaggaaaactgccgctgagatcgcgaaacgtacgtacgtgctaaactcggtggccgatcgtgatatatacgtgggcgcgcgcgcggtagctgatccacatgtacaccggtggcgacgggcgaaaattaaaacccgcggactcatgtccaagtcgtcgtactcgtttttatacgtcgtcgatcgggggcggtcggcgaggcgcagtggcgcgcgcgtcacggaaaacacgtcctccgatcccgtctccgatgacgcaacatgttaattagcagctagggggcggagaaaaggatcgcgcgcgtgcgaccaaactaattaactgcacgggtatgtccatgtgcaacttgcgcaagtatgttggttaacttaaccgtgctcgcgacgttgcttaatctggccgggtggggttgccatcgagtcatcgacgacgcatcgttgtacagacgggaaattaccgtttcgatccttggaatgctttcccgaccaaaagctagctatactccatcgaacattagacacggaaacttatggttgtacttaaaatgggatgagggagtaggatatatctcagtatcacgaatctgaataaataaatgttcagattcatgatattagcatatgtcacatcgatttatagtactgaaatatatcacatcacgtactatattaactgcctaacaatgaaatttgattgtaaatatctcttacacaattttgctcaaagttatagaaccatactcatggtctagtatttttgaacatgaatacaataatattttttttgaaaaacctaaatattatttaattaatagttggtcaagctcaaaattaaactgttaacatacgacttagtatatttctaagagttaattatactttgtaccatattttattaacaaagttttaatttggatcactcacacctcaataaactccctcatccatgccccagccatatttttgcctaaggatttgatagatatggcttgaaaagagagttaaggtggactaaagtataacaaatataaaattatttggtacaaagtgagaagatagatcaaatgaggatcgaaaacaaaatttttgataataaagtgtggtccaaagtaaaaaaaatccgctctatttctaaacaacatatttaatgatagatactctatccaacacgggaaactgtgtagtgtaaactaaaaagctatcataggatgcacaaatagatatatgtgatttgtccatattattttgagtaaattttttactctccatcttaggtgtgtacattcatgtatctgatgatatatagttttcatgtttgtactgtacatgaagtttatactggacactatatatttttccgttcaatacttattaaagatgctctgtgtaatactgcagaggtttaattaaatacataagccatatttttcttccattttgttgacaaatgtcaattttctcacttggattgcgcaagaccttttatctgtgctctgccttctcccaatattgtggagcctggcagaaaggcaactcaatacagcgatggctaagactgatctcccatccaccctctgtcgttgtctctgtgtctaacacatcaaatcatccaattatctacgtttggtgtgactatgaatcacccgaactcttgacaattgtcattagccccagaagacaaatgtgcaatacaagagatgataatttaccgataacacgacttgttctgttgcttaatttgtatatctaggtgactactgactagcttccacgttacgttatgtgaaaacaattcacacaaatatggtgtactagtgtgttctgcagtgtaaaggatcgattcctacttcccgaaaggaaaaaagattcagccaatcaatgtcggtcgatgtgcatctctgaaaattcattcatcatttctgcatttcacactgatttatcttggcagatctgaaaacaacacagctgcaaattaacaattaattacaatcaaatggaacgatcgaaggggctgacaaaaaccatagcccctctatctcgaccgatcacggcttcacacaaatctgtttacatgcagagatgaacaaacaaatcaactgaagcacaaatttccccagttatttagcagcctcaccagcaaatagtagtagtaaacactgctcaaacctcaccgaaatgaaatgagaagaagaaatcatagaaaaaaaaaatagaaacagctatacacaatagctaagcttaaactatagtcgttgctacatgatggagcagccgttgggatcgtcgttgctgctcgtcgtgtagtactcgtgctgcaccgcggcggcgccgtacggcgacgggtagtagccgccgtcgtacggatgctgcggcgcctggtggtagtacggcgagtcgtagccgccgccgtacagctggtggccgccggagctgtaggcgccgccgcgcccggcggagagctgggaggagtagtagtaaccgccgttgctgctgccgaggcggccgctcgttgaggtggcggcgtagctgccggcggcggcgccacgtgggtaggtgtcgtgcagggtgcggagctcgacgatgtcggcgtggccgaccttccggcggaggcggctggtgaggtggttggagtcgacgccggagccgaccacccgcagcaggttccgaccttccccggccagcgtcacggactcgacgccgtccatcgccgccgccaccttcatggccttggcgttcccattcttctccgagctcgcctgcatcctgataagcatctccgtctgcaagaagaacacagcaacatatatccattagaaaaaaaagaaaagaaaattcaattcatcttcatatatcgtcactaagaccaatcaatcaatctgaattctgaagagagagcaaatttaccctcatggcgccgtacaattttgcaacagatcgagcaagctagcgttcgatctgaagagagagcagaattgatcgaattggtttgtgtcagagcagagcagattagcagatatagcgtgatgtcgcgggcttttatactgagattatgcgtgcacacagatgctactaccggtttcagggcaattccaattcaccttgcggttgcggcgttgggtggcacatctttttcaagagattcttttaatttgcgacgaagcagcggggatccgaaccaattatcaacgaacacggcgggagccgaaaattttttatggacggttgactgcgaggaagactccaagtaatttaatggatgttacgtgggtacgtgtcgcttgtactccatttgattggtgcagagcgatcgatctcggccgttggatgcaggacagtcggtgtatcggacggtccgatcggggtgtacaaaaatgggttacaaggttcgggtttttggtgagctgaaagtgataagctcgagtgcaggtgagaaaaatgataactcaaatgattatcggctcaaaaaaaaaaaatcatccagtggaggttggagttaggagttgacaattattattttttggtcaatccaacttcatcagactatcaacgattcatgcatgcatgtatcttcaatctcttccatttcgttctcttttttttttttcaaaaacaaacattaatttctttcgttctctagtttgtttttccctacttagaaacaagttgagttttgttaattaacccgtgcgtgatgcacaatcggatgtttccgtgatgcagcgcaagctgccgcctgcaaaaccccgagttaattttctgttggctgaacaccgttcttggttttgcgattcagtttgtaagttcgtaacaattgatcgtactatttttgtgaatgttgtttatatcttcacagaattgggctacatcgactttatcaaagatgcggagagagcaaaacagtgtagcactcagctgcagaatttattttaagaaataatacgattttaagtaaaatcacaaaaatataggtcggttagacgaaaatcacaaaaatataggtcggttgttcgacagggtatctatcttcgacatggtacttgtcgaggtgataaaaaaattttaaaaaagagaattatcactgtagtggcactgttcatcaaacatatcgaacatgggtagttcgacatgcccctaccaatcactgtagcgtcactgtttatgtactttttttattttttattttgaccaactaccctattgaactgttgcagtttgataggtccccgtcaaaccacggttgtttgacagggtgctaaacttacgattttgcctaaccgatctatatttttgcgatttcccattctaaaaaaaaaattcctcagctggattagcggtttggttaaatagttaatttgggtgatattccaccggccattaattgaatctttaattcttggtgaacgaaagcatctttaattgagtaagaaagctctcactttctccgtaaagaaaatgagaagagaattgaaccaggaaatgtctcccgaataaaacaaaatttcccaggaataatcaaccgtcttttgtgattctgctactttaacacgtgttcggtgggactttctcttccttgaagagaataaacagaacccaatatgatgtaagatttcacttttaacacatgctttgcctttcggatgttccttaggaaataagtataatggttcagaagggaggaaaagaacgaaatttctatttcagaaacttcacaaagaagaataaatcattactgggctagtgcccatggatttgatcatttggcccattatttctttcaagaggtgatttggcccattaatgatcacttcttgcgagaacggcccaatatagaaccatatgaagatcatggcccagtttccagagaaatacaccttgggttgccttttaacactttccatttcttcttcttcttcttctcctcggcgaaaggtgttcggactgaaggtaacaaactaacaacggtgtttttattttcttttcagaccttcaccatgaaaattacttcttaagtatctcatgataaattctctctaatgaaaacctataaacgaaaagtcattttacaactacacctatagctttattttgaacggcagatctatattattcacgttcaaacatacacgcacatcatattattattattatattatatcatgttacactcacgcacaacttatgttattacaatattataagccatcgactggcgcatagtacatgtagcctttggaaagagctcacactcatggcctagcaagccgtacacgtacgtacaaacgcacgtcggcaccgcgtacacacgctgacacgcgtgccttaatttattgatgacgacgaagagtgcaataagcaatactacgatcgagcttgtgttgcgtatacagtcgtatacacacatagtacggcgtacggcgatatcgacgtatatacggcgggccgggctacttggagcagcacttgtggcagtcgccggaccagtcgtcgcagcaggatttgtcgtcgtatccgtcgcagtagtgcttgcagtcgccgccggaccagtcgcagcaccccttgcctttgcagacgtcctccttccccggagacgacggcggcggcggttcgtcctcgtggtccggcggcgacggcgacgggtcctcgtggtccggcggcgatggcgacgggtcgtgatcgccgccgtcgtgatcgtcatctgcatgcatatagacgacatatcaaatactaattaatactaaatgaatactatgaagaaggcatgcatgaacacaatacatgtagtagtatatcgtatcgtagtccctccgtttcataatgtaagtcattctagtatttttaatatccatattaatattattgttaatgaatctaaatagatatatatgtctagattcattaatatcaatataaatgtaacaaatactagaataatttatataaatgtgagaaatactagaataatttatattgtgaaacggaggaagcagtatatatgtgtatgtgcaggagaaaatttaacgaaaaattgtatgtatatatatgcatgcagggtgtgtgctagctagctagctagctcacgtacgtgtttcttcggcggaggcgacgtggatgaaagcagcggcggcgagcaggagagtgaacaccagtaaagccaacttggacgatgccgccatggctgctagctttaagaccttaagtgatcttaattaattttcaactcacggtataattaattaggactggatcgcacaatctcgagtgtggtgagaagcctatgcgtgcaaaccaagcgtatttataggcaggatgaagccttcttatgagatttagggttctggtagtagtgcgttagttactagttgatgacacactgcgtcttctcatgtcgaccgattcaaggttatacgtatagcagaacatatataattaagctgactagcgaccagctataagagcatccacaatagtaaagtaaggtgctctctataaaacatgtatatttcagcaatagactcgattaatagtaaaccaccttaatagtatgtctatattggtatctatatctctctcattcattgcctcgtttttctctatagactatctttaagttagtagatagctttgctctctctctctcttcatttaatacctttcaagtaggaaaatatgctgacatggatctcttgtagagagcctatagataaccattgtgggtgccctaaccgttttgccattctgattaccgcattaatccccggttgccgattactccctccgttccattgttccattttaattaattgcagttataaatttttatgtctaacatttgatcgcttgtcttattaaacttttttataattagtattttaattgttattagatgataaaatataaatagtactttatgctcaacttatttttaattttttttaataaaatttttaaataagacggatggttaaatgttgggtgcggaaaatcagaaccacacgagaaatgagtgggaggagtacattattcataaaaggtcaactttacgatggcccggccaccaatgtcaacaactaatcacgccataggcatgcccatttgcatcaaatatatatgtcatatgaaagcaaaattcgtggaaaccccaagcccacatgtctgtttagaatattttagcttttcaaaccaaacaccaccagtacaagtgtgagtgtgtgacgccataggagaagggcgattttatttgggcgcgcgtaggattaatttcattcgccgatccgttaggtgagctcggaaaatgcgagcacgccggcgctggtcgtcggtcggctcgccgcgagctacgatgattgggtcgtcgatcggtcgtccaggacggggtcctgcaaccgaggaggccatcggatggcttaatggggataagtcaaatgtcacatttacgaatgaaaaataatttgcaaaaaaatttttatatacgtgttattagtgatctaaaagcaaatgctgaaaaataaacttcgataaaaaaccctcaaaattaactccaaatttaatgttgaaaatttgaattttggttgataaggataagcataagcgaaaagatgagaccaaaccttttcacctttttaggtggcgggcctaaggcccaatgggctggcctatccatcacgtgagacccaactgaaaaaggcctcattagatgcgaaagtgctaattcgtgactagtcacgcaccggcctactcgcacgaagaaccccgccttttcattttttggcatacgtatgttttgtcggcttatctactttcttttttatgtaaatgtcggtttaataatttttttactatataggctaaatctagattggttttatgcatacttctttttcctttttggcttgatttttccatgggctcagtaattttggcctatttattttcttcaacttttttactttttaagtttgtttttaattttatacgtgtaaaatttatatatacaatacaaaatttatacattaacatgtaaacttatatacatgtatacatagtttttatacatatatacatatatacatatatacatatatatatatatacatatatatacatatatatatatataattctttatagtgtgtaatataaatttatacatataaaaaattgtataagtgtatatgtaccaagtatatacacaaatattttatatatacgcatataaatttatatatacattatatatatacacaaatttatatactttgtatgcatatgcatatacgtatacgtaatagaggtggagctggttgcgtatcaacggcctcctccttagtgatgggcttgtacatatggatttgatttggactgttgaggatttattgggagcatggcccatttcttcagcccaaaacaacaattatctgtggcaccttgcaaacttacaatttgagaagttgagaaagtatttctgggtatgtagctggagcgctaaatatgcatgcttatatttttgaataaagggagtagtcgagtagattaatatggtatagtgatgtatgttactaagactaatactcaggtgtatataaaagtacatgcaaataataattgagggctactacataatgctatatcgtttcgataaaaaagaatatgtaatacttataatgctatttccttaggtatcagatgtggtatctatgatactagataggtatatcgaatatgataccgtgataccggacgtaatactcatatcatgatgatgtcagcatgacaccataggtatcagatcatgacatcaactattttatttgaactgtatacatttttctagtaattttgaataatatttaattaaggagaagtgtttatttatgaaccaccatgtgtgatctgcttcatatgagttgtacggagctcgctccatcggcctacggcgagcagcactcgccggaccagtcgcatcagtcctagacacccttgcatgggcagcatggcggcggcggcggtggtttgccatatccaccgcctccgccgtagtacggcgacggtggcgggtcgtagtagtccggtgatggcggcgggtcgtagtagtccggtgagtgcggcgggtcatagtagtccggcgatggcggtgggtcgtagtattcaggggagggcggtgggtcttcgtggtccggcgactccggcggattgtcaccgtcgtcatctgcagcattaattgggagcacgcgttacctacatattaaatgcaaaaacaaatatgtacttcctccgtttcacaatgtaagtcattctattattttctatattcatattggtattaatgaatctagatagatgtatatgtctagattcattaacatcactatgaatatgagaaatgttagaatgacttacatcgtgaaacggagagagtacgtgcctatgttcaagttcatcaaaccgacgagcacaatatataattcatcgatgagccggttcgttaaatttttttttgaaaaaagatgaaattatgcatgcatgtgtgtgtgtgtgtgagaaaaacgatcgaattgattaagaaaatatttcaactccagtatgaaaatcaaactaaattatatgcacgaattaatgaggtacggtgtgtcggtgtgtgctcacgagtttgttcggcagaggcgacgaaagcagcagcgagcaggagagcgaaaacaagcaaagccttggacgacgacgacgaggaggacgacgccatgtattcttttaatttctctcctcacgaagtgaagatatatgtaatcgaaattgctagtttaatttgaactatttcgagtgtgtgatgagaatcgatcgataacgtaactagacgtgtttatataggcaggatgaggcacatacatgtgatctagtactgtatacgtactcttagtagatgacgaaccggtgcttaattttgagcttcttgacgccgtcgatcgaccgattcaaggtaaagaaatatgtactgtaatatactagcaggctaataactgcatgcaagtacttcatatatgcaagtacgcttggcatctaccatacgtacgtgctcgttcgattcaccggaaattaatcgagttgcaaattaagtgaaagtcaatcgttcgatttgatcgatttaaccacaaatggaggtgctcagctacaaaagcaaactcaattatatttgccagggccgtcggccacaaatgtggcaagtttagttaattcatcctcacaatatgtacacatataatttctggatatatatatgtcactatttaagcgaagttcatggaaacccaagtacgcacatttctattttccagaccaaaataaacgtaagataagatatgaggtggccttagataaaaagggggaaaaactaggagtagctagctagtccagattgagcgatccatccgtgaggaggcgtacgttatggacattcgtgagattgcttatgaggtggggagcgggctatcaattcgtcgatcgatccttgtgttatgaaaaggtttagctgcttctcacattttggatagataggacacaaacattttctccaacaaaagttggattaaatttggatactcgtagcacgtttttcaaactgctaaacggtacgtttcgtgcgaaaattttctatataaaagttgttctaaaatatcatattaatatatttttcaagtttgtaattaataattaaaactcaattagtcacacgttattacaacctcgttttacgtgaaacacttaatttttatcttcatctatatcttcaggacatttaaacaccaccataagctcgatcctgtaggccaactaggccgaagaaggtcaactctaaagaacgtttctatgagaacgctgacccacaaaagttgtctaggctagacaggttacgaaatgacaagtataccatgtaaatgttcctatcaaagagatgattatgtaaaacccaacataaacaaaacactagagtttgcttcagatgcttgtaagttataaatagactccaagatatgatttttattgcctttatatacttagagataagtgtttgtctttccacaacactcgtaatgatcactgtaaagaaaaaaaaaagtataaacactactccctccatcccataaaaaaacaaatatagaaccggatgtgacatattctaatacgatgaatttgaatattctaatacaatgaatttgaatagatgtatgtctaaattcgtagtatatggatatgtcacaggtactagtaggttttttatgggacggagggagtagaacgtagctaggcttaggacaactagaatctgagtcctaggcttagcttcttaatccccatgcaaattttataaaaatataatgtaatttctaaatgttgtcaagactatattagcatatctagactgtcaaagtacaataatattttttttccctagtaggtgtagatatctagtagctcagctctccgtatatacatatctagactgccaaagtacaataatatattctttttaaaaaatatatattggtcctactatatatgtggtcatagccttcccgaaaggccgaaagtgtacacatctcaaaattaatgattttgacttgatgatctccataatgaacatctctctcaaactctcagtcatcttgttgacatacaatgggatatctatgtaaataataactaatataatcttatgtctcacgccccagcccttgtgacctgttcaatcgtatctagtaggtgtagggaataagatcgacagacgcaatctctctccgaatacgcgaatattagagaataattaaatatcaaataattagattttaaactcagatcgtctagtgtatcattttatgaagctagccgaaagatgtctgatgtttcttcagtaagtcagggcagaacattgaaacaagcaaagccaaagttaatattcttcaaagtaattaatgagcaagtgacgttttataattcctctatatttgactatgtcatcataatttgtcaagtgtgtttttctcgctagctcaccgttttttaataatagatattttattaaaccggcatcgatatctgcaaagggtacacagccaacctagcttaacggaaatatatatccacaaaggaggcgcgcggggaggaccgcgagcggtggttccagtggcgggaggtgcgtgggctgcggatccggtggctggaggcggatccgacgacagggaggtattcgggtggtgaatttggtggtggggaggcccacaggtgggccgacggagctcgggcgcgcctgtcgatgggtgatgaagctcaggcggcgacggagcttggccgtggctaaggttatgagcgggtggcgacgacgaggcttgcaggcgtgggtcctacggtgtgttggcaacaacaagtacaaagattcggcgacgtggacctcgacctccttcctccgcgccggcaggagatgctctacactagtgtccaagtgcgctgtggtggtcgatttgtgaatctttagtgtgttgcatgcatgttgtggtttgtgatttcttgaatttgtgattgtgggattggaggatgcgatgtttgatttgtggatttgttattgtgggattagatgcaaattcatagaatctgcgattgtgggatgtgatgtttgatttggatttgtgattgcgggattaatgacaaactgatgtagattgtgaatctggttttggaggttctaaaaataaaatttaatatttttgccggtcgattttttttagccaaaaatctctttgctggcggtccgtataatgtagccgccattgaaaactgtttttcgcaagccgataaggcccacctacgatgattatctattttcattgaccctgatcacatgcggatagagagtccgctggtgaaaatgtgttatggccattaggaaaaatggattttgtaataatgacaagccatcgtcatttcacgacctctcccgagaaaaccaaagaaaactaattagtactccctatgcatgacatcgttgacttttagatgacattcgattattttccttattaaaaatattatataaatatcatttattttgttatgacttcttttatcataaagaaattatagtataaacttacacttttacttttacatatttatactaaaattttgtataagataaatggtcgaacaatcaacggtcgaacaatcaacggccagatcggctgacgctgcgcacgccgtcgctcggcggtggaggcggagccgctgcgtctcccgcccatagtcgcccgtcaccaccgtgcccgcagccgtaccgtgccgcgtcattatgtgaggcaaaaaattacacatctataatgtgagggaaaaaatacacatctataaaaaggacgaagattcattttatagcttaaaaagaaggcacgcagctgtagtatccatcactattcactgaaggtggacgacgaccacaaatggcgtgcaaaaaatacacaacagaatcagggcaacgcgcggatgtgctcgccgacgaccgcgcaggactgtgtcggcggaaggtgacgcagacgaccaggacaggcttcctctatgcccctgattctgttgcaacaccggagaggagtcagatccagcggtgcaccatctatgtccacgagctgccgcctaggctcactccctcggagcaaaccacgtcgccggtgtagggagaggttgtcgccccggtggccgatgatgctgccggctactcccagatccggaaaaaaaggatagagattggagagtgaatggggaac

SEQ ID NO: 10002 - DNA, 877 bp, Oryza sativa
atccccattcaagtctcagtaaatcaagaaaaatgtgtttaatccattaaaaatggttttgttctctgtttcagtagtcttatagcctgtttgcaatgtttgctttgtatgtcgctagattccggttccttcgacgctccggtgtacttcgagatagtcgccgaggttcctccagcagcagagcaaggcaagtcatgcttgtcacttgaacatgttgatcctatattgcaaatgctctattgttttctttcaaatattgcattgttttataatatcactatgggatggatacctattgttacagccatgcttttggatatcatgctcctttgttagcttgggttataacatgattagattttggactaggacttgcttagccatgcttagttcaactagcacacattggggatctcatttaaaacctagactatagttttatttgataatgttggtttaataccaccgctctggtgttggttaattaaaatgaaccacatggtgggctgtgggtgcatggttttgctagtcgcacccatggcagttaaggaccggttcgcgggatgccctggaagaatttaccgtgcttaccacaagccagcgtgggcaacggctgggcttgtagtgtagctttcctctagccgacgcatccaggcaagggtgggcgtgatggagtttggatgggccctgcgacggcttatccgctttccggattcacctaggcacgagagggactggccccgtgccttgcgaggagtgggggtgaaacctgaggtgtggtgtgcttggttagagggggttatgcgaagggtcctgtcacggcctctttccggtatgtcgtggtgacatgtcggcgcacggaaacgtgtcgtggggc

SEQ ID NO: 10003 - DNA, 108257 bp, Oryza sativa
gccatggccgaagtggaaaagaaaagagagagataagggagagagagggaagaggaagaagggtcggaggtagaaaggatgacatgtgggctccacatgtcagtgggtcccatatttttttgtttgaatgacaagcgggtcccacatatattttttaattctaacgccacatgagtgccacctggaacaaataccaggtcaataccgccacgtcaggaaaaccatcctctaaaaccaccgagggtttcaatagttcggggagtcgtcttatctgtttttcagttaagggatacgaattaaattcggtgtactttaaatggagtcaaagtggactttttcctcccagcttcgctcctgtgaaatcaatgtttgtaactagatgccacctagaaaaatgagtataattgttaggaaaaatagataattgcagttcacatgttgtgttaggcttgttcgtgtcccaaacccaattgggacgtgatggacgtatttggcttgagctggagaacaagttccaagtgccagccaaacccaatttggccgggttcaattaatccccatgagaaaggcagggcagacgattggctaggacgattttttacttgtgatataagtttgctaattcgtgtgtaattttagcgtttccatataaaggctgtgtttagttggatccaaagtttagattttagttgaaattggagataatgtaactaaaaagttgtgcgtatgacaggttgatgtgatgaaaaagaactgaagtttggatccaaactttggatctaaacacagccaaagttctttttagctctgaacaacaatttaagctattccgtagtcacttcgctaaaacaggaatgaacaactatttaagctatttcttagtcactccgctaaaacaggaacgaaacaaaaaggtttttgaagcacggttgtactaattgcatagtatcccaacatggtccggtgaacagagaagatatgaaaccaagactcagaaaaccacagcacggttgtacagtgctaattcgagttcctcgtcaaaatctgactgaaaaatgaaactacaggagctataatttaggtcatccgctgggcagcctccttggcgagcagcttttccctggccttggtcttcgcctgcgacttggatcccatgacgccgcctccccacttcttcctaacctcatcgaatttgtcgttgaagttcgcctagagcaagatggtttgcagcgttagcgaatgaggtgctaaagggtggcagcagcactggatagtatgatatgatgattaaatgcacgagggatctcgtggtttctcaccttgatagcctccaggatcttgctgaactcaagcttgtcctcgttcttgacagtggtcaagcagaggacagatgcagttttcttgtgaacaatctacaagtgattatttgtgaagaatgagactctttatactagcacctataccttcaacaagtacaaacaaggttcaggaggaaatatactgatccaagacgggcttttcctttcacaatgcagtaagggacctccatcttcctgcacagggctggaagccacacaaccagctcaatcggatcgacatcatgagcaatgacgaccagttgggccttgctctgcaagaaaaccattcacttatctcaacaattttgtttgattgtttgttcccataaagatacgccttgattggtaactaacaaagatatgcataggtcacttaggttctgtacctgctcaatgaggtatgtgacatggttaagaccatacttcacaacaattggtttctttgcctcaacggttttaccttcagcctcagcctgggccctcttcaaaagcctctccttcttagcagccttgtcctcagggcggtacttgaggagcatcttaaacagattagttgctgcaaacaactatgcacataagatatttttgacaccatgaattgtaaaatataacaaatgccgcgtacagagcaattcaagttgaactgcatgtaagtcctgttactttgttttgaagtggtactatgaacacaataatactaagaacacaccagccacattagcaaccgacatcctactaacaatggtgtcaacgtatgctacgtacagtggacagatgaccaaactatactaatactaaagaagactttagtagtaatacctcagcatttcctgttcttatttttcattcacggacaaatttcctagacactagcaaacaacaaacactagtgatgaaaagcttcgttcaactgaaagaaatctaccctgctaaccagaaatgtactactaagctagtagtaagccataatcaagaacattacattacttgggcactatatacaaaccaccacaattcaaggttcgcaatgaacatatatacaggtggattttcctaaccatctcagtgaaccaagtagcgttccaggtgcaatgccaaacccgacaaatctgactgatgggacgatgaacgaatcaaggcgaattacataccgaggttcttgtcgagggtgcgagtgaactggttgagcgccgggggcaccttgaggcgctgcttgaggatgcggcgctggcgctggatgcgcaccaccttgggccacttgacgaaccggtgaaggtccttcttgggcggcagcgcgccgccgattccgaactgcttcggcctcttctcgaacagcgggttcgtcaccttctcctgcacccatcaacatcccaaatcaaaccacgccccccccccccccgcaacaacaaagatttcaagcgcgacaacggagcaagagatagatgattgcgggtaccgtcttcttcttcgccggcaccggcgccctgccgcctcgcttcggggcctgcgagatttacgatccagacgcatcagcgcatatacatgattcatatgtaaagttgcaacctccaagcgaggtctcgagataagctagcagccgctgcgagaatccaagacagcgttcacaagatccaaggaaaccacacgaaggacaccacagaaaaaagtatcaccaaaagatccggtttcttcgcagaaaggaaaccgctggagcagctgcgatagcactggcacacaaaagacgcggcggcagcggcggcgagaacgtaccatttcgccggagggggggcgctggagcttggtgttccgaacgggagacggcgaggcggggggtggagggggaggcggtggcggcggcgagaggtggtgacgcgaggcgaggtggtgattttatagaggaagagtcgggacgacgtgaatgcttccagctcgtcggatggcgcgagcttgaggggctcgggacatcttggccgtccataggattagggtttaggaggcgtcacttgggccgcggccgtccataggctactgggccgtcccggttgcttttaaaagtgaataagtctgtttgcctccctcaactcatgtcctttgatttgcaacactcaaccgcaaaaccccatatatatatatatatatatatatatataactctcaaaattgttgcaaatctactaccctggtggtttcggaagtggttttgtcccacgtgtcatctttgtccacgttgtctagcactctagctgagtcagcttgtgggacttacatatcagggacaaggataaaaaggaaaaacggttgggcccactgtcagacacacttctcttcttctctaggcccttctctccctcctccggaagctcgatggtcgctgccccaccccgccgatagccgttgagtcttgttcgcacgcacgaaaacaacaaaaatctagcgtaaataaaaggggatgggagtaggtagtagtgacagttgaggaaatcaagaaaagagaggataatgcaacgggagatgggggcaatcggagcgggtcattttccccgcccaccgaagaggcagtccctcagacagcggggagtggagacccctccccgagagtggagattcgaccagggggttagtcggcgagcggtgcgaggtatctgcgatcgtgatggattcgcggggcccgaccaccccgcgaggaggaggaggtaggaggttatacaggttcaggctacccggaggtgtaataccctactcctgtgttggtgttcgttgtcttctctagatcggctaagaactgaaagttcaagtgccattgatttggttttgatgattaataacaaatccaattatgtgagactaatgtttttataagcatttctttgcctagtctcatgtggatatgaaagtggagtgttggtggacctaaatcacaagaatgaaatacatggagatcaagctatatgtatcactctttctcttcatgtacatattgatatgttcgtatataatatttccacgtgattggcatatgcatgtgagactaatgttttgtttgagtattatctcttatttagtctatttacattgagacgtggagatgatgaatgtatgtttttattttattgtctatatttgataaatgccttctattcttgtataggataagctctcaatgtttaatatcttgttatgcatactcttgcttcacacaaatattttatatgcatacatttagggggagcaaatcctatactttagttatgcatgtaatcgattcaaattattcaccttcatttaattgagatctttacacttgaacatatatttgagtatatgacacttgtggtgttgattaatactcatcatttattcatatccttttatacatgcgatcggttggtcaacatgtgtaggttgacaaccggatcattgggactaataattttattgagttgaatgaaagaaataggtcccaaggattacaaaggtgttgatgctcaagtgatatcattacatctaacaataccaagaatgacaaagtgaagatattgaagatgtgtgatacaaagtggctattatggcaagacggtgaagggcaagcgatgctcggtcgcgatggaccatgcggcggtgaagggcaagcaaggggcttggcgccgaagaaccaaatccggtggtgaagggcgagtgacggctttgtcatgatggaccgtgcgagaccatttaaagctacaagtaaccgcatcaatcatttgaagaatatatggtgaaacggtatcggcattggcgtccctcaagacaatgaaagaaagataaaaaaaaaggcattcctaatggtatagttctcttcttatttacatttgagtttaggaatgccgtactattaagagggatgcaacgtcgaggtgtttgtgtatgtctcggtgctcaaagtgacctatcatagtgctaccttgagagaaacccaagctttaacctatcctttgagtggttttagaccttgtttttggttgagttgggtagtcctctgagtgagctttccatagagtccaagttcatcaaaaaggactcccgagcgaaaagttatagtcgttttactctgtgcttttcggaaagtccgaaaaattaccggaaactccgataattttttggacaactccgaaaatttttggacattccgaaaatggctgcgaatctgagatttgcttctataagttttcggacttgtccgaaaatgcttttcggaaactccgaaaattacagtcttggcctccaacggctagtttttgaggggctcgggtatataaactcctccacccctcctttgagtggctgctgctcttggggagtattagacacatccaaagccaaatagccatccctatttccctacctttgtggtgcctctttgtgagggggatttgagaaggggagagagttggattgagagagtgaggagttgagagctagtgagcttcactccatcctttgtggtgcctctttgtgagagggatttgagaaggggaaagagttggattgagtgattgagaagttgagagctagtgagtttcactccatactttgagcactcgagttcatagcaagcaattcttcgattgtgtttattacttttggggactaaggtctcctagacggctaggcgtcgccggtgagcacccaaggctgtggtgtgccacggaaagtttgtgaaggcttcgatttcgcctccgcaagggaagaaatcaaaagtaaaaccgaggagtgcatttgtgcaacctcgtgaggaaagggttgaaataggcccggcccttgtggctcctcaacggagacgtaggatccgtggatccaaacttcaggaaacaaatcacgcgtctcctctctttgtttgcccatttgtgcattctctcatattgtgcttgagcttgtttttacccgatctacttgcatgcttaattgatttagttggtgaccttatatcttatttagataccttatttgtcaccttttgattcatatacattttgtttatttgagctacaagttcatagatagtgttttattcctttatccgccgaactttttgattgagaccggaacttccaatctcatatcggaagttcctatttgaaccaaaagttctcatcattctaatatgctacgaagttgtgttaatttttaggaacgcctattcaccccccctctaggcgacattaaggtcctttcaagtacaaaggagaccttttcaggctacaaagcgatagtactcacctaagagaatccaacccttcattcgtatctagtccccttccttttatagtccaaggaggggcttaaattattacaaatctactcttagtgttgtctcatcagccgtcttgtcactgccagctggttccctaacgcagtcctcaagaaacccttcaagtcttacgattcatattaccccgggctcccaggctctgtctgagatagttgggcattcgccaatgtgctcaccacgtggtgcgtggtgggcccaacgaggcccgatctgcctgaaatagcgccacgcttgcttctttgcccgtttggttaaatcaagtggcacggggcatgtgcgacgcgtgtcccaggcgccaccgtccaaagtgactcagcgttggcgtcttgtccacttcctttcaactcagactccccccataaagctatttcacttatgatgaggcgtgctacctccaagctggatgtggagcatgcccaacttcctggaagtttatgaggtaacgccctcccgtgcttaaagaaggttgattattcttggatgagcttcttgaaggtatcgttgatggaagaatatctcaagattatccgtcttatatattttgacgcccctctaagcagaggaacgcgaactatacaaggactaaggtgagtccgaggcctaggactagaccggacctgaggcagaccttagcttatcctcttaatatataggtcttgcatgtttctatgcctttcttgccgaggaccgtagaaccttcaagggctagggtgagcccggggcccaggacagagccgggcccgaggctgaccttaaggcagaggaggggcatttttgtgacccaagccaggccccaagttacttctatacacagagttttgagacatatacataggatccctcctcagccagagagaatcccatatatgaaatcttaggtgggcccagggcctttcggaaggggttcctagctacgtcaccctagggttacctttttatttttaaatacattctgagcatgctatttatttgataatgatcctttttccggataaatgaggaccccgattcccatttcaccgacaaacggcagcaaattggatgacgctcacgctcatcgccatccttccccgaaccgaggcaagctgtccctcatgctcccgaacatgaagaggagttctccatagaatgacgccactagaggctgctgactcatagtgggagcggcaccgccaaacacgaagtcgccgttggtgccaacaccaacaccgctcggcccaatctccccgatcccatcctatcctatgtcgtctataccgctgtcgccgcagccaaacggattccatgacgccgtagtgagtgacgccggtggctgctggcgggagcgggaggagtaggcgggcgccacgtggcgcagcttggctagatgcgggaaggaggaggcagtggtgcagccatgtgatcagaggaggcaagggtgagccctaggttggggtttcccatggcgcctaggggggtgctgctgctgaggggtgctgctagggttttggcacgtggggtggaggttggcgctgctaccattggcgtcatccctaggcatggcaacggccggggggaggggattgcaggggaggagaggagtgtgttttagttggtccgatttagggagagaagcggaggaggaagggttgcatagggaacgcgtcgacgatggtggccactgatagtgggcctcacaatttttcattttattcttgtcactgacatgtgggtcccacaagctgactcagctagtctacaagtcaaagatgccacgtgggacaaaattgcctccgaaaccgttcggggagttgattttcatcggttttgggaattagggggttataccctgttttgcggttgagggatgtgtgattcttctaccagggacatgagttgagaaggggggcaaaatagacttattcctttaaaattctgcttggaaggagagggaggagacagtgcaggagtagatgtccaccttcgccgggggagaatggccacctcccaatcgatgggcgtggggtggagatcctcgccgccgtggaggccatggcgagggttggggaaggagttgatggcgacgtcgcggccagtgaggaggttgttgccggccttcctggccccacctcctccgcgcctgtggcctctacaacactgtgttacccatcactggcgccgacgccctcatcctctcccgcctcactccgctgacctccacctcacctgctggccggcctacctagaaaagagtgagagagaggaggaagggagagaagaggggaaagagagggtgatgacatggccaccctgacatgtggggcccacgttgactcagttgccacgtcggaaataaccagggttaaaactgcctaaagacccaaagtaacctagttttgttagttgatagatgacatatatctcgtggttttgtaatccgatgacaagatgagggacctgatatgtacttttttccccctaaacactcccaatgtggaagtaaacggccccattgttattcggggaataagcgaaacgacatatttacaaatgaaaaataatttgtgaatataatttttatatacatgttcttagcaatctaaaaacaaatgttaaaaaataaacttcgatgaaaaaaaccctaaaatcaacaataaactttaagattataaatttaaattgtggctgataagtataagtataaaaaaaaagacgaggccgaaaaatcacttgggcctgttctgttagtccagcccactaggcaactccaacggcggccgcatcaaacatggcgtcggccggaatcgcagcgccaagcccccagtctcctgtccccaatcggcgacgcagaacagaacgcgagcagtcgagcagcccgaccaccttgaccacatcagctgccagcagagcaggagctctctcctcttttttgacttcaaacttgcgctcgctcggcgacaagctcaccaccaccccatccttttcttttaccttcttttttttttcttttccttttttgctctccatggcttccacctcctcatcagccatcacctctccctttgcaattctctaccaaagcgagcatcactactactagtgctccttccactctctcctcctccttacactgtccctccatggaggaggcccctgcaagaagcgcctaaggatccctccattcgggttcaccccaccacaatggcggcggccaacgccggcgccatggtgcgcttcgtggcggcgttcttggcggcggtgctggtgatgatggtgccatgcgcgccgcgggcggcggcggcggcggtcggggtgaactggggcaccgtgtcggcgcaccgcatgccggcgcccgtcgtggtggagctcatgcgcgccaaccgcatcggcagggtcaagctcttcgacgccgaccaggccgccctccgcgcgctcatgggcagcggcctgcaggtcatggtcgggatcaccaacgagatgctccagggcatcgccgcctcccccgccgccgccgacgcctgggtcgcgcggaacgtgtcgcgctacgtcggccccggcggcgccgacatacggtgagtccccgccgcgctccctcctgtaatttgggaaaaaaatggattccttttttccttgagtctctcgctgcaatggaagaatctctgcgttcttgcatacctacatcttgctgtattgtgtttgttggattcttgctggcactgtgtttgtgttaatgcctacttgcctagtcaatgagatattgctagtctactgactcggaacagtgttaagtgcctctgcttgttttctttttcggaaggtcactgttcgttctcttctcttatgttgattgatctggggttattatattaatttaaggtgtatctttctcttgatgactggaagtttgtttatagattgtcaggggatgcagtctagtgtaatgctccttatactgattcaagttgaatttagttagtgcaagtgcaatgcagacccgattgccttttatggacaattgcgccagtacatatttgtgtcggacttggaccacacaattgcactgttatttatgatgaacttgacttaatggaccctgtgattctgttgtagtcgcctttgtgtctgtggtttcagtttaatggttgaactgaaattttgctttgtgcaatacacgtccttgtcattatgtagattatgaagttacctgcgttttcaatttattttcaggcacataaaacaagacacgattttcttacaaaacttaaatgcacgtcaagatgtttttgttctgctctgagagttggcattaataaaaacataaataacacttggtaccttctgttctgtatcttttagtcactatgaagcttctacttgtcagagtagaacacaaggcatgcaaagatggtaattttctatgatacacatcctgaaaatataccatgtgtatggtgatttctagatatcatttggcaaacaaaagctctgtcaaaattctgaacgatcattgaaaatacagtattgacatgccaaaagcccaaagcaatgtatagccaccagccttatttttgttaagcaagtgctactatgtttgaagttatttctgttactttttagaacatttcaatatacaggattcctcaaggattaaaatgtgataattatccttgcaaagcatagtaaaatgtgtttcaagagacagtgtctttttccatctgctagatttcattcattgatgcacgtgttagatgccagaatatatctgcacatcatgagtccaatttagcgtttaattttctactgctttgggatgtcaaatttagcttttccatgcaatccaccggatgtcaatagttgtatattccactattcctctatctgatggagtatacactggaatagaactcaacatttgttggtgctaacacttatccattttttgttcatatcctaggaaataggggtatctaaagtagcctttgagcttgaatggccctgcactttatttgtttgtggtcatctatattgtatttttaagtcatactgtattagtgttaacatgctacccacacaaaaaggtgctggcattcagaacaggaaaatggataaagaaagattgtgggtagcagacattctttccatgtcaaaagaaggaaaatgagagaaaataagttgtatgacatagcttttcctgccgaccttagccatgatagcaatctagcaaaagctttacacccatactctgtctaattcagtcacatagatgtgctagtgtacaaaagcttttggtgcaaacatcactgcaaagctggtgagaggaagcaaataatttccaaataccaaatattaaagcaaggaaaggaaataaacatatttatctgacatataaacaggaaagtggttcttactactctcttactctctatatctggtaactggcaagggcttaccgttgcatcacttgttgtcacttgtctctcgaattggacagttgctgagtcaagcttatatgttctaacccgatcatttggcatgattaatcttctactatgtttgttatgggttgcatagggggtaaacaccgctgggaggatagctgagcggcacggctgctagggatgagagagggacttgggtactgtttatgtttttgttgttttctgtggacatgcctgcatttgtttgctcaatttcagaacacacagcagttggctgcatttacatgactacatttttgttgaaacaatttcttttgtaggtattgaatagatgaactattgaatatgtactgtttctctatttcatgaagttttaatcggagtaaccaaatgggtcatcccagcaacgatcaaatgatttgatcatgagataatccattctatgccatcgtcaaagcatgaattttacaatatgccactgacaaaacttagttcaataatataccatccaacaacttgttttctttcttatatgtcatcgccactagtcaaccattagtcaaactccgttaagggagagaaaatatctattttacacctaggatatcatgctacatgtggattttattggtcatgatccactattttttctcattgatgaaaaatagaaacagcatgtctttttatcatgtaagactatttgatgtgatatggcattgtgcaaaatctcaattttatcctaggggtaaaattgtcattttccttcccttaacggcgtttgactaacggtgatggtatataaggaagaaaacgaattgtttgatggtatattgtagaattaagctttgtcggtggtatattgtaaaccaatgacatagaatggattgttgtgatcatggaacataatttttgttttcatttaaggtggtcagcctggtaggactgtgaagtgtgaaccgagtggaaagcaacataaaatgcatgcttttctaaaaaaaaatactaatgttgagtatgggttaaattacaggctagagaatcctttatttcagaatatttgctgggaagttaatttatgtgcttaatttttttttgttgtacctatattcctatggatgtctattcgagctgtttttacttgcttgagaattttctttcttttctctgaaatctgttatgttgcttactttcttcctctgctaaatttgtttatgactttactttattcattttcttatacttgtccctaatttaaacaggtacattgctgtgggaaatgagccattcctgacaagctatcaggggcaattccagtcatatgttcttccagcaatgaccaatattcagcaatcattggtgaaagctaatcttgcaaggtacatcaaactagttgtcccatgcaatgctgatgcatatcagagtgcatctgttccatcacagggagtgttcagacctgatctgattcagattattacccagctcgctgcttttcttagctcaagtggtgctcctttcgtggtcaatatctatccattcctcagcctttaccagagctctgatttcccacaagattatgccttctttgatggatctagtcacccagttgtggatggccctaatgtgtactacaatgctttcgatggcaattttgacacattagtttctgctttgagcaagattggctatgggcagctaccaattgcgattggcgaggtgggttggccaactgaaggggcaccaagtgcaaacctgactgcagcaagggcattcacccaaggcctgatcagtcatgttttaagcaacaaaggaactcctctacgtcctggggtgcctccgatggatgtatatcttttcagccttcttgatgaagagcagaagagcacattacctggcaatttcgagcgacactggggagttttctcatttgatggacaagccaagtaccctctgaatcttggattgggcagtccagttctgaaaaacgccaaagatgtgccatatcttcctccacggtggtgtgttgcgaaccctggtcgagatcttaacaatgtcgagaatcacctaaagcttgcttgtactatggctgattgcaccaccctctactatggtggctcatgcaatgctattggggagaagggcaacatctcatatgctttcaacagctactatcagctgcggaaacaggacgcccagagctgtgatttcgatggacttggcatgatcacttaccttgacccatccatcggtgactgccgctttcttgttggtatagatgacagtagaacatctacaatctattcttcaggtgactgttctcggaggcgctttggattgtggatcttggcgttcttggtaattgggttccttcagattggggtttatttgtgattttggttgtcgagagtcgactttaaacagctcccttgggcacacttcccatgtccttgtgaagtagcttcgtcaattggtggcttctagatgtaggaaaggggggacactgttagatgtacatgatcactagcttgttcttgggattgtgctgtccaattctgcaacttccgatcttcatgctaaggtggccaaaagctttctctagattgaaatgaagatggtagatgttgttgcaacctgattctgccattctttggtaccaccattttgatttggggcgaatatatttcttttgtagggggtatatgaggctatggtattgctgtggtcttaaagatacctcatgaaaccgctgaaattcatactggtggaatcacgagaaattgttttgtttgactagctttgtccactggatatacattagggtttttgtgcaatctcaatgcctgacatccattatattgtgctatatgagaatgtcataaaaacgccatgttttgctgttccctcgttcacaaaaatacaggtacaagaaatggcagccatgtgcccatgtcaattcggagttgcatcaggcctcttttattactcctagcttaatgccaggtcaaacgttggttgcgttcctcaaatcagatcaaggaattacatcaaaggcctcacagtcaagttcctcttccacagcaactagaggtgcttaaagggtagagtatttctaaataataaagcatctttataagcttccttttctccaatgcaagcaccttttcatgagtgctcaactggttgcaagaacaattaatcagggatggttataagcttaagcagctgctaagcaccaatgcagtaatcttccaatccaattttaaaaatattcaatatgaagtcttcaaagtttttaatcgaagttttcaatttgaaatataaaacctttatgttcagtaactttcaagttgatactttctattcaaactttcaatttgaatagcaaaaactttatgatctaaaactttcaacggcaatctcaaaaactttatcgtcaaaacgtttgaatcataattcatccaattttaacccattcaaaacttttacttataacttttcactctcaactcaagtctcctaaagtttcactcatgacatcaaacattttgcccaaatgaacaaacttttatctcaaataataaaaaactttcaatccagggatgaggtcagcttgtggccaggtctgaggaagaaagaggtgcaaggcctcatcgatgtcacggggattaggcctaggggcttgttagtaaggaggaagaaaggtactttgagctcataggggagtagggagaggggtatgggcggcatgccaaggaggaagaatgtgactcgaggctcacttacactaagacaaggaggatgaaagagtggtacaacatgatgatttgacaacaacatatttatgtgtaagtaagttcgcgtgtcaatacaattgggtgactgttggaataagtcttttcgccatgttgacaggcgaaacgattttgtgcaccaacaagttatgagtactactttgtgtaagggtatgataaccaatggcacaactttcctcatatgatcaccaaaacaaagtacaagagtgctagggcaaggttaggaatacaaaattagagagcatgaaaagacatagcattaacaaaccaaatctgatatggtacatgtgtgtgaggtgggcacaaaatgatctttttgctatgcatgactaggaaatccattggaacaaacaatattttcaacaaaacccaataggattcctagtaggctcttcgagacgtagggtggagaaaatggaggaatggtaagaatatatgatgactttgataggaatgtaagtgtaaaacagtggatgacatgaatgcaagtgcaaaaaaaaagattgcaaaagaaaaaaaaaatctatgagtgattgtttgattagatttcatgaaaaatgcaaaaatcaaatgagagaggtggactagaagtgaaaattttcaaaaggttagagctcttgctaacttttcttcaaaatttatatgcactaaaccatcccttaggaattttggagccccattgaattggaggattcaatttccaaagaaaattttcccatggaaagcttttgattcataggaaaaggattaaaaaaatttcataagaccttcatatggctcaatttcatagggaaataagccaagaaatccaacctctcgggaactataatttgctttgtttatttcctatgatggtattaaagggaccttcttgagctttcccgtgttttctattcatgtaggattagagaaacatgttactttaatttctacggttttcctatcacacgtttcaaaggagtcactttaattttttcctacaagttgtttggcaccaacaaaaatgttataatcttttagaatggttcccattcctccaatttcacaaccaacaaaagctgaaggaaaacaaaatccttcacaccgtttttttctaatatacttaattaatcatgtttcaaaatttgtatgttttcaattccatagtcatttattttgtgctctcgtattttttttctgtttatgtatttttagtcctttgttccaaataatgagactatggaattttgaaacaatttggaatgcagattctgagaaaacgaaccaacaagagagagacgtgtcgcagacgctccatatctcaaccgcttccatcctgggtcccacctgtcagctagccacacccttgataaatacccgtgaaacccaggatcccgtgggtaactccccaccttaaaccccagacaccctcaaaaaccctaatcccctccctcccgccgccgccgccgccgccgccgccatgggctccgcctccgcttcctcgctcccggcctccgccggcttcggcgagaacctggtcctcatcctcgacttcggctcgcagtacacccacctcatcacccgccgcgtccgccagctgggggtcctctccctctgcgtctccggcacggcgccgctcgcctcgctcgcgggcctccgcccccgcgccgtcgtcctctccggggggccccactccgtacacgcctcgggggcgcccacgttccccgaggggttcctcgagttcgccgccggcgcgggcgcccacgtcctcggcgtctgctacgggatgcagctcctcgtgcagtccctcggcggcgccgtcgaggccggcgagaagcaggagtacgggaagatggaggtggaggtaaccgcccgctcctcggcgctgtacggggagggggaggtcgggaagcgccagacggtgtggatgagccacggggatgaggtggtgaggctgccggaggggttcgaggtggtggcgcgcagcgtgcagggtgccgtcgctgccgtcgagaaccgtgagaagcgcttctatgggcttcagtatcaccctgaggtagcgaccgttacgattcttacacacatttttcaattggtgttatctaaatcaatcaacaaattcaattgcatttattagtcgttcttggaatatcatctctttgttgaaatgtgcattttgtatttggattgatgttatctaaattaaccagcaaattcaattgcatttatcactctttctcggaaaattatctttgttgaaatgtgcattttgtatttcggtcgatgttgtctagattaaccaacaaattcaattgcaattattagttctctttgttgaaatgtgcattttgtggagcatataagatgtaaattttgtgggaaactgattggttattgacgattgattattatttagttttgaaggtcaatttttgttttgaccttttggatagtgggtcttcttttcctgaaatagctgggtatcctttggggaaggaaaatagtcagttatatctaaacttccacaatatgaaaaggtgaaatagctgggtatcttttggggccataatatgaaaaagtgaaatagctgggtatcctttggtgtaaggaaggttgttagttccacaatatgaaaaactgcaactttagaacgactgtgattgcgctacaactttaaattttgctttgtttcgtatttcctgaattaacctggatgctttctgcttatctagatcttgtgctaagttttataatgcaactgctgtatatggtgctgatgttttctgcacagagtaaaataaatttgtgtttggggcttagcatactgttgattgtgtgttcacttgattgggatttattattatgcactcaatttggttcttttgtagttggcatgcatgcatggcaaacatgttgttaaactgtttacaccaaagcatggttatgacgaagtattaatttaaactgtttacaccgaagcatggttatgacgaactattcattcttttcattatacaaggtgacacattcaccccaaggaatggaaacactgcggcgcttcctttttgatgtttgtgggataaaagctgattggaagatgcaagatgtgctggatgaagaaattaggacaatccaaagcatggttgggcctgatgaacatgtgatttgtgctttatctggtggagttgattcaactgttgctgccactctggttcacaaggcaataggggatagacttcactgtgtttttgttgacaatggcctattaaggtagtccttgtttcattatgttatttagtgataacattttcagaatcagtatgcaatggaactgacataagaccccttgtacagatacaatgagagggaacgggtaatgttaacctttgaaagtgacttgcaccttcccgtcacatgtgttgatgcatctgagcaatttcttagcaagctaaagggtgtcaaagatccagaaatgaagagaaagataattggaagggaattcatagcagtttttgatgattttgctcacaaattagaacagaagataggaaaaagacctggatatttagttcaagggacactgtaccctgatgtgattgaatcatgcccacctcctggaagcggaaggacacattctcataccatcaaaagccatcacaatgttggtggtcttccaaaagatatgaagttaaagctaattgaaccactcaagctcttatttaaggatgaggtctcattgaaatttatttacataatatctctccatttttatcctttgcatgatcttgtgcaataaaatttacataaattacattttgatggaaagattctgataagtaaatttcaaacatatttttctattccaaaaggtacggaagttggggagtattttaaatgtcccagagtcattcttgaagcgacacccatttcctgggcctggtcttgctgtacgtgtcctaggtgatgttacagaaggcaatgctttggaggttcttcgtcaggtttgaagcctttcaaactgttgaaaaatcactacatcagctttggtatatgatgttaattcgcattgtcatttatttgtcaggttgatgaaatatttgttcaagccattaaagatgcaggtctctatgatataatttggcaagcatttgctgtgtttttgcctgtacaaacagtgggagttcagggtgaccagagaactcactccaatgcagttgctttgagggcaattactagtgaggatggcatgactgcagattggtatgtaacactgacgttctggctcttacacccacttgcaatttgttgattgtcgcagccttcgttgtgccattttgcagcagtttcttgtggttcgacagatatgttatatacattgcacagttcacaataggatacttgtgaattgaatcatgcccaccttccagtagtttgaatgatgagatgatagttcagcattcacctttatacccttgcctattgccttcttgatcatttatgttaataatttgctgcttcatttttcatcggtttatcagccgtagagcaaacaacgagagtcttggtttatcagccgtatagcaaacaagaagtcttggttatctttgaaatatttttaaattatttgacaaatacaaatttagggtgttcattaattttatatttgtctctggtgcttgtcctgtatgcctatttcttggtgtgcaattattgcttaggtctgctgatagttcgaacctacagaaatacatttgttttgtgttgtgtgtgtgaatcttttgaaatcttgcatgttttcttatgtgataactttgccctgtgaactcttttctcaggtattattttgagcgtgagttcctggtagatgtggtcaacaagatctgcaacaatgtgcgaggtgttaaccgtgttgtccaggacatcacgcaaaagccacctgcgacagtggaatgggaataggaacttcgtgctctgaattctgatgccgtggagtggcctacttttatgctgcaatggagtgggaatatcaacatattcccatattatacatatagctgtttattactagattgtttgtttacatcctttgacaaatccctatttgtcaacctgtgatagattttgaactgagaaaagctttgaactgcacttattaactgtgctttctattcttgaatagatatcttcacctttgaagaccttttatcttttggagtaaatctttgttgctacaaaattttcattatcccttgtgccccccatcttttagacaaagagatgtgccatctacaggatttggattttttttttcaattgttcttttaggacagaatcttttagacaaaagggatgtgccatctatggatatggattttttttttcatattgattctttaggatagattattggtgttgaaaactgacgttggagtcattgggccttctggttttagcggacgttggctaattgactgctcgattatggcattgcattctgaagattgagcatctttttcctttttatggccccatcgtgaaacgatatatttacaaataaaaagtaatttgtgaataaaatatttatataaggtcttcttagtgatctaaaagcaaaagctgaaaaataaactttgatgaaaaaactgtaaaatcagatttaaggttgaaaatttaaattttggatgataagtatgagcataagcgaaaaaacaaagctcttaattgcaaagcgtcgaaatatattaacactaactggcaacctttactgtggcaacctttactgctgcggtgcaggatgtgtctgatccattgttaggtttttttttagataatggataaaatccagcctctatatctaaagtggatatacacagccaaaggttgtttacacaagtgcatacactctaaaacccatgattgagaaacatgaaaaagaacaaccgaaaagaaaacactagaaagtagatgcggagctagcccgcccttccacacccccctgctgtcactgcaaccaccataaaagcttcttcattctagtctaatcaccttgtagttgccaagcaagggtctcatgctgcctgaacaacctactcatctgcggtgctaactactatcgctaccatgccgtcgtcgctgtagagaaccatcttcgtcgagctgccatagtgccatagcttatctcgccaaaagtcgtcgttgctacactgacaccacatcacacgacaaccaacaccccaaaatgcaaacgacaccctgttgccccatcgcccacctccgccgagcggccaaagcttatctcatcagaggacctccgctgccaagttttcgtcattacagaccaaaactttcgccaagccgttgtagcttatctcaccgaagagttgtcgctgcaatgccgatatcaccgcagaacaatgattcatcttgttaggtttactactgattcttcttgtttacaatttttcttgaacaatgacctctctaattattttaattctctctattttttcttattttatcattattttgaatggagttcaatggttaaaacggatcttaaaaatatatgtttgaaatatataagccatcaaaaaaatttaaatagacagtatacatgtattactcacattgtcggaggctattgtatgcgtctcgccgtaagattaattcgtgcgtgcgcgccggttagattttatcaatttggacatatatccaatgttgttttcacttgccttaactagtaattaataaatattgttagacaaaagtgataggaaaaaagtcaacatgttatttatttatattaaaaaaacagaggaagtaaaaaatgtgaaaaaccaacaggaaaaaaaatcgaggaaagtactctgcccggccagatgctcagccgggcccggtgttgaagcgttcctccggtgatctggactatttttcgcggtcaaggttagccaaatttaggacttgagaaaccgtccctgcaagcaaaacgaaacgaacaaaaaaaaaaaatcctggatcaccaagcttatttataccactcagtcacactcactggagatcgatcaagacgacgacgagtgatcatcctcatcatccatggcgagcagtaggctgttcctcgccgccgccctcctgtgcctcgcctcctccgcccaagcattcaagaaggcaagcacaaaaccacacagaattcattcatctactctataatttctgatgaatttcttgtgtcatttcgattcagtgaaacaaactgggtgtgatcctttctgatgcttttttttcttttttttttctttttttttgttgttgttgttgttgttgttgttattatggccacaatgtttgggcgcagccctacatcgtgtatctgggatcacacccgtacggcccagatgcgtcggcggaggagcacgcccgtgcgacgcagtctcaccacgaccttctaggatcagttcttggcaggtaataaactcactcacctagattggtgataatcgctattacagactgtgtttctatgattcttctttctgttcttgattgatggaaacaaaaataaaatgttggactaatgcacggacgcacgcagtaagcaaaaataaaatgttggactaatgcacggacgcacgcagtaagcaattggccaaggacgcgatactctactcctacaccaagaacatcaacggcttcgcggcgcatctggaggaggaggtagcaacccagatcgcgagtaagaagagaacatctaaattgatcaagaaccgatgagtagaatacataggacaaattcgatggcacatcaacgaaaatgtttggagttgcagggcaccctgacgtggtgacggtgatggcgagcacgatgctgaagctgcacacgacgaggtcatgggacttcatggacatggagagggacggccagatcctcccggactccatctggaagcacggcaggttcggccaggacgtcatcatcgccaacctcgacagcggtacgcatcgctatctttatttatttatttattttttaaataatagaataaaactttcgacctttgcttcaaataaactacagtcacctattacaaaattctctcaaagagagcaaatacacaggcttattgccatcttaattttgatgcgtttttgggttcctcgagctcccatggttgattactaattaatctctgccgttaatggtgatcgaatcaaggtgtgtggccggagtccaacagcttcaccgacgaggaagtggtcggcgaggtgcccaagcgctggaagggctcctgctctgacaccgccaagtacggtgtctcctgcaacaagtgagtggctccatttctcggccgtctttgaattgcagaatttttttttctttacccacctcattaatagttcatcatatacaataaagacagatttggagtttcaaatcttacagaattttcaaccaataaatacaacctgtttaaaatgaaaataaaaaagagagagagaggaagaagcatgtcaaaatatcttaaatctaggggaaaaacagttgtaaaatctttttcttttgcattgtaaccgagtattattgttctataatcaagtgtaggtgctctataactgagtgtaactacaagtttagtctacaggaacccgaatcttgatcaaagattctatggatgaaaaatcgagctaaaaaatgtatcgtaagtgaaatattaaaacccgatagattatattaaagagagcatttttgactataagcagttagtcataccgatcaggggatagtgtttttacaataaacacttgtcgaatttaaatttatcatgacactataaaattcctgcatccgccggtggattcgttcatgtgagattttgcaggaagctgatcggcgccaggtacttcaacaaggacatgctgttgagcaacccgggcgcggtggacggcaactggtcgcgcgacacggaggggcacggcacgcacacgctgtccaccgccggcggccgcttcgtgcccagggccagcctcttcggctacgccaacggcacggccaagggcggcgcgccgcgggcgcgcgtcgcggcctacaaggtgtgctggtccggcgagtgcgccgccgccgacgtgctggcggggttcgaggccgccatccacgacggcgccgacgtcatctccgtctccttcggccaggacgcgccggtcgccaccgtcgcctccttcctccaggagcccgtcacgctcggctccctccacgccgccatgaatggcgtctccgtcgtctgctccgccggcaactccgggcccctcgaggacaccgtcgtcaacgccgcgccgtgggtcaccaccgtcgccgccagcaccgtcgaccgggacttccccaacgtcgtcacgctcggcaacaacgcgcacatgacggtaatgatcacctcgtcccacgccattgttaactatagctatatccatggacgaacacttgggacgacatggctcacggtgcaagcttgtctctcccaatgctgcgtgcgtcgcaggggatgagcttggagacgacgaccttgcactctacccagctctactcgatgatcaaagccagcgacgccgcgctcgcgagctctgaccccgccgtcgcgtacgtaccatcctttgaacacgtgaaattttctttctaatttgtgtgagatgatatgagatcgaattgaactgattcgtgtcaaaatcatggcaaaaaaatctgtatggtttttcaggtcgacttgcccaccaggcacgcttgacccggagaaggtgaagaacaagatcgtggtgtgcgtgcgtggcggcgacatcccaagggtgacgaagggcatgaccgtcctcaacgccggcggcaccgggatgatcctcgcgaacggcgagatggacggcgacgacatcgtcgccgacccgcacgtgctcccagccaccatgatcacctacagcgaggccatgtcgctgtacaagtacatggactcctccaagaaccccgtggcgaacatctcgccgtccaagacggaggtcggcgtgaagaactcgccgtcggtggcggccttctcgtcgcgggggccaagcgggacgctgccgtgcgtgctgaagccggacatcgcggcgccgggcgtggacatcctggcggcgttcaccgagtacgtcagcccgacggaggtccccaacgacgagcggcggtcggagtacgccatcctgtccggcacgtccatggcgtgcccgcacatctccggcgtgatcgggctcctcaaggcggcgcgcccggagtggagccccgccgcgatgcgctccgcgatcatgaccacggcgcgcacccaggacaacaccggcgcgccgatgcgcgaccacgacgggagggaggcgacggcgttcgcgttcggcgccggcaacatccacccgaaccgcgccgtcgacccgggcctcgtctacgacctctccaaggaggactacttcgtcttcctctgctccatggggttcaactccagcgacctcgccaagctgagtgccggcaacttcacctgcccggagaaggtcccgccgatggaggacctcaactacccgtccatcgtggtgccggcgctgcggcacacgtcgacggtggcgcggcggctcaagtgcgtcggccggccggcgacgtaccgcgcgacgtggcgcgccccgtacggggtcaacatgacggtggagccggcggcgctggagttcggcaaggacggcgaggtgaaggagttcaaggtgacgttcaagtcggagaaggacaagctcggcaagggctacgtcttcgggaggctcgtctggtcggatgggacccaccatgtcaggagccccgtcgtggtcaacgccttggactgaggcgccgagattcgtgcgcgcgctatcgatccaagacgggcgcagatcagggtttaggtgttcttttattatttattttttgattgagagggataatattatagtccattatagagtgagaggctagatctcttggttgttaataaggttggatattttttcggaattgctgtaaagttgtcgacggttttttctccaaaagattttcactttgtggacctttagattattgttgagatttgtgatacttggcgttcaatatatagttatgtgataaatctttatctttactacttaaaaattctgtagtggtggtggtgactccaaccctgacagacacgcgaaacatgagctgtcagatcgccaaatccaactgctaagatcgatccccagtcccataccacgatcgcgcttctccccctcgatccgcctgtgaccccacccacaaacagcgcatcgcactccccactattcgtgcacctacctccgtcgcccgctcttccgctccccccactgccttcgtccaaccgccgctgccgcacagaggagtcctcggtgagaccaagtgctgccagcgcccgtcgcacctgccgccaggtaatcgtcgtgtcattgccgcataccgcccctccggcgacatcgcatcccccttcaatttgctgtcgccgtcaccatcgattcctccagatcgggcgtcgtccatcttgcctcccgttgcccttgcccgttaccgctgcggtcccctcgctctcggcgccgcatcgctcccctccgctgtcatcgcggtccgtgcctcgtcgctgcgccccttgaatcgttgttgctgtccatcgttcctccctgtgcccacgccaacggccgcccccgacgacatcctcgcagccccctctgcccaccccaatcgcccccaatgccgccgacgcatcacgcccgcccccgatgttgccaacgcatcgcgccgccgtccttctaccccaacccccaactgcaatctcctcagccttgccacgattgcgattccttgcctctcccattctgctaccgccaccgacgcggcccttctgcctcgccaaatcctcacctgaatttgacgcgcccttctgatcatgtgcctatcagtccaccggccacgggagtcatcttatcctaatgccatcagcctacccacatcatcaacgccatatatatccatctcgccgcgtacctcgccatcgtcgcaagcctattcgcccacgggggccttggatcctgccgcgtgcggaactctgtcgatgaagccaagcgcaagcgggctctcccttccacaatatgcactcgcaggtggagcttgattcggagtgcaccgcagccagaggtttgaccggtcattagcgtcgggcatcccaattcaccgatggcctaggtcatccgctagacaatggagctcaaggatctatctgatagatccattagagcaggtacaatagcgggctattagccagctatacacgtattttaatgaaataaaagatgagagagaagagcagcgggctacagatttgtagccagctgcagcacggactccaagacgcgatgtgtgtattacatgtgagaccatatattaatagtatagtaagcaactattatatgaattggctattagattagctataggtaaattagagccaacagtgggctatactattgaacttatagccatcgtgctgctgctgaggcgtgtgataacaggagaggagtcccgagattctcagtagctggcgacggcatgcagtggcgcctgtgcatgctagaaggaggattctttgtacaggtgagagcaatattaagggcccaatatgtgttcaaaatagattgagatagaaaatttgctctgcaaaatatatgaatttgtgtaccatactaccatctgcagtgtagatggaagttctaaaaaaaaaaatcagttgcaggggatgtcaaatttgcactttgtaccgtttgcaggggaccttcacccttctacttatactaaggtaaaccttccgagcatggtttttcagttttgtccgccagaaagatttctttgctaacgctgatctgatccgtccagccaagacagatgcacatgctgcgctgggtggttgtaggcaccatccgttgctggattttctaaggtattgtttagtagtactgccttcagcattgcgtcctaatctgttaggattcaatgttcgctcttttctgctattgttgggttttggtcttgtaatattgtttgtgatcttttctgctgtttacttgtgaatccggagattgcttagtgcataaaccgagatcatacatcatggaatttctgttcttccatacatcacgaaattttcatttactatgattcctcaactattaattattcttttgcaccctatgtttgcccttattgtctcaaaatttggacagtggttagtgtttagtgaacaacatgtaatttgatgattctatgtactccttctgtttcaggttataagatgttttgactttggtcaaagtcaaactgcttcaagtttaaccaagtttatagaaaaaaataataatattttcaacccaagataaatttattataaaaatatatttaattattaatttaataaaactaatttgataatgtaaatattactatatttgtctataaacttagttaaatttgaagcagttggactttaaccaaagtcaaaacatcttataaccctgaaatggagggaatactaaggtgttgtcatgacattatatgtcatctattgctcagtatagcagaattccttacttagattccactgttgcttttgtttagatttgcaatagctgaatcatgcatttgttgtgccttttgcttttctgttgtgcaaaaatgtaaaccttttattctggcaagctaaggtcaggaaaaagctggaaaataccatatgcaactagctgatttgtgtcttgtggggcgagttgcagtacggttggttgtgtcagaagattcacagggccagactcaacaacgatcgtcgagaaataggattgttatgttactttagagaagtcttgttagtggtactttagatataagtcttgttaaatcaggttaagttcagatatatattgagttaaatcaagattaagttaacttgagtttgttaaggggtcaagtctatataggagatgtaatcgtactgttatggcaactaataaactaatcaatctccaagctcatataattatcgttccccttttctcttcttcctcctacgttccctcttccctatgcatattctttctttcttgtatacagagccatcaccaccgttgtatatttctttacttggtctcagaatgcactgaacgtttctactttttatgtttactaaaatagaaagcacaaattgtttatttgacaatggtattagttgtatggagtattgtgtttttaaatttgaagaaatgaggaggttaacggtttaagatgctttgcatgaacattactttgacatttagaccttgagctcaaagttgtcttattgtccagggactcaacttttgggatgtgtttattggcatggagaaaaaaaatacaaatatatgaagcctctgacttattaagtcgttgtatgtgttagttgatggcaatgcagagctggcactataaggaaatgagggtgttgaagcaagtgtagagcaccaaacttcttctgcaacaaccctatcttccatgggaaccattgtgttatttgttttgctatagaatgagaaccattgtgtagaatttcgcaaagaactttaaccattgtgtagaattttgtaaaggattatgtttcatttgatgcattaggaatgagaagcagatgaaactatagacaatctttccaaagtattgcgtgaaaatatgaagtgtatcaatatgtaggttcttaatgttccgttccattaatcaattttgttatatggggtactaaaatgtgaatactataaacatgtgaaaattataaatatgtgacataattattattagttctatattaaatattttgttacagttgatttacactcattgattatttaccatcatttcactcagtgtgatttttccccgttgcaacgcacgggcacgctgctagtttatggttaaatttgtaggtttaattgactgttttttctactccctccatttaaaaacaaattctgattacgaatatagaaataatattgaaactgagaaattgtttatatttttatggaaggtgtaggtcggaaagtttagggttaaatattgtctagtttcaaagtttatcatcgttttatagttttgcaaatattttggtatgtaaaatgatttttttaaaaaaatactcctccgtttcttaatagatgacgccgttgactttttctcacatatttgaccattcgttttattcaaaaattttatgcaaatgtataagatataaatcacacttaaaatactataagtgataaaacaactcataacaaaataaattataattacgtaaattttttgaataagacgaatggtcaaacatgtgagaaaaagtcaacagcgtcatatattaaaaaacggaggtagtaacaattatatcgtttaacatcataatttgtaggttttgttgataacaacaaaaaattagacacaacaataaatcaagtgctgttttattacgtttaggaaaatgtttcgttactagctcagaaatgtttcaaacatgtatgcaataccgtctaaccctagccaaaacattttctctatcgcgtgtgaaatatcgaaatacattagacggagacattgaaaaatcacaaaatgtacatcattaccagtaacacgattagccccgagtgccaaaatttttctgacgtgtatctattagcttgtcaagagcaaacaaatttttctgaagtgtgtgtaaaactgtcagaaaaaaattattttcctaacgtgcttttaacaccgtcacgatatcacaaatttctctgaagatgagaatgtgtatttagtatatgaattttgtacgtaccagaaaaattggtggcctagtgggtatcatttattgagtggcaactcaaattttaacactaacgatataaatagtgaaatatagtttaatttttatgacgtgactttattgttagtgagattctaatgaacctaacggcgttgacaacgtcggaaaaattcattgtgacgatcaaacctgtgaggattaatattcgtcctcatggagactagtcatgcaaactaaaattttcctgacaagcaagttgtaacgaaattttccagatggtttctggctgtcagggctagttgagtttgtggtagtgcatgtttagatcttgcttctttcttctctcccgtcgttggatctccagcctcttcttcatgggcaaccatccgatgaagacagcgaactagtcggcctcctccctcctccgccgaagcatagtggcacgctggtgcaggagctccagcgaggagggctcctcccgacgcacgcgtataccgtcgatggatatgtctcgctgtgctcgtgttgttcgcacaatgccagcattcaggcacccttcaccataaaccaaaattcctcgaaaattaaacctttttgtcacaaaagaaatagccgataatgataattagtgcctatattagttataggctatagttgttaagaaagatgaaagatacgccaatgggaggtgcactagatctaacgtaatcagctactagaagttagtaaaattcttaaccttagtttttttttttttggttgttgtttgtcatggcgagggtcttaaaaattgctagaggtttaaaatttacccattcgacatatatccaagattgaacataagctgtcgaaagggcaaatttcaaaccaagattgaacataagctgtcgaaagggcaaatttcaaaccttgagtaatttttaagacaccacggtattatcatgtatcatttaatttttgctgttaattctttcattatttagaatatatacgtacaatcatgtacaccactatgcatatgcacactcatataacagtgagagctagtgcaccctctttttttaacacacgataaagaggccgattccaataacaaatccataaatatagctaaactctcattaaaaagagcatccatgtgtatagttgtgaacatcatttattgtatctccaggtgttatactaaagtaatactgggcctgttcggctgcactacagggggctacgatgctgcagcctcgcacagtattttatgtagcgcacactactagaaaaatagtttttagaggcagtcaaaaacagttatcgcaggcgggggagacaaccgccgctatccaattgcctgtgaaaataggtgatttttgcaggcgggtccgcgacccacctgcgaaaataattttagggaacaaaaaaaaaatccggcgctacccgcaggtgacgccgccggcgccagcatccccctctgaccgacggctctccacctctgtccggcgccgctgcccgagggcgaggggagcgccgcctttgccgccactgccggctggctcccttctcagatctgggaggggagcggctggtgctgtctgtgcccccgcggccgtcggctcctcttccgccgccggcgtctagggggaacgaaaggagaggattagtgcccagagccgccgcctcctcctccttgcgtgcgccgagacgccgacggctgccggttgctcctctccttgcgcgcgccgaccaggccatcggttcctcctcctttgacgtcgccgcggtgtcacgccctgaagttccacctcccttgctttaaattcataaaataaatcgcctaaagaagttgcttcaaattaacctagagttgaatccttaattaataaatacatttaataatcgaattcggcgtggtggaattttttttgagttccccatgctcaaatatattaacagaatttttagtggaatttttaaagccttggaaataattttaaccaattaaaaatgagcatgtgcaatatttaatcctaggaaatccgttttctttttctctttttcttttcctcctttttccctcttcttgggctgtcggcccatcctttctcccgcacctctccctccttgctgggccggcccaactcccctcccctttctctagggtgccgacaggtggggcccacctgtcggtcatcccctacctccagccgcccgcgcccaagctggcaaccgccgcccacaccgccgctttccccgcttcccgtgccccactccgcccatgctccgcgcccacgtcgccacccaccttccccacgccttaccgcctccgcgcgcgcgcccgagagggcgggattcgattttgaatccgcccctctctctctctctccaccccacgtcgccggcgccactcctccaaatccggccacctcccggcctcgcccgcttctcactcggctataaaacgccttccccgagctccctctctcgtttcccctactcgccgccttctcccgtgctctccaccgcgcccgcgccgctcgccccttgcgccgccgcctgccactgcactccggccgcgcgccgtcgccacgccacctgccgccgcctctagctccgccgacacaagggctacctcggccgccactcagttgccgcctactgccgcctccaaccgccactagccgtcgatagtgccattgccgcgccgctttgttgccgccgttggcctcgtgggtccgagggccgcctcgtccatcccgcgcaccccgccgtccgccgcttgccgccggtgttcgccgtcgtctttccccactccggccaactcacggtgaggcgctccctcctgctcgtttctcctccctctcccccctagcgccgggccgcgccgctgcttcgcccgtgcgccgtcgccttcggccgacgccgctgccacccgcgccgccggttgccatcgccggcgaccgctcgccgccgccgccctcgccataaccggccagtcggccttgaggccgagccgagcccggccggcacctccctcccctcccctttgagccaccgcctggtgggacccacccgccaggcgcctcctcccctcttttggagccgctgccagtgggacccaccagccaccccccccccgctgacgtcagccctaggcaatattgcacaataaataattaatgacttttttcttttatagtaaaaacacaaataatcttcttaaattcataactaactagccacatggttgcgctttgcgcaactctaaatacatgtttaagaacctgtgtcaatggcatccacccatacacaaacacaatcatctacgtggccaagacccctgagtaacaacttgatcctaagcatttatattgtgatgcgtagtagtacattataatgtacatgcccacaaaaaatttgatcccaaatctaataaaataacaaaaacaaatgtagtagctttgtgttcttccaccaaatgcatggtggtaccgtggtattcacctggaaacataaaaaatataatctttttaagagcaaatcatagattagcaggaccagttgatttatgttcttccaccaaatgcacgttggtattcacccacaaaaacaaaaagtatgaaattcttatgagctaatctcatatgagaaggaccagtaaggacatagtctcatgtaaaaatgatagaaagatatgctcctcaatttgtacaatgattaatgagtatggagtactacagtattacagatatagataggtgtcatatgataatccaatatctaaagctctgccaaatattccaatagcagtatgcatggtattgcctttggattgataagaaatgcacctaggcctattaggacagtaaagaatctacgggttcgtggaaattaccataataccgttaattaaacttctaagcaagatttatgggtggtgcataatcacaaagctagcaattaacgtattataattctttcttgtaaatatgccttgtttaattttaaacgagaacccattcttcctgtcgacacatcattcacacttctacacacacacaaaatatcattgaaactcattgctcttatagctcaattctatgcttgatcaagtagtctaagacattttactggcacttggaaaaataaggataggtgtaaatattacttaccgatggtctgtacagataatttatttctccctcctccgctgcgtacccaagcataaggccccaccactgatgtcgatgatttaattacaacgctgcagccgtgcagtgcctgctgatgcaaaataaaataggatcagaatgaagcatcctaatacgggccgatgttggccaaaactacatcttgtgtgagttaaccttttttgtttaaacagttagggttatccctaaatcaacatgtgctactgaactttctactgttgcaggcgcagggaaaaataatttcagtcgagatgtcttcagtagcagcgatataaataacttctagaaaaaaattaaataataggaatcaggaaggctataccaactaaagctggtacccgaataattatcctttttaatagtagtgcacacaatttagcaagatagaagtgtatacattattgcagcccttatgtaaactgctgaaatcctttccatgagcaaatatttttctaagtcagtcataaatgaagatagtaatccactctccatgaatagattattagtgtaattaagcattggtgacttgagctgtacagtatatgcatctgtaaattaatactaactataatcgatttacatgagtctctaatttgtctggtccctctgaagctaaagctgggatttttcttttggtgtatttgtttgtgattcatgaaacatttagatacacttcatcatctgttgtgcgataccttagagaatcatttactttgagtataggtaaacagatctacattctacaaaatatttttatttgctgatacttgcagttctactcagttgtcccaaacttgattttctcaattgtaattatagccaatcatggagcctaaattgatacgatttttgggcttatgaaataaagcctaataaagataattaatattggaattcataaggtgcatacatataatacaaatcaatatagtagtatttgaaaggctaacatccaatcaacagtcaagaaaggaagatagagaaggaaacagagaatgaggaatagagaagagagtgaccttggttgttctgccctggataccgatttggtgaataggtgtggacgcagctcctgcggataccctcctcctcgccatcgctattcatctgtcaaccctttccccccttcttcagggtagcgggagattagaggtggatgtgatgcgccggtgccggtggggtatacggcggcggcaggggtgggatggagccgcggtgatgaggggatgagtaacgccggcaatggagacagagaggactagagggggaggtagcggcggcttgggagaagaggcggcgcgcggcggctgggcctcaggagcggaggcggcgtgaagacgagaagagtcgcgttctttcttcttctttttttaccgcagggacgtggaaggacctcgttgtgaaagaaatttctagaaggaataagaagatatttcgccgatctaggatctaacggcctgaaactttctgaataggaatcggacggtccatattttgttgatgacgtggctcaatgttgttttgagaaactttaataatttcactacttttgattcatccgagctccgtttaagtccattcaagtctcagtaaattcataaaaaatgcatagaatccattaaaaatggtgttgtttcctgtttcagtagtcttatagcatgttttgcttgtgtgctttggttgtcgcgtagatttcggttgttttgtcgatccgcggtttctcgaagacgttgctgagacctcatcagtgcaagagcaaggtaaatcatgcattacaattgatcatattgtacccaccttacaaatgtcccgcatttctattaaatgttgcattgttttacaatatcatatgggatgggtcctactactcagccatatattgtttacctgatgccattgataacttgggtattaaaatgattagatgttggtttagggaatgcttagccatgcttagttcaactagtacacaaagggggaatcacattaatgcatagactttgattattggtatagctttggaatagtaccaccgcaatggtgttagctaattaaaatacactacatggtgggctgtgggtgcatggttttgctaatcgtgcccatgacgattaaggaccggttcgcgagatgccctggaagaacttatcgtacttaccataagccagcgtgggcaacggctgggcttgtagtgtagctttcctctagccgacatacccaggttagggtgggtatgatggagttgggtcggccggggtgttcggttgatcggcttccggattcactgtggcacgagaggggggctgcccgttgcctgctggggacgggggcgaaccttgaggtgtggtgcgatcggttagagggggttatgcgaagggtcctatcacgacctctttccggtatgtcgtggtggcatgtcggcgcacagatacatgtcgtggggctgtgtcttgtgggtacagttgtatacctctgattagagtaaaactgttcgaatagatgtgcccgcggttataggcggtcgaccagattcaccgttgacggagctcgtggcccctcaccgggagaccgcgcaggcccccctttgccagttcggccgggggcttagggtgagatctcaagctctctctctctctctgtatgtggaaagatcacccccccgcaagacacacgagacacggcgatgtatacaggttcgggccgctgccaagcgtaataccctactcctgtgtttttgtggatttgtgtatggacaagttacaaaggattcacttcctttcccctccgccttccaaaagggaaaaaagtcccctctctaaatgggcaaggtcctccttttatatctcaaggggataccacatgcccctttctctttccaaactggactgttctttttctctttaatgggcggagatcggtacggtttccatccgggagcccttctgatgggacatcccacacctacccccacctcccccgaagacagagatgacgcgggaccgtagctgtctgtcgatgacgcgaccagtgccagaccggtcattcttgtccaccacgcgtcagcttaacaacgtgcatgtttgcccttcttcgtgtaacaccttgcctgtaatggttaggatgaagcctggtataaatctgaccagggctaacgtgccatctctaagagataacacgctagctccggcttgagacgagtgcctagaggctttcgtcttgacgggatggggcaaggcgtgcgtcagaccgccagccgccacctaacccgtgatctgaccggtctgtgactggtcacagaccggataaaggaacgcgctgtactgcgttgcatgcagcgtgacacgcttgaccagactgcaataaatgctgttaggtgagcacagctgtgctcacttatcccatatatgtggcgcaaacttccttaaggggtcggggtgcctcggccctcggggccggggcaagcgcaacctcgggggaaatcaggaggagggcggacacctcaccctcgggcccgacgttcccgaaggtgccaggccacgtgggcgattgcgtctgcctcaagcctctggtcatgatactcccggtcccatatcaccgacagtagcccccggcgttatgccagagcaatttcccttctcaagggaagcggtcaggtgtgacgccacccctaaagcctggtgacaggtgggaccggtctccgtagttgggcacaatacccaacggtctcaatccatgcacattggtattggtaactttggttgtccataatgggcggtctattcaagactgccacaccacttgagcagcgcgcgaatctgggtgagcagattggtctcgcccggagatacggtaacgccgcttcggtcggcgagcgtaattaacgcgcgcacgatacaatccatttcgattgccacaaacgcatatccacttcatgcgccgtaagcgggcgaatgggattagtggaagcgtgggcacgggaaacgagggagcgagatagcgagatacgagggagcgaggtagtgggcgcgagaaacgaggagccaggcccagcgatggcaagggtataaaagcatcgagaaaaggatttgcttccttcctttcgccgttgttcctcttgccttcgccgcctgagctctaactctttctctgctacgccctactttcgccacacgcgctcgttctcaatcatctcttcctccaccgccatggcacggggctctgctctgctcgacggcagtgtactaccgccttcccgcatcgtgagcgagaggcacgccggactgccgcgccgcttcatgccggagtccgccaccggtcgggagatagtgatgctgggcgaggggcgcccggcaccagactacccggggcggtccatcttcttcctccccttcgcaatggctgggctggtcccaccattttcttctttcttcatggatgtcctggagttctacgatctccagatggcgcacctcacccccaatgcggtgatgacattggccatcttcgcgcacctgtgcgagatgttcattggggtgcgcccttctcttcagctgttccggtggttcttcaccgtgcagtcggtgtcaccgccgtcggtggttggcggctgctacttccagccgcgggggccggtgttgaaccgctacatcccttgcgtcctccgcaagaagtgggacgactggaagagcgactggttctacacccccctcgccaacgaagcgcgcctccgacttccaagccaggccccggcgcaggtctccagctggcgggcgccggtagatctgggggaggactacgacgccgtcctcgaccgcctggcgggcctgcgatcccaggggctcaccggggccatggtgtacggcgattacctccgtcgccggattgcgccgctccaacggcgcgcccggagcgcctgggagtacactgggcctgaagactacatgcggacccaccagggagccagatgggattgggctcccgaggacttcaagatcgtggtccaaagggtgctgaatcttagctccgtggaggcgtctcgcattcctcaggagatcctccccctctgcagcgatcccgaccgcgcctccattctaaccattatgatgggggtcggggcctcagaggagagagcccctaagggccacgacggcgcgggcgagcgccgccggggggaacaatctgccccaggagggggtcgtgcttctgggccctgcgtcgggggctcggggagcagccgccctgccgacgcccaggggaagaggaagctgggaggaacacctcccccatctcctccccgagggggcggggcggcgcgtgccagcagtcggcgcccggagggggccgcgccgacgtcgcagcccgagggggagcgcaagaagaaacggctccgcaagacgggggagacggaaccatgccggggaaacctgatttcccctccaaggtggtcattcaaccgaccccttcgcaggttcgtctcactctcattgcaaccatctttctcccaaaaggaagttttttcttactcattttgttcgttttctggttttttcttctgcttcagcgatgtcccgtcgcattcctcccgccaccccaagtccggccagtccgaggccgaagatcctgcggccgcagaggagcggaggcgagaatctgaccggcgtgaagccgcagaccgccttcgggaagctgaagaggccgcccgggaggccgcccggattcgccaagcggaggaagctgctcgggaggaggccgcccgggctgaggaagccgctaaggaggaggccgcccgggctcgccaggctgaggcaacagctgctgctggcgcgtcaactgggcccactccttcgggcaaccctcaggcgacagcctccggggaggctcgcgacgaggccgcgggcacatcgcctgggcccacctccccgggcgacgcccaggatcaaacgggttcgggggacatccccgagcccagcacgtcctccggggggccgagccgcatcgccttctctccaaggcggctcttctcctcatcttccgtcgccccgctgagcgccgagcccattctgcaggccttggccgccgcaaacaccgcggtgctagatgggttcagcgcccaagtggaggccctgcgcgcggaacgagcggagctcgaggccgcatgggcacgcgttgaggaggggcggcgctcggtggacgccatggtggaggtgggccgtaaagctcaccgccgtcacgtctcggagcttgaagcccggaaggcggcgctgacggagatcgctcgtgaggtggaggaggagcgagcggccgccctcatcgctaccaccacgatgattgaggcgcaagacgccctccgccttcaaaacgccagccgggaggcggagctgaaagaaaagctcgacgccgcccagggagtccttgactccgccgctgcccgagagcggcgggtaacagaggctgaggcggcgtcccggcggcgcgaggagtcccttgaggcccgtgctatggcgctggaagaacacgccggcgccgtggagaaaggcttgacggaccgcgaggccgccgctgctctccgggaggcgacgctggcggcgcacgaggccgcctacgccgaggaggagtgcgcgctccgtctccgcgaggacgcactcgctgagcgggagcgagctctcgaggaggctgaggccacgaccaaacggctggcggacagcctgtcccttcgcgaggcggcgcaggaggagcaggcgcgccgcaatcttgaatgcgtccgcgccgagagagccgcactggagcagcgggctgctgacctcgaggagcgggaaaaggagctggacgcgagggcgcatatcggtggggcggccgcgggcgaaagcgacttagccgcccgcctcgcagctgccgaacacaccgtcgccgatatgcagcgagcgctggactcctccaccggggaggccgaggcccttcgcttggcgggcgagattgggcccggcatgctttgggatgcggtctcccgcctgaagcgcgccggtcggcaagcgggcctctggaaaggccagacgacggtgccccccaccaatctggaaggcctcgctccgcacctcaacaggatggcctgggttctcgaacaactccccgaggagcttgagaagaccatcaagtcatcctcgagggacctcgcgcggggagcggtcgaactcgtgctggcgagttaccaggcccgggaccccaacttctctccatggatggcgctggaggagttccctcccgggaccgaggacgacgcgcgcgcgcgggtcggggatgctgccgaccacatcgtcaacggcttcgagggctcggcccctcggctcgcgttcgcccccgactccgacgaggaggggaacgccagcagtggaagcgacggtggcaacgaggccggcgacctgggcgcgtcagaatgagcccccaggcccccgccaatctccaattttttctttttgtatagatcaacttaatctgcaatcaaaaatgatgaaaaatttctatgttaactttattttgctatacatatgagttgaggatgatttgtgccgtggttcttttgcattttagcttgatttaagggctcgtgctcaagtccgatcctcaaatggctcgggtcggggctagtgcctggggagatccacatgtcgagactggccaggccgggaacatggtgaccgagggttatgggtgacccgattgtgggtttttgccgattcccccccggagttcaccacgccccggggcacggctcggttctgggccccgcttggcgattttagctgaccgaaccgagcccccgagggcaaggttgagcacgagtgaccttatttcaagttaagattcttcagaaggaaaaacggcacagacacaacctttaggaaattgaaaccgcttttattgaaatgctgaaataagaaaagtaagactgtgcatgtgtggtagcccccggctaaccctgcacacccgaggggggtgcggggttagcccgagcccgaaacctgacacccgacccccccttcccctcaggggtagaagcgacgaaggtgctcgatgttccacgggttcggcagttcagtgccgtcgcccgtggccagccgtacggagcccggccgggggacgccgatcactcgatacgggccctcccacattggtgagagcttgctcagtccagcacgcgtttggacgcggcgtaggacgaggtcgtcaacgcagagtgatcgggcccggacgtggcgctgatggtagcgccgcaggctctgctggtagcgcgcagctcggagggccgcgcgccgccttcgctcttccaagtagtcgaggtcatctctacgaagctgatcttgatcagcctcgcagtacatggtggcccgaggagacctcagggtgagctcagatgggagaaccgcttctgcgccgtagacgaggaagaaaggcgtttccccggtcgctcggcttggtgtggttcggttcgcccagagcaccgctggcaactcctcgatccatgaatcgccgtgcttcttgagaatgttgaaggtcttggttttgaggcctttaaggatttctgcattggcgcgctccacttggccattgcttctggggtgggcaggtgaggcgaagcagagcttgatgcccatgtcttcgcagtagtcgccgaagagttcactagtgaattgggtgccattatccgtaataatacggttaggcactccaaagcgggccgtgatgcccttaatgaatttaagagcagagtgtttatcgatcttgacgaccggataagcctcgggccacttagtgaacttgtcgatcgcgacatacagatactcaaacccgcccggggcccgcttaaacggtcccaggatatcgagcccccagacagcaaatggccacgaaagtggaatgatctgcagggcctgggccggctggtggatttgcttggcgtggaactgacacgctctgcatcgccggaccatgtcgactgcatcattgagagctgttggccaatagaacccttgacgaaaggccttgccaaccaaggtgcgcgaggcggaatgggctccgcattcgccttcatggatatcggcaagaagctcaacgcctcgttcctgaggaatgcatttcaggaggattccgttagccgcacgccgatagagggtcccttctatcagcacatagcgtttggaaatgcgttggacgcgttcactcccttcgcggtcctcaggtagagtcttatctgtgaggtatgcttggatctcagagatccaagcaatcaatctaagggagcttggagcgctcccttcgggtcccgagacctggactccgacgggcctcgggggccggtcaggcgcatccgtctcccctaaggggtcgggtcgcgccgacggctgggtaagcctttcttcaaaggcgcccggtggggtctgggctcgcgaggacgcgagccgtgagagttcatcggcaatcatattatcccgtctgggcacatgccgaagctctatcccgtcaaaatggcgctccatacgccgtacttggcgcacgtaggcgtccatctgcgggtcagagcaccggtactccttacagacttggttaacaaccagctgagagtcgcctaacaccaggaggcggcggatccccagtccggccgccactctgagtccggcaaggagtccctcatactctgccatattgttagtcgctcgaaagtcgagacggaccaagtatctgaggacgtctccgttcggagaggtcaacgtgacccctgcaccggcgccctggagagacagagaaccgtcgaactgcatcacccagtgggcggtgtgaggcagctgagaggggtccgtgctggcctcgggtattgagacggtctctggagccggggtccactctgccacaaaatcggcgagggcctggctcttgatagcgtggcgtggttcaaagtgcagatcgaactcagaaagctcgattgcccattttaccactcgtcctgtaccctctcgattatgcaagatttgcccgagggggtaagacgtaaccacagtgacccgatgcgcctggaaataatggcgcagtttcctcgaggccatcagaatagcgtaaagcatcttctgggcctgagggtatcgggtcttggcgtcccggagggcctcactaacaaagtagacaggccgctgcacctttcggcggggccgaccctctttgctaggggccgcatccccggggcgttcttcgtccaagtggcctctcggggcgcactcgtcttctgtgccgatgtcctcggggtcggaggatgacaggagcggtcttcccacagtggcctcggggccgtcctgggggtcgggggctcctggcgtcgtcggacaagcgggcaaagggcctactccggtcgtcaggggcctcaggcctccgttcggctcgggggcctcttctccctgctttctcccgggtcgagtcagcacagggttagcctcggggccaaagggcgataggtgcggccttcccgcagtggcctcggggccttcctgagggtcgggggcgcccagcaccgtctgacaagcgggcagagggccgactccggtcgtcaggggccttaggccaccgttcgactcgggggcttctcctccctgctcgctcccgggccaagtcagcacagggcgggggtgcgcgaaatgaggattgtcttcatcgcgctccacaaccaacgctgcactaactacttggggggtcgccgctaagtaaagtagcaggggctcatttggctccggggcgactagaaccgggggagagctgagatatgcctttaactgagtaagggcatgctcagcttcctccgtccaagtaaacggccccgagcgcttgaggagcttaaacaagggtagcgccttctctcccagccttgatatgaaacgacttagggcggccatgcaaccggtgacgcattgcacatccctaagtttgctgggggggcgcatccgctcgatagctcgaatcttctcggggttggcctcaatgcctcgggcagagaccaagaacccgagaagcttgcccgcaggtacaccaaacgcacacttatcggggttcagctttatgcgggcggagcggaggttctcaaaagtttccgctagatctgaaagtaaagtttcttggttgcgcgtttttacaaccaaatcatcaacataagcctcaacattacgtcctatttggctacccaaagaaattcgagtagtacgttgaaaagtaggacctgcattctttaacccgaagggcattgatgtataacaataggttcctacgggggtaatgaacgcagttttttcctcatcctccctagccatgcgaatctgatggtaaccagagtatgcgtctagaaaacacaaaaggtcgcaccccgcagtggagtcgacggtctgatctatgcgaggcagggggtaaggatccttaggacatgccttgttaaggtcggtgtagtcgatgcacatccgaagcttgccgttcgccttgggaacgaccaccgggttcgccagccactccggatggatgacttcacggatgaatccggcctccagaagtctcgccacctcctcgcggatgaaggcttgacgttccggggcctgccgccgcactttctgccggaccggccttgcgcccggccgcacggcgagacggtgctcaatcacctccctggggaccccgggcatgtccgctggtctccatgcgaagacgtcagcgtttgcccgcaggaaggagacgagcgcgtcttcctatttgccatccagaagaccaccgatccgtgtggtcttggatgggccgtcgcccaaggcaacctccttgaccgggacctcgtcgcatgtggcaatccgctgcctcggggcggtgggggcggaggtgccaagcctctcgtcaccaccctcgggcttggtcgcagcagcgaggtggtccgcgcgctgctccatgcaagcgagcgtgactttaaggtcgccacggacagagatggggccaccagggcccggcatcttcatctggaggtaggcgtagtggaccgccgccataaacttcaccaacgcgggcctccccaggaccgcgttgtagggcagactgaggtccaccacatcgaagttcacccgctccgtgcggaagttggcgggtccaccgaaggtgaccggtaggtcgatgtgacctaatggccacgtgtgccccggcgtcacaccgataatcggctgggacggtcggagcaccatccccggggccttgatggcatcaaaagccgcgggggaaaggatgttgagggccgctcctccatctatgaggacacgtcccaacttcacgttgcagatggtgggggaaaccaccatcgcaacctgccctccccgggcaatgcacggtgggtggtcggtctggtcgaaagtgagagcaacctccgaccaccgcgcccgacgcatcgcctcatgagtaggggccatggccagaagctctcgcttcatagccttgaagctccggcgagagacgtgagcacacgctcctccatcgacggtggcaatggtggccccaggttcttggaaacctaggtcatcatcaccatcatcgatgtcaacagcgggggccttctgcttggcctcacttcgccgtttgccggaaggaaccgccggggacttgccctcacggcgttcctgccttctgtcctcctcccacttcctcgttcgctcagccaggtttttgactgcacgacagtccgcgagatcgtggagggaggtattgtggacggagcaccacctgccggcggggcgctccctgctgggagtaccagcctctttctttttgtcgctcgcaggcctcccctttcgagtggcccgcggagcgccctcgacggcgaggacatgaccctcgtcgccggaacggtccgacctcttcttcctcctcctgtcacgccgccctgtctgagcggcggatccgggggcggccgaagctgtcactccggaaccggaggagttccatgtccacgcttcctccttacgagccactcggtccgcgagctgaaaaagctccgcggtagtctggggctctttggaagcgatcttttcgagcatgcggttgtgccgcacgccccccctgaacgcgtagatcaccgcgtgtgcagggatgcatggtatagtattgcggacttggcagaaccgctgaatgtacgagcgaagcgactcatcatcgcctcgctgtactgcatgcaagtccgcttcttcgcctgggcgcggatatgtgccttggaaattcatggtgaactgttggcacaaatcttcccaggagtggaccgacgcgggtggcaggttcattagccaaccccgcgcctgtccttttagggccatgggaaagaagttcgccatgaccctgtcgtcacccccagcggcctcgatcccggtcgtatagacctggagaaactcggtggggttgacgctcccatcgtacttctcggtgatggtgggccggaaccttgggggccaacggacattccgaagactcgccacaaaggctctacagccaacaccaccggccgggggcacggagggctgatcctcacgtccatgtcgaggtgacactctggacgaagaggcgccctccgttgcacggggagtacgccggttattacgccggcgctcgatgtcgatgcgggcatccggctctccatgctgatcctcccgagttggaggtgtcgacgagggagtggcggccgaatggcgcgcagcagccgccgctcgccgcgccctccgccttgacgacacggagccggtggtagcggcgccggaggtcttggtggtggcggaccgtccaccagcacccaggcgctgctgtgccgtcatgaccaagttggccacgtcgtccagccatcgctgggctggagactccgggtcagggacgacaggcgggtgacgtaggagcgcgccaacagcctgaagcgcgccctgaggcgtgctgccgtcaccgtagacgaggaggcgacgctccccatctcgccgttctcctgcaccacccgcgactggcgatgctgcggatttttcgactctctcgagtgcctccccctgcttaggattttggtgtggaggaggtgggggagtacgagctcaacggcgtggattcggctccccgtcgtcgccgctcacactcggagagaggtcgtgcgcttttccttgctcggccattaggctgaacaagaaaaacttggcgcacacggaagagtctgagagctcagaaaacacacactgagccccctacctggcgcgccagatgacggagctcgtggcccctcaccgggagaccgcgcaggcccccctttgccagttcggccgggggcttagggtgagatctcaagctctctctctctctctgtatgtggaaagatcacccccccgcaagacacacgagacacggcgatgtatacaggttcgggccgctgccaagcgtaataccctactcctgtgtttttgtggatttgtgtatggacaagttacaaaggattcacttcctttcccctccgccttccaaaagggaaaaaagtcccctctctaaatgggcaaggtcctccttttatatctcaaggggataccacatgcccctttctctttccaaactggactgttctttttctctttaatgggcggagatcggtacggtttccatccgggagcccttctgatgggacagcccacacctacccccacctcccccgaagacagagatgacgcgggaccgtggctgtctgtcgatgacgcgaccagtgccagaccggtcattcttgtccaccacgcgtcagcttaacaacgtgcatgtttgcccttcttcgtgtaacaccttgcctgtaatggttaggatgaagcctggtataaatctgaccagggctaacgtgccatctctaagagataacacgctagctccggcttgagacgagtgcctagaggctttcgtcttgacgggatggggcaaggcgtgcgtcagaccgccagccgccacctaacccgtgatctgaccggtctgtgactggtcacagaccggataaaggaacgcgctgtactgcgttgcatgcagcgtgacacgcttgaccagactgcaataaatgctgttaggtgagcacagctgtgctcacttatcccatatatgtggcgcaaacttccttaaggggtcggggtgcctcggccctcggggccggggcaagcgcaacctcgggggaaatcaggaggagggcggacacctcaccctcgggcccgacgttcccgaaggtgccaggccacgtgggcgattgcgtctgcctcaagcctctggtcatgatactcccggtcccatatcaccgacaaccgtgattagtcttacccctagttagctatcgaactggtgtagttcaggtggttggttgggcctgttgcaacgtggtgtagcgttagacaatgattggttaatattgattaattactacaactgttttactgctttcaactactgcttttaaatgctagctttatgcaaaaggacctttagcctcccttggatatatcctgcatcatacctcctcttccggtatgacttgctgagtatagtgggtagtactcagtcttgctctcttttcccccataacagagctgaagatcttcctagttggagctgtctcgttgaggttggttttgtcgctgccgtcaagtattgcctgtggaatggagtcgcccgctgcaggagtcaagtcttcaggcttagctcgcttttatcttttccgctgcatctgtaatcttttatatttttgtaagacgtggagctgtatgtcaacaattgtcgtttgtgtaccctggctggtcctggacaggggtttaatgcacattcagcttagaaattatggttcgtgagtttctggcgtgacacgcggcccccttcctcccgctgccgccaacctcccgccgccgccaccgccgcacgagtggtcaccgccctccccccgccccctcaggccagatctgggagggagcgagggaggggagcgccgcgggccaccacccccctcgggccagatctggaagttagggaggagccaggagccgccaccgcctccaccggtagccactgccctccgccgccaacctcccgccgctgccgtcgctgccgccgcacgcgtggccaccaccctccccccgcccccctcaggccagatctgggagggagcaagggaggggagcgccgccggcccccgccctccgccgccgcctccaccggtagctgccgccctccgccgccgtcagcgtcggggagaggaggagaggtgaggggagaggaaagagctgagagctgaggaagagaggtgaggtgaggtgcgggagagagctgagaggtgagggaaagaggacttagaaaaaatctagcgtatgtagcctctatttatattccctatgtattttcgcaggcggaccataaggtatttttgcagccgaccgtttaagtggtccgcctgtaaaaatggattttcactggtgggcagcgggtttcaccctaatttacatttttgtaggtggctatttggctccgaagatcatgtccgcctacgaaaataaatacccaacgtcggcaaaactgtttttctagtagtggcagctgcctaactggttgtgttacagccgctgtaagatgctgccgaacatagccacgggtacctaggtggatttaaataaatgttttttaagaaaaaatttgcagatgtttattcatgccgtttgttgtttacaacattttcaatatgattgagtcatgttcgcagttctacccctccagggtaaaataacaaaaagaaaatctgacagcgctcggcttcagttttccattacaaaatcgcatctaatttacgatggtaggagcttttcaggttaattgcaattgtataatattattgtagaacacaaattgtatacgtaaagttgagaacgatcaatcactcatattgtcatcttagaaaaggaagaatcctacttaccccataccaagtgtcattattaaacgtctaatccaattcagatctgcaacattccacaagattttcccacaaagctatgccatcagatactacctgcccctgtactttcggcaatacgtttaccttatccactgggcatgccgacgccattagtgtcactgtcatgccagcctcacactcattccagctcaagctaagcaaagctaaccaacacattctttctagcattatccaaatccggcactgcgagcacttgccacatctgatcacatcaagagattaaagctaatcccaactcagatgtgatgcatcaaattttatatttttgggtcacactcgaacacactactcccaaacacttgaaaccgacatagtattgggtggtgacaagagattgctacaggcccagccattcattgtccttgctgtctggtctcccactgctgaagttagctggctgtttcatggataagattggggggaaaggaacatagccaaaaaagggaactggaaagggagaaaattgcattttgtgtgtactatgtgagatgctgtgatctgtggttgtccaaatatttgtttggcttatcctttgtaacggtttttgtgggtatgatgaacttgaggcatgaaagggcgatatctagaggttgtttgattctttgtaattgtttgtgtcgccaatttgggaatggtaaagatttgcccattgccaaaaaaaaaagaagcaaatgtgcttgtttggattgctttataagtatttcataccaaataatttgtcaatgacaaaagtttggttacaaattaaatgagtgacaactttgccatgtttccctaatttttacttcccctttctcgttgaatcgtctgataaatttaactgtttcatattataggtcgtttgacttttttttcttagtcaaagttctttaggtttgatcaagtttattgaaaaaattagcaacatctacaacaccaaattagtttcattaaatttaatatataatatattgtgataatatatttatttttcatgttcttgtactagatcgcacctatctacgatgtttctataatgtagacacaatttactctttttacttctttgattacaacaaatgaaagaattactgatatgtagggttgaaagtgattcggatagtctccgtccgaccagacctttttttcggattcggatagtttctattggatatatccggaaattttcaaattcggaaatgaaaacgaatatgatataggtgatatccctcggaatcatataatggtcaaatactatccgatatttccatcggattcttatgcaaaaacatgtttttcttttctttacttaggtggaacaaaacaaaccatatgaaaaagaaccaaggaataacaatcaacatacaaacaaatggaaaaattcaattctgaaaaataaccactcgaattttcaaaaactttaaattcaattctgaaaattttaaaaagagtaaattgcaccgactgtacaacaacttgacaggtggtgtgtgatacaatgtaagaacttgagaattgaacgtctgagtgcaacaacttgtactagaacgcacccacttgtcaagttgttgcactcagacattcaattctcaagttcttgcattatatcgcacaaacctatcaagttgttgtacagtcggtgcaattgaattttggtatatcaacttggctaagcatatggtaggcgagttttttttcacgatgttaatatgccattacatagtaatcatacggatattaccttataatattgaatttaatctttaagaattatactgcatattgtagtacaatttacatccaattaccttatcaaatatcaaccaaaatataataatttctacatccagtttaattgactttttgttattagttattaggataaaaatataaatatacttatataaatatacttatataaaaacttcataagtgatcgtataaattcaaaataaatatttaaaaattgaatttataaaaaaagtactccaaataattaagttgtcgcataactttttaatttattgtatcaaaatcgtagcaaccttgcaaattgttgcatttatacgatcacttatgaagtttttatactaaattgtacatacctgccaagttgttgcactagaacgctcatttctcaaattattgtaccaatttgcacccacctgccaagttgataaaccgtagatacaatttactctttaaaaaacttttaattcaaaaattgaaaagtttcagtttgaattcaaaactctcaacccatctttaaaaaattcaactcaaattctagaatgtttaattcaatttcgaaattctcaactccaattgaaatgttcaacccaaaatttaaaatattcaaccaattttcaaaaatttcaatgtgcctgcgaaaatttcagtgatacaattaatttatttgtttcaggataacataaatttgtatagaaaataaacacaacattttctatctcccccttgcccttgcaaatagagataaaatttgaaaatgttgatgttttgttttttaaaactaatggctacatctcttcctcgatttaagaagcttactttgaggggtcttgatattttgataattattcgtcaccgtattcgtttcgattcgtattcactccatatctgtattcgacaatatttgattatgttttcgtatccgggtttctgattccgatttcgattccaagaaaaaatatgaaaacaaatatgatagagctagtttccgaccgtattcgatccgttttcattcctactgttatgtttgtttaaaatatacttcaacaatattaaataaataattttagcttctgcaaaattactaaataaaaagtactccctccatcatgtactcatttttagctcattccatttgtcccaaaataaggttatttttagagtaatcattgtattagaatttgtgaaaaatagataattcttatattgggagtcgataaattgaaaaataattgtattgagatttgataaagtaatggtattatagtgttttggttttgtattggtatgtattggatggatgaaaaaaataaacttagggcctgttcaggtttctgccaaaataaacctttctaaaatttggcaatgtcaaaattttaataagttgataacattgccaaattttggtagaatcggttaactatgttattgctaaaattctttagacattaccaatgtttggtaacgaactgaatacatctacatgtttattaatttttttaaaagtaatatagttcgaaatggtattaatctgaacaagcttttaatttgggagggaggatgagggagtagtcaaaatgtaaacagcaagtcagcaacagcgaacaatcttatctatcgtgaaacagaggtgtaccagcacatgcatcatccacccagacccagagtgtcccagttaactttagaaaccagaattaattacgccagctaattcgtggctcaacagcaaataaatgaccaattagtctggaagggtagcaagtggcaacggtggcgaggtttagaaaagactgaaaatgcacgtacgtacgccagtattacatgatctgcaactgccacttaaactacgaatttgtaccatgccagatttactgacagcgaatcactttttttttctctatggagtagtgctaatataattaacgttaattaatgttgggtggagagtaattaagcatgtctgcttttgtgtactgtactagctgattccagagcattggcgtccctttttccgtcacagggcattggcggcacatgtggtttaggtaacctcacaccgtcacacgtactaatgacatggtcctaacacatggtagaatgataggctagtctactggtcattccaaaactacactttttggctttgtttagaaaaacaaaatattttctctgaccaaatatatgtgacaagagcattaaaaaattaaatttaaactcgtgtcatatccaaataaaatttaagaatattttttcacgattttgcatttacatacgaagggcatcatcttttcgcttatgtttatccatatcagcaaaaatttaaattttaacattaaatttggaactgattttgtggttttttcatcgaagtttatttttcagtcttttaattagctaagacacatatataaaatttttatttacttttcatttgcaaatatgttgggctagaattttgaaaaaactagcggaaatatctgcgggttgggatcgcgccacccaacatatgaccaaaacttcttgtttttttttttactcacaataccatgcgaccaaaacaccatattaacaccgaataaaaaaacaccatattaacacgagaaggttagtttaggcaatgtgaacgatgcagtcacgcggataagctatttgtggtaagcattcactgctggttggtgaactatgttaaatactcaatctatttcaggttataagatgtttaaactttgatcaaattaaactgttttaagtttggccaagtttatatatataaaaaatattttcaacctaagctaaatttattataaaaatatatttaattattaatttaataaaactaatttggtaatgtaaatattactatatttgactatacacttagtcaaacttaaagcaatacatgttataacttgaaacggagggagtagttcatttgacgagttaataaattcattcttatccaacatatattaaatcaaaagagaaatacgagaactaatagtgtgtaacaaatgataaacaccatgtgttacattttgttttgtcccttttcacacaaaacagcacagaattgtcctaggtacatatagctgtatagggcgtgctgtacctaaaattgtaaattggcaactggcacgtttaattttttttgaactttggcatgtttaattttagtacaacacgtccagtaggattctcacgtgatgtacactccatgaggaataaaaaaggtgaaaggtcaattataccaatcaaattttaaaaaatatgaaaccaaataaaaaaagaaatggataacctccagcacagatattctcatctcaccgaccaaattccccaaaccccaaatcaaatccaaaccgaaacctctttcctaattaaacgaaaaacacagggaccaaactgtaaatgcccaccactccctcccctaaacttcagccatgacatgagtgctcctcgcattttcatcagtggagaggaaggaagagaggaaaccccattgaggaggaggaggagatggtgaggcggcggcggcggtccgtgctgctgctcctcctcgccctcacggtgctctcgccgctcgtgctctacacgcgccgtctctcggcggcgctgaaccccaaccgtgagcgcatcttctttttctcttgttccttttcttttctttctttttcggtgtaattttggtgtagagattgccttctgtcgggcggtttcttgggcattggggtttatggtgttaccgtgtgatttcttgcagagaggagggatttgcctggcgaaatcgtgaatcaggtgcgtgtttctcggggttcttgcgagggattcgggagatttgtttggattttgatgagaacatttttttatggatttttttttgttttgctagggccgtggtgttaaggctagcaagctaaatgcacttcctctggtaaattttgttattgctcttcgtttcttcattttttgtttattttttcttggcgagggcgacgaataaaactggaggtttttttcttttggggttcaggaaactgtgggttctttgaaagaacccgttggcatcgtcttctcggaggagtcacgcgaatctgcaagcaaatcgaccgaacccgatagccaaggtctgggattttattttcttggtcctgtttgcatcttgtgttcctaggtccatggtatcgctctgtgaaattaaactatgatattttgagtttgtgctctgagttcgtttgcacgccaactgttcctagaatttctattgaggaaggcaggggagcacaagaaccgggtgctctctgaggccacggctgctgatagtgccagatcggaagacgatgacttgatcgagcaagtgacaagcaaggatggagaagatgatggcttggcgacggtgtcagttgatcagcagcagataaccacggcatcccaacagcgatctgcttctgaggttgatagtttattattgtcaagtttttatgtgcatcttaccaaatttagttatgttgtcacctgtggattagtcatctggacctttgggacctccgcatgtgctttagcttctatttgggattgcattattagtgttggggccaaactctgaatttgtggtaggtagggaaagtcttttttgtgcctattatacctaacttatcaatatctggtaatgttcctttcttgtgaaaagacagtggctactcatatcttgacgtatctttcttttcttgtcgtagtaggtcaaagtacctaagatgcaatgatgcattattttcaacattaaagaatgtgttggtaaattgttctgctcatgtcgttagaggaaaccatattttttagttgaacatgaattaatttatgcaatgtagctccgtacaaagtaactcagttgttttgttttcaaatgtgtgggtaaaatgctgtaagggtgtccttcagaaaagatgatgatcatagtttatctgacaatgttaatgcacagtttactgtaacaagatttatgctgttaaacaactagactaatgattaatcatggagtatgtcaagattcaaagcatttatgtttatcaattttgagaatgtgtgtatttggttcagttacggtcttctgcttcaggctaaagttaagtttctttgttatggaatgttctttgtgcacgcttttgttaatatgcttgcctctttcagccattccttaactttcctgtaagttaacttgactcccaatattcttgcctttcatgtttgtccacccaaaccgtttcttaagttgagattcttgtaccaactttgcaaggcatccctaaagtgtagaatcttggcacctgatgtgaagtccatttcacattatattccctcaacctttacaaatacaaggcacatagcaacctagacaaagtttcgttttgggaaatgaaactaccagacatttaaaaggctactcacatgagcacgtgcacacacattttcataattccttttgttgagttgactagaaatttctagatttggtagatctgttcacatgtttgtgcatccatatgctggggtcacctaaactgtagcactcatgcagaatttgtgccattttattatcaagtaatggtatcataattctgttcttgaatttcctttttaacaaaattcatttgccatatgttgagataatgatttcttgctaaatggtttcttttttattgcatggtcttctatttacaggcaagttcattggagaatgtgcctgaacagacatccatggaaaactctctggaaggaaacaaagatggtgctttgcttgatactagaatccgcaatatcagggatctgttaatcaaggcaaaggtctaccttggtcttggagccattcgagcaaatccccagtacctcaaagacttgaggcagcggattcgggaagttcaaaaggttcttggtgatgcatccaaggactccgatctacccaagaagtaagggtttcctatcctgtccgattgatgtatttaacattgtagctagttattatgttcaggatagcagcctcatcaattgttctgtaaccttttcatctgtcttgatttgatcagtgccaatgagaaggtgaaaacacttgagcagacactgatcaagggaaaactgatgcaggatgattgttctgttgttgtcaaaaagcttcgagctatgcttcactcagctgaggagcaactgcatgcacacaagaagcaaactgttttcctaacacaacttgcagccaaaacccttcccaagggtcttcactgcctccccttgaggctagctaatgaatattttttattggatcctagccatcagcaattcccaaacaaggaaaaacttgatgaccccaaactatatcactatgcattgttctctgacaatatattggcagcagctgtagttgttaattcaacagtgttaaatgccaaggtatgtaatattctgtcctagtttgaattacgctggaagatgatagcaagcatcatactgagtagattttattttatttgcagcatccttctcatcatgtcttccacatagtaactgacagactaaactatgctccaatgagaatgtggttcctctctaaccctcctgggaaagcaacgattgaagtacggaatattgaagagttcacatggctaaatgccagctacagcccagtgctgaaacagctcgaatcacaatcaatgattgattactacttcaggacacatcgtgcaaactcagattcaaacttgaagtacagaaacccaaaatatctttctattctcaatcatttgcgattttatctacctgagatttacccaaatctccacaagattgtctttcttgatgatgatgtagtgataaagaaggacctaaccagcctctggtcaattgatatgaaggggaaagtaattggtgttgtagagacttgtggagagagcttccatcgttttgatcgttaccttaatttctcaaatcctgtcattgtgaagaattttgacccccatgcatgtggatgggcttttggaatgaatgtctttgatctggctgaatggaggcggcagaacataactgaaatctatcactcctggcaaaagcttgtaagattcacatattctttacttccttgcataaataaaagtacttgctagaaatatttctatctattgaagccaagatacttcttaacattcaagaaatcgtgttgtttgtagtgagtagttagtattgaaccaatactagcttgagggctgtatgcctttatccctgtacgtaaagaatgtgacagcgtactaaattttttttgaactgctacatggctggtttttatgtacaatgaacatacctatttttccgcttaaaccatgtatcaaggcttaggcccactttgattcaaaggaaattcataggagttttagaggatttcgttcctataggaatctttcctatatagctctttgaatcaaaggaatgaatcctatggaatcctatgaaattcctatggaatacctaataccatgctagttttggaggaattctaacatgaggttttacctcatggaaactttcctttgagtctttatctctcctctaattcctgcgtttttcttgtgattcaatcaaatgaccattcctgtgttttgcaatcctcagttttacacttacattcgtatgaaaatcctgtgtttttcctattcctacattttctcaatcttgtgtttttcctattcctacgttttctcaatcctgtgtaatcacttgtaatctatgaaattacctttttagaaaggtttgtaattagtgtagaaattatttatggaaatgataactaaaatatagtgtgtatcataagtgtcaggtggctttgagtgcttttagtactaacgttgagttgtgtactttcatgttcattttggttcacatatgtactgaaatatatcaatctttgcttgcagaatcaggacagattactatggaaacttggcactctgcctccaggtttgattacattctggaataagacgcttcccctcaatcgttcatggcatgtccttggtcttggttacaacccgcatgtgagcagcagagatattgaacgtgccgcggtcatacattacaatggcaatatgaagccttggctggagattggtctgcccaaattccgaaactactggtcggcatacctcgattatgaccagcccttcctgcgggagtgtaacatcaatccttgaagaaagatggcaccttcaatgatccacactgacataaccaatagttttccccattcgtgggtcttgtgctctttagtttagtttttctagtatttgattgatttttttttaattgtagatgtcagttgttaactagatttccttgccacctgtcctttgtatccctacttctgcataactgcagatatggttgtagatgttttgatattacattctctcctggggcaggaaaatgttaaatagtgtgattctcctgtgtatggctttttaatccctacttctgcataactgcagataagttgtagatgttttgagactgcattctttcctggggcggaaaaatgttatatggtgtgattctcctgtgtatggcctttttatctacctgaaagtttgttgcattgtcacttgaaacttatggaagtgtattccagtccccaaaaaaaaaaaatgaaaactggatattacaccaaacacgacaggttacccaactgtttccaccatatggtttgccggacgtgagcacatcgtgagtaaagtctagctcagctatttaacggtgcatttggatgtagtacactacttgcttgggctctggacacatctttgatcagatttagcaagttctccctatgatgtcaaatgaccgtatctaatccttgcagattattgggatattgatttaacttcactgccgatccaaagggattgtgtacatcttttctttatccaaaattatgcagccgaagtaaccgatggtgagatgaatagttcacggttaaatgaagggagatgaagccactgttttctaaaccgagccggattttcctggaccatttttatataatcttcttcgtgttcttattagtgcatatttgagacagtttagtatttttggggaatttccaatagaattgtgcatctgtttattaagactttcagaaagaaataaagaattaataggttttcaatttcaaaattggatatcatgccgggggtgaccgaaatttcgaaaatttctggctgaaattttttgaaatttgattgaatttgaataaaatgtgaccaaattcacaataatttgcaaaaaaccgaaaatttcgagcgatatttgagcatgccggtggggggggcgaaattaccgagatttcggaactttcaaatcctgcgtcacaccacaccaccaccacaatataaggaaacacggccacaccgagaaccttcaaaacaacgtctccaaaaagattacaacattaaaaacgccaccatcgctcatcccgaaacgatattgttttctcctagaggataacattaaagagggggaggaaggcacctcgacaaccttctcaagagggttacggcggcaaaagacgtcactgctgtcggataagaattgggctaaggttttgtcccgagccaccggcgcggggacgacgcgacacacgaaggggtatccgacagcagcaactctaatgagatggaatgatggatcgaaccagacggcttttgagacagtttagtctttgttccaattaattaagcatgacattggggtattcacaagttgagtgattcagaaactaatgccagtaatcggcagctcacttataccacgtacagaatccactataattaagcgtcaagggagaggggaaaaaaaaatcaaagcaacaaaatcgtctaagaaacgtacatgaaggagaaaagaaaagaaaatcgtctaagtagcataaagggaaaagaaaagaatcacaaattaattaagctcagtgcacgacacattaatcggagctagctaagctagtgtctttgttgcttgctaggtgcatgcttgccaagacagcatgcaaaaaattaacgatctcgtcacagatcgtcgtcatggggctacgggcacggcttggggttctggaagccggcgtacttggccctgacgttctcgcacttggacgacgagacgccgttccccttgtaccgcaggtcgacgtcctgcagcacgacgccctggcacggcaccccgcacttgagcagcaccgccacctgcgtcgtcgccgtccccttgatgttcttgaactgcacgtccttgatcgtcaccccggacacgaactgcacagttcgacgacggtcaggccgatcgatcgacggcaatggcgaatgaattaggaagatgaagatgcaccttgtgctcgcagttgtagtaggggcagtacttctggtcgatgatgatggggttctggacgtcgttcatgacgaggttctcgaacagcatgtgggcggcgttgctcttggtgggggagttctcccacgtcttgatgcggacgccgttcatggtgccgtggaaggtcatgtcgcggacgtggatccgcgtgacgtccccctcgccgacgtaccggccgaggctgcccacgctcatgccgtgccccggcccgcagtggacgcgcgccacgtcgatgttgtcgttcccctgcccgatggagatgcagtcgtcgcccgtcgcgatggtggtgtccgcgatggacaccccgttgctccgctcgatgtggatgccgtccgtgttcgggctgctctccggcgcgctgatcttcaccccgctgatcttcgccccgctgcactgcagcagcgccatgtggaagaacttgctgttcaccgacgccacgttctgcaccaccatgtttttgttgttcacgaacagcacgctctgcatactcgccattataatgtaagcttaattagctgcacactctgctaatggcgatgatgatggattgacgaaaggaagaagcaagatgctcacggtggggaggactttgcagtccttgcggatggggcacttgttgaagggccaggaggcggcgccctggccgtcgaaggcggcgccgttctggccggagacgatgaggtggttcacccacccgaactcgacccagtcgttgccgaacctcttcaggtcggtcgccgccttgagcgtcccctgcaaaacgcacccacccaccacacaccaccacggatcgttcgatcgatggatcaatcggtcagcccagccccacgtacttgctcgatcgagatggatggatgcaaaatgcaactgcatccatgtcacgtagtggccggccatggccacgggaccaaactgcctgctggttggttggtatacagtatacttgcctgcatgaggaaggtcatggtggtggccttgctgcaggggccatggaactgcaccggcccgatgtagtaggtccccggcgggagcaccagcgtcaccgccccggtcgccgcgcacgccgccttccacgccgtcatcagcgcctgcatgtcgcggacgaacacctcgcagttagccaagaagctaggggataattcaaccaaggagctagcttgatcgatcgattgttcctcagctaccttgctgtcgtcggtttggccgttccccttagcgccgtagttcctgacgttgaacgtcgggtccccgtggtaccccaccaccgacgagttaccggcggcggacgcgacggcggcgcagtgcccggcaacaacgacgacgacgacgagcagccgcagccgcgcctccatctccacagctagatagcgcacaggcacaggcacaggcacagcactgcggcgcggggaccgagcacacgcagagctagagagctagctatacagctttacaccgccggccgccgtctccttcgtcttcttcctcggtcacttgatctcagccacagtgagaggcatacactagttgatttcactcggcggcggcggcagggagatgatcctgatgatgagatcttgatgggggcatcggggatggaggcacagatcgatcgatcgatcgatagagagagttgaggggggtgcggagtgatcaacgagagtggtttttgtggaggaaaatctggtcttatagcggtcggaagggggctaagtttagagcagcatggagctcttcgcgcggcggttgtgccgtgcgggcggtggaggccgagcatattccactcgttctcactagtgtgtagcgatctgcatgagtaagggaggggagtagtagtagcccgaggtgccaagtgtaacctcccactacttgatcgatcgatcgctcgcgcgcgcgctgtggatttttgatttcattctggtcaaaacacgatctcaaccgaccactaactttagaccacggcccaattacccttgcacggtcttttctctcttttttttttaaaaaaataatttttttgtgtgtgtgagagaaagagggagagagagggggaccgatgtctgtgcatgttagatttatttcttgtgtcagatcaagttgacacttgcatttgtgtacgctagctagtgtcaaccgttgcataattgttaatttccaatatgaaaaagaagagggtgaattggtgacattgcaaatatggctatttaggtaaatgatactacagttcgtctattcgtaactgtgttattgaaatctattaatttattaaagtaatagaaaaagaagactccacgttctctctcatggtctagaaaatcccacattaattgaaggaaaataagaaaaaaaataaaagtcaaatcctagacggtaccgcattaactgctgaaaaaaaaagaaaaacaaaaaaaaaatcaatcggacaccctatactatagattgcttatctggattctttttcaatttagaaatagtattttcttttggaaaataacagtcatacatggttatcaaagtgaaacaaatcagaaacaaaaatagagtaatgcatatgtttctattccaaattgtactctctacatacatgtcaaaaaaaaaacatagacttaccacctcgttcgctcttacggcctagaaattaccacgttaatcgaagaaaaaaggatggttatcaaagtgaaaccaatcagaaacaaaagcagagtaatgcatatgtatctatttcaaattgtactctctacgtacatgtaaaaaaacatagacttgcacgttcgcttcacggcctagaaattactacgttaatcgaagaaaaaaagaaaaaaaacaaacgggcatgtattcttttggaaacgtgacaaccagagacatactcatgcattgtataggtttaggaaactaatcacaactcttaatcggatgaaaattagaagagaaaacaaacggacaggattgttttttggaaatgtgatataacaataaatattcgtgtatggttatggtgtaggaaacggacaacagtaacaaaccaatcataattagattcgtacatggaattagcatccatgtcggtatttatttatacgctttcgaattgtacacgatttatcccgtagtaataaatagatcgatactcctagcaatgaaagcaaatacacaaaacacccataaatcttctagccgcaatcagctttgccaacaaattagcaagacggaagttttgcagccggaatccacttcattaacaaattggcacccaagaatgccagaaatcttatagcaaaggatcgtccaacaaataaatttgtgtgctgcaaattaacatattaggttggtaatagaaggaaccttcatgttggttcaaattgtctaggaaaacaaacattaattacaaaataaaaatataaatatatctattgatttatctattaacttattagaggaatagaaaaaagagcctccacattcgctctcacggtctagaaattctcatattaatcggagaaaaagaaaaatagagttcatatagaaatacaatttaaaaatagttgaaattcgaaattaaaaaaataaggaatattggaagaggagactagacaattaagaaataatagaaattcggaattaaaaataaggaatattagaaatagagtatagagtccatatagaatttaaaactaacgaaagttcggaataaacataataaaattaaaactagagtttagagttcgtataaaagtacaatttacaaataactaaaattcaaaatttaaaaaaaacatgggaagaacaatcaaaagtcaatataagaatacaatttagaagtaactaaaattcaaaattaaaaattaaagaagagtaaattgcatccacggtgcatcaacttggtaggtaggtgcaatttagtgcaataacatgaggaatgagtgttccagtgcaacaaattggcaggtagatgtaatttaatataagaactttataagtgatcgtataactacaacatcttgcaaggtaggtatgattttgatacaataaattaaaaggttatgtgacaacttaattacttggaacattttttttatataagtctatttttaagaacttattttgacaatatactagtgcggatttgtataagcatatttatatttttatcctaataaataataactgaaagtcaattaaactggatatagaaattactatatttcgattgatatttgagaaggtgaagaaaaccaaaaaaaaataatcttaaaggcaattggatgtaaattgtactactatgtgcagtataattcataattattaaattcaatataaggtaatatccgtatgattactatgtaatggcatgttgacatagtaaaaaaactcacctaagatatgcttagccaagttaatacaccaaaatactaaattgttaagtttttgtactagaacgcacccacttgtcaagttgttgcactcggacattcaattcttaaattcttatactatatcgcacccacctgtcaagttgttgtaccgtgggtgcaatttactcattaaagaatattgaaagatgagtttagagtccacataaaaatacaattagaaataacaaaaaattcagaattaaaaataaataatattagaagaagagcctagagtctatatagaaatacaatttacagataacgaaaattcagaattaaaaaaagaaatattgaaagacgagtctggagtccatataggaatataatttacaaataactaaaatttaatattaaaaataattaataactaacacgtagagtatataaaatacaatatgaatattacacattagtagtttcgcaatgttagtacaaaatttaaaattatgttgtcattttaatatatatgaataatacattgagaaacatatatgctattatatgagagaaaatataataatgctagccgcgcaatctgcgcgggccaccatgctagttctataaaattaggacagtgccaccaccatgcatcaagttttccatctatctcttttttttccgttttcttccttctttctcccgtcttcttcccttaagtgatgttctcagcaagtgaaagatgacaatgatgatatggcaacatgggaggagtagcagcacagtggcgtcaccctcacctcatgacttgaacgactacttgggtgtggtcagcaaggtggaggcatcatcgacaggcgccgccacggtgcacgccttcatctcgaagcagtaggactaggtatcattgacctcggcggcgaggggggcggagttgctaaagcccttggcggcttgggcggggggcggggggcgaggaggtggtcgagggtggcgtcaagctcgacctccttctcccgcagtcgtcgcgctgctgaagccacacgcaccagcgcctggcactgtcgcttctgcacctacttcagcccggcgcgcatccactcgcactccatccgcaccaccgcgtcaatcttcgctctatgtggtcacaactccgacagtagtgcatctcccaccgccatagccgaggccacgaaccacccactcattgacgtcattgccgactccaccaatcggctcatcggtgcagccaccacaaccagctgcatcatccccgggatcggcagcagcgccgcggacaccactaaccccactgctgttgttgcatgacagcttgctctgtgccgcattgctcaccacagtggcacggtcatgccgtgttgctcaccacagtggcacggtcatacccatcgccctattgttgtagcaaccacccgccgcagggaatatcgctcaagggaagaagacgggaaaaagaaggaagaaaatgaaacaaaaaaggagatggatggaaaacgtgacgacagtggcatggtcctattttgtaaaattttagtggaacgactacgaatagatgaattgtaatgacatttatttgaatacgcacatttgcaaggcatggatccaatttacccttaatattatagtgctttagaatatgaaataatgaggataattaaaataatgatgatggacaaatttagaaactttagaagctttaggaaaccaaaagagtaaattgcaccaatgatacaacaacttggcaagtgggtgcgatatagtgcaacaagttgagaattaaatgtccaagtgcaataacttgacaagtgagtgcgttctagtacaagaacttgacaatttagtatttttgcgcatcaacttggctaagcatatgctaggtgatttttttcacgatgtcaatatgccattacatagtaatcctacggatattaccttataatattgaatttaatctttaataattatactgcacatataatttacatccaattaccttttaagaattttttgttttcttcaccttctcaaatatcaatcaaatataataatttctacattcagtttaattgattttcagttactagttattatgataacaatataaatatgcaccaaataataaagttgccgcataacttcttaatttattatatcaaaatcgtacctaccttacaagttgttgcatttatgtgatcacttataaagttcttaaactaaattgcacctacctgccaagttgttgcactagattactcatttctcaagttcttgcaccatattacatccacctaccaagttgatgcaccggcggtgcaattttctcaaatgaaaatttagggataataagatttatattgctcggtgattgtaaatgaattgaactattagcatattaaacttaactctaccaacattagagactttagagttaggaaagcaagcgaaatatctctaacataataaaatagatcatttagcaaagtatgagttgttcttccatgtcttgcgcttaacatccttaggggctacgagcatcttggtggtggcaacaaggtgatggtccaagtggtgatgaagactgctggagtcggtggtggtagatcgttgaaggtgccagtgacatccagggtggattgacccaacctaatggccagatcactcccgggtgtcaaaaaggttgttgtagtgagaatgcaaggtgtctacaacgaggagcggcattgacataatgagatggtggataggttggcatagctgacgaaagatggggcacaacgttggatctagggtctaaatgccgctagatctgcgatgctcgttcctgaatctttttatatagcaggctagcagcaagctaaggggtttcttcttttcgacctccactggttggcattgcaagcgaagccactaggggccataaattgtttgatcgaatcgaatgggtccgactgacgacaagggaagagtagtggaaggagctgatctaatgtgattgaaatatggatgagggttttaggagttcgggttgcatatcaagattgacccagtaaggttttttgtgcggtaggtctcgccagacaatagaaggccaaagcttagtcttatagtaatttctttttcttttctgttttgtcggttatgagacttgtaacttttggctgtgttgcggatatacagccatatacagcaggatatttctatccactacgtaaaaaaaatattgagtaacatattgatggcctgattcggacgtggtctcctcaaatgctttaattttacgtgatggatagtatcagtgtgcaatggagttattggtgcagatgaagtcctaaaggctggtgatttgtgtcgactaatccacaggttcatgatcaaagcctatgcagattcagacgaccatataggtgcttgttttgtggatatgtgtatgcgaagcactgttgcaataagcctttttcgtttaatcctcaaaaggaaggaattggagtgcatcgagggaaaagggattatccgaacaagaccttaaggatttgattatgcagaaaaactagtgaacggaatcccatgagataggatactacttaataatgaacaccccaacatccttccgtttcttcttccctagaactatttctcctcctttctctcaaactcattctctccatcctccaccttgctccctcccccaactcctccactccaatcaatccaacctcccttcgccagaggaccgaccgccatcatccctaacactgatggcatgtcccattctcttcgccttccctacaccgcatttattgggcatgtggagtccaacgaggttatatggttgatggaatcgatcaagttggcaaggaggaaggtaactgcggtggtgaggttgccatttgccgtggctggggagggagaagagggaggaggtcagggaaagggggatgaggtcaggggcaccaacggacaatggtaatgcatagttggtcattctcagcgtgaggtcaacctcggagtttatgcgggtcttgaggttgtggtactcctcgctagctcgttgtgctgctcctcttcattataggtaggtaagttactagactagtatcagatatcagctgtgaaacgtcgaggatatcacagctgataccaagtatcaggcatagtacctcggggaatcacgactgatacccacaagtatcagccctggtagccagataccaagatctgatacctaggtaccagccggtacccacaggtatcaggtactaagtaccaggtgaaaggagggaacgcacgccatcgtcgctaggccagctagtgagctccctgctgccatatcctatcatctcctctcttcctctcctcaacgtgcccctcttcccttctgttgatgtggctagcgagacaaaaaaaaacaataagtacagttgctatttgcttgcatgcgaaagctcagctatacataggaaaagaagagggaggattcagtgatagcactgattggtctgggtgatatggcctattctgattgggtgtggttggtttgattttctgttaagcaagctccaaatgattttttctcctaaaccgtttatctaatttatgatttgattacactattatatttgttacaattaaatctttaaaacaagatctcggatgattatatttttgataaaaaaatatatatgacaaatgggtcccactaacttatggcttttcccatccgtgctatatccctccaaccaaacaagaaattggatcgccatatctatacaaaccaaacaaaaatttggatagccatatccatcaaaatatgtatggacatatcccatccatgcatgaccgtgaaccaaacacacccttaagtatcctatcctctagtctctctcttgattatgtggaatgcactgttctcaagcagtaggtgccacaagcgatgggcttctcagctcatcatgttcaccactcagggccgaatgaaaagcccaccgacgcagcagaaaggcccaaaaaaaacccttcctagtagtaacaaacaagcagccacgcttcccttggtttctcagcgactcgactccgcccgtccggccaactccgcggagtcgccaacacgaacccccctcctctcttcctccctccctcggtctcatcgaaaacccccactattactaccactccccctcgccttctccgcctccacagcgaccagcagccgcgccgagctcccagatccctcgtgcattccaccttctcccgaggtgagccacccgcttcctcctccctcgtccccgatccgtgccgcccacctcctcgctcgctgtgcgtggcgcggtgtttcactgatctgtgctttgcgggagaaaggaggagagttggagatgttttgtttgtgttgtcttgttttgtttcttggacaggtcaagtgggggatgcgggttttttttttcttgccccagggtttatcagcgaaatgtttgttctgtccaaatcgtgctcctggcctgggtggggaatgatttgagcgctgcgtcgccggttttgcatgttagatttctctcttgatttgtttgtgcaggataggttctttaggcttgtttttttttttcttttttgatagattccatagttctgaaatactagtttctcgagtgagctttggagaatggaggtgatacaaatcttgtatctttgtttcgatttgttctgtttgcctgaatacgggttgaacagttgaggctgagttagtagaaggacagatcattcgtgtaatgtgtgctgtgatgatcttttgatgcagcaggacgatgggcgcttctgcagctaccggtatgcagatggtggctgcacgcccctgcatctcagcctcccagggaatgcttacttccagggcggcggtctcccggattggccgcgcactcagcaccaccactggctttgcaacctgtcccagaatctgctactccagccctcttggttcttccaagcgcagcggtgtcgccatcagagcaatgtcaagcgaaagtggcccccaaggcctaccaattgatcttagaggtaactctttagctgcatatctgtagtaatcatgcacctagcaatgctatgtgatcatgttcttttcctttacgcattcatgtttccgtgcaacattttgattgcttagcttctattttctcaatttttcttttgcatctaacaagcatagatgctcatggcatacgttggtttttggttaactatatggttgaagccaaatattattaaccccgtcagctgtggtgaatgtttgaatggtgtgtgcttatttagttcaaaccatctaattgtaaaaactgcgtgctttatggaatctagtattttacattctggtcctcgggaaaaaggttactgctgttttggttatcttttatggacgatctaatggtgattcagtagtaatattgcgtttactactctttgataatgctgtaagagccagcctcatacatcaccgtgtagactaacatatgagcaattaccagtataccagggagcatatcctgtgcaaatgaaagtgttttaaattccatttttacttgatgtagatgctttaaatattctaaagaaaagcaaaagttgggtttgacatactgtatattcatgctaaggtagggtcttgaaaattttgatgagaaatatcaagctaaatttcttttaattatttgagaattttttttttagaacttatgtgccttttgaaggcctcattcatgaactctacatattaaggaagtatcaactttatgtgcttgctcattaaaaaaaggtcaaatataaatgctttcgtcagctgtaatgaagtttagtggcccatagcattatccaattattaacagatggtcacaattatacagaattttgcatagtaattacaagtattttgatttgttgtcatattgcttttgttattggtttgattgaaaaactaaaggagagatttttttttcaaaaaaacagagaactcgagcatattagtagtacaaatccttctcaattgctgccactcttctaatgtttgtatgatctctcaggtaaaagggcgttcattgctggagttgctgatgacaatggctatggctgggcaattgcaaaggctcttgctgctgctggtgctgaaattcttgttggtacatgggtgcctgtaagtggatccaactcttgcagtgttcaatagggatcatttttttttttcctctttgtcattcacttaatggagagttctacctgcacaggcactaaacatatttgagacaagcctaaggcgtggaaagtttgatgaatcacgaaagtttgtattatatttctatttttcttgttttatctagctttgctctgaaaataacatttaactcttatctaactatctcttgatacaggctgcctgatggatctcttatggaaattgttaaagtctatccacttgatgctgtctatgattcccctgaagatgttcctgaagatgtaattttcttatctattattttcttctgtttagctcccaatgcggctttatgacaatcatttttatttttaattttaggtcaaaggaaacaaaaggtatgctgggtcatcaaattggactgttaaggtgtgtagatgcaatccatttcattccatatgtctacccagttgatatacttgggtgtgcaaaaacaacattaggcgcgttatacaatttctataattggattgttttttaagcttttgagctttgactaaactactcctatttttatttgataggaagttgctgagtcagtcaagaatgactttggcagcattgacattttggtgcattctctagctaatggtccagaggtatagtgcctctgcctatattcctctgtgcttactgctagtgatgaaattattgtccatacgtgttacgctttcaactaatgatcacctacctctgtttgaaggtaacaaaaccactattggagacatcaagaagagggtatcttgctgcactgtcagcatcgagttactccttcgtctctttgcttcagcacttccttcctataatgaatccaggtagtgcttactccgcagttctaactctccacgcctgcacttgaaccgctatcttatacactcctagataaatcaagccgttactgcctttcatatctttgcagttttatttgtccagtgaatcatagtaatgctgctgtttacttatgtgtaacttgtctcctgctctgatctggatcaagcttttctgactgaacagcaatgctgaaatttatccaattgcattaagaaataacttgttatgacgctcaacctatactaacctatactattttcattggcactgcctcatatatgtttaatatttccaggtggtgcttccatctctctaacatacattgcatctgaaagggcaattcctgggtaactacattatttgagatttaaaatacaaagcattttgtatcattacttaccggtggtaattctgattatatatatttttagatatggtggtggcatgagttcagctaaagcagctcttgagagtgacacaaaagtatggtcttctagaatatatatgttattttcaacactccctccatcccaaaataagtgcaaccctctagttcaaatttgaactacaaggctgcacttattttgggacggagggagtatgtaccatgaatgtacttttttaatctttttctgcaaatctttgtaggtacttgcttttgaagctggaaggaaagggaaaatcagagttaacaccatatctgcaggtattttcttctgtaggaatattctcttggaataaagctagcattgtaaatcttggaactaggtgattgcctatgcgataccatttggaaattaatgacaaatgatgcaacatttctttctaattttacatgtgaatttcggtttgtcagcacatgcatatgatgtgctatttcccttggatatgatttgcataattatttaggatctcttactttaacgatgtaggaataattgtgagttcattctgatttattaaatttactcataggtcctttgggaagccgagctgccaaggcaattggattcattgagaagatgatagaatactcttatgttaatgcaccgttgcagaaagaactgttggcaggtccaaaaccgccttatttctctgttacatatgcttcttgttttatttaaaagaacaacttttcatccagatatactctaacgaaagcattttgtatgtcgaacagacgaagtggggaacacagcagcattcctggtgtctccattggcttccgctatcactggctcgactgtttacgttgacaatggactcaatacaatggggcttgcagttgacagccctacaatatcatcataggtgtggtatggtagatagatgggttttcctgcttcattgcggcttgtttcttgaataaagagcttagttaggtagtataagagctaagggcaggaagaaaaaatagagcatgaatccaatttggtccttgacatttgagtaattcctgcactggggtactcgagcaatactactaggtggttcggaatgattcaagccccagttaccaatgttctgtgctgtatcttgaaatttttaatcattgatactgtgtttcttcgtataaactttgtcaatacagtgaaaatcatgtgcaataataagaatggataatgtttggtagtctcttctgtataccttgctgttatgttgtgcaaaatgtcggtggtgtatactacaatccactcttttcattaaaaagttaagagtaaatcgcagtttgggatagatgttcttatcagatttttatattggacaacccttcagcacatcttttcacttaacaccaactagctttatcttttgtttcaacttagatcacccccccatccaatcaatcctactactcggacgactgccaccgcggctcccattgcaacaccggccacatcttaacctattctctcacgaacactatctcacctctttcgttcttccctcgtgacgaaggtgaggtgataacctctttcttcacttatgcccgatgcaacaaggaggagccctatctagcgtcactgatgtccaccatggttggatccgagttccctctggcccatgctgttggccttgacctccacagctccactaggacatcaccatgcatgatgacggggaggaaggagagacgattggcgggtgcttctatatgcgagaggtgaggagtggcggcgtgcactgtggcaaaagagcaagctctacactcgaaagtggtaaaagtagtaaaggagaagagctgtcgaaggtggagagagaggagcagtggtgttcatcatggtggaggaagagaggacgactgcggacgagggagaagctgcggtggaagtgcgtggaggaggataggagggaagggtggctaatgcttccatggcagaggagcttgccatcgccatccccaccgagcaggtgagaacctttcccttttttctccttttctctcataagcctattgacaggtgggccactagcctaaattaaaatgattggtagcaatatttgattttaagtgaaaagattcagttaaaggtggctgaaagtgacataagttggtcactagcccaaattgtaaaggattagtaacaatatctagctaagtgaaaatattgagttagaggtggcttaaagtgacattttggtaataatagctcgaccaatatgtaattcatatactcatatgtactactttgcatttaaatacatgataactttatttatttaaactagcatattactcatgagttgcaatgtgattttaaataaagaaaattattagtaacatgttagtaccctctctttctaatatagactaaccacgtcagaatgatgctactagattatttatcaaaaaatagcttctttttatggtggtatttatagtttatttctaattaagatgatactagagtaataaagaaaatcattagggtttaattaaataaatttttattattacaaacttgaaaatgaattttatctcatattttaaaacattttctgtataagaagttttcacacgaaatatactatttaactgtttgaaaaacacgctaatgaaaatcgagataaaatgtatgtatgttaataaataaattaaaagaacggccgcttgtttcgtacaacgtcgtcctggcttcagcttgagcgtgcatgttcatcacaaaggttattgtctttttattttaataacttaattttatagatattaaaggttaaagcggtattgaagaccgcatcaatcataaaatggattagttggagggagtcaatataaatcactaagactgcgttggagtgagtggttgtcttgagcttttcccttgcatgcataaaaaatataaatcattagatgaaaccctcgtgttactgcggaagtttagtatgatagcagtaagtagaaataatatgtaagatagatgatataagctcgtataagttgatatagtttgtgataatttaaatagtatatagaataacgatccaaatataaaagtaaggtgacgaggtttcatgagaaaagaaaaggagggggtaatttggactataaattaatcatctaaggattaaaagcaattgatgtgatatgacttaatgtgagaagaaaatgaggaaaataatttggaccatagattaatcatctaagtgctaaaaacaattgatgtgatatagtttaatgagagaagaaagaaataacattaatcaaagtgaggataaactgtataggtatatagcatattataaaaatgatggagagatatattaaaatattatttgaattaattgggatgatgatttaacatgcttgcattctaaagttctaaaatttaataaattatataattatagataatatagcatgtttatatgatttttaagatataataattgttagtagatgacggcgttgcgtctttgcatgctgaattttaggatttagtgggttataactttatagtcgatgtttaaaataataattgttagtggatgatgacgtgtggcatttctgtatgctgagttttaggatttagtgggctgtaactttataataagataggatcagtgtaagattaattaagtattagagtaactactgtaaatttataaactttatttgattttttttaaaaaaacttttaccgttaaatattttagagaacagacaccggacgcttagtaatttgaaaaattaaacgtgcttagttaaaattgagaaaacagataatccattaatgtgattagaacttagcctaagggcttgttctgatgggtggtttggcagaaattttggtggcatgccaagcgagataacctattaaggcaagttctaagcacaaactctaaagtgacatgtatgtttaaatgatgatgtagagaagagaagagaagagagaggggatgagccacctctcatgtaaggggcaaaacttaaagaaacatgagaaaatgagatggctgattggtgggactagtgtataaaatgcaatgcatttatataagttaattttaattttttagatggatgatgtggataaaattggaggtgactaccacatctattgtaaaacttgccctaatcaagtactccatccgtctcattttaggtgcagccatgatttccctgtacagctttgaccgtccatcttatctgaatttgtttttaaaaaaaaataaaaaacataagtcacgtataaagtactattcatgttttatcatctcatgacaataaaaatactaattataaaaattttcaaataagacagatggtcaaagttgggcacggaaacttacggttgcacttaaaatgagacggaggaggtattaattattaaaaacttgaaaacaatatttatttgatttttgaagaactttgatatagaaaacttgtatatacaacacacgatttagctatataaaaaatgtggcaataaaatcgagtaagctataccgatatgtgagatggcgaaaaatactgagccgtatacgttgaccaagaacagcgatgcatgtcgccgtattattatcatgtcttcgtatatgttgtcaaatatatatatatatatactagtgctctcttccttctataatatagcaatataaagtccaatgatatgctataacgaatctagatatgtcatatgattctatgctactgtattatgggacgaagggattagcaaattatggtttagttggccatatatagcttgacaccctgctcagcgatttgatcaatctggacatcgcgcttaaaaatcgaaaggaaaagagaaaataagcggtcctgggcgttgtgctggtttggtacggtggcaccaagctgggccgtacaaagccactggtgtgggcctgatcgttcgcccatcatgcagatcgctctggtgtttgcgttgcctagtaatcgtacacgtgtaatacgttttccatatatggtaaatcgcaagaaacatatgaataccctgaaagtttattgtgttttccacaataaatgtcgcatgaaacatacaaatacacaagtttaagaacaatatgttctaacatgatctagcctactttggtaaccccctcttggacacttgttgtggaggtgcaaagtagacaacattacaaaatggacacactttttcacaacttaacaaacacttgaaaggctcaaagcaaaagagttgtcttcaggtgcattcaagagaactcccctaagtaagagaaaagaacacaagtatctacacaattgattcgtgtcatccacaataacttcaaatgtaaccctcacaatctgcaatccacaataacttcaagttgacatggatattttgagctgcattaaaaaaaaacaaaattaaccaaagaatatcactacttggagaaaaaaatgaaaactaaaccaggaacattgaaatactctcaaactgaataagtatttgtacaatttttggaaaagagtatcacatgtgttgttagacatacatttttgaatgagcataaccgatttttccaaactccagaaatttctttcagtctaaataaagttgcaatagtgaaataagttatatggtagagcaaaatgttagggtatcaaccaaaatggttcagtttgagtctagcagaaagcgagtttcatgccctcattgtaaaatcaaatacaaatgttatacttccaatacctgaagaacatttttttcctaaggatggtaaaaagcctcaacttatgcaagatataaggtggcaggcagatacgattttacaatttttatttttgaactttgaagaaagatatgtaaaactaaaaccaagtcataaaacttaattctgtaactaaaatataagtgttaattttaaagggctacagttcaagaatatccaaatcagataacataatgcaatatgctatatatcctaagtgtgaggtaataaaaataaatcagataaaaccatggaaacttttgcttgctgagaaaaccaataatttaaaatagcatccttaagcactcatatcatcaatgatcctgtaaaatgtgaggcacatgatcttctagtagcagattagaatagaaaagactgttgcactgaagaaaatgttgatacctggcctcacacatgatgtaagactgcttctttgttaaaaaaattgcaaatgttagtttgcacgtggtaaaaaaaggttctagcagttttttatagggatacaaaaaaaatgaaaaaaaactacatttggcagtttttaataaatattttgcactgaaggaaatcatgaagttctacataatttagatcaattaagtagaccaaatacaaattcttcttgttcttcatgaacaacagtgcagtataaatgacaaaaccaataaacatttgaactaaaattgacacagctacagtcaagaggtatactaagcccctctctcaccttttccttttgttttccttattgcaacctttgcttctgtctagaccagatcaagagagcaacctagattaatttaacagaaaaacatcccacaactgatgtaacagaaagaataggcaagcagataatccatcattgataaatgtatgaaatcaccatgttcaacctacaaaagaaattttgtcaacaagaatcggagatttctgaaattaattaccacactggccatcaaagccaagtagagattgctaaataaaccagccaccgccaagttgtgtttctgcttctacaaagtatatatgccaagtaacgcttctgcttctgcaaagtagaggattctttcacaagtgattggtcagctttagggtcattccaaaagactggaatggtgtgtttgagaaagaaaacaaagcactgcaacggttacattttgcctaaattttcagattaaactgcaggttcatcataatagttaatagagaaatcgttattgtaatttacatacagctgttgcaatctacagtctgaagtgagggttcacctgggtgggggcagatcctccaccatagccatgtcgcacaccccagctatgttcaaagagaggaagcgagtggccgggcgattgctgagagagcatcagggtgcaggcaagccggttgagtggtccgggtggcggaagcggccggatccgctcagcctcgagccctctacggagtagggctttgactccacgctgctcctgccataatatcccaaatgttccggcttgagaaaatggagacaatgagttgcagatcgagattatgtgtcatcacaatcatgcgagcaacagggtgcaggtgcagttgctggtggcctgtggttgatgtcagacggtgtcaggagcagagaacggggaggggccagtaggtggatcagatgctggatcggcttggcctccctggcaggggcaacctcgacggatgaaccaatcggattgactcggactcggcaacaggcgcgaggaaccggcgacgcgatagggtgcgatcggcggggcagaggttgcagcggcggagaaatcgcgatggagcagcggatgggcggagaaatcgtggtggagtgcgcggcggcggcggcggcggatggggaagacctcggctccatggggggctggggaagacctcgcctccggttcagtgcgtggcggcggaagaaagcgacgacctcgagggtagcggtgcattgcggcggcggcggcggcggatggggacgacgtcggctcctgctgcggccggccgcggcggatggggaagaccacggctccggcggtggttgggaagacctcgcctcggttcagtgcgcagcggaggcggtggagtgcacggcggcggcggcggaatgggacgacgacgcgaggaggagcgagtcgcgtgttaagagggtgatgaggcgtattctttgcgcggagaccgcgcgtggagagggtgaaatcatgcgtcggagatgggtggatggtacggattacacctgaggtgcgaatggacggtagggatttaacccgttgatttggcatgtaggggtgaactcttttttatattagtacttcttccgtcctaaaatgtaagtatttttgaggttagcacggatattaagaaaataggtgagaataattaaagaaggtgtgtgattggttgaaaagagaaagtaggtgaaaaagaatggttgtgattggttgagaggagaaggtagttagaaaaatagcttcattttggaacaaagtactgtgctagaaatagctatatttttggacggaggtagtacatatgagtgttgacgcgttgccgtatttgttaatctcatgcacaaagcaagcagaaatacgtggaaaggatacatagaagaaagaaacaagtaaaaataattttgcaaaatctttggatagataaacatagtatgggttcaacttaaaaattgagtcgggtcacatcgatattctatacttatacaaaattaaaacaataattatgaaaagtaaattgtataaataatataaaagttggataaaactttataatcctgaaaaatattatttttacaatatttattttctcctaatactacaatctgtaatgaattatacacaattttttaggttttatgaagtcgctacaattttaagaaaacatacattttctctatttttttcctaatatcgtcaaaattaaatagtatatcctgaatccaaaataattattgacaatcaaatcctatttcagttcatttctacaaacacaattaaaatccactaacatgtccttttaaaaattaaaaggctatgtcctttgaaaggttatgggcattaaagaactcatgtaaagtaactttttatattatatgtagtttgcacgagtataaactagccggcgcgtcaactggcacgttgattttcttgtggagtactaattttcttccatcagtttagaattcttctgttttccaaagaatctgaagatcatttttttttctagaacatgaaatctggaaatacttgcgaaaacaacataggtcacgtcgcttgggcttcctgcaccgatgttcccagcgctagtctcgggccgaacggagtaaaaactaaaacgctgcagaattgtttagtaccacctcgcccagccacggtagaggggagactgaggcgctgtatataatgcgacccgatactgtcttgtaaagcatacctttctcggccttttgactaagatcaagtgtagtatctgttcttattagtttaatatatgatacgtgggccatgtgtccacggatattaaattagtattttgtgagggagggcccaccacggtagctcgctactggggccctcatgtgtcgcctaggctttgcactgctgccttgtctcggtgcaccccaaccaaatctgtactttaaattttttcctaagcttttgctcactaatttggtttaatcattgaccaaattaaactgactaggaatgaagtcattgacgaatttttgacttgacttttcagtgagtgattttaagatttatttgtccaaaccgtgagtgattttggttccaatttatgtagaaaaacaaacgagagtctgtttggtaagcgttatttcgaaatggcgacttgctccgctgcttgcactcgcccagccatcgtcgtcatgtagccggccatggcgcggcggcgcgccgcctcctctgtctacctccctggtcggccgccacgcggcagtgtcgtgtgatgcagtggtcggcctataagcggtgggatctcgaagaagggtaagatatgttcttgtctcgcgtgggattttttttgcttggaaaatctaacggtagccgtggtcgtggcagcggtggtgctgtgggtggcggcgaggagtgcgtcgccggtggtggtgatcgccgtggtggtctacaaggtgaggtccagtctcctcgtgttgccaccaccgcctccgccggcgaggccctaggaggagcccagcgaggaggtcctgccgcctccggagccggtgcaggtgggggagatcatggcggaggagttgttgcagtacgacaggtccaaccctgagaagccgctactcatggcgatcaaggggcggatttatgacgtcttccagagcaggtcgcttccgttaacaatgcttctgttactctcattagtcattacaatgctttttctgttactctggccctgtttagtttccaaaacaaaaatttttacgctgttacatcaaatggtttggacacatgcatggagtattaaatacaaaaaaaaaacaaattacatagattgtgtgtaaattgcgagacgaatcttttaagcctaattacaccatgatttgacaatatggtactacagtacatatttgctaatgatggattaattaggcttaataaattcgtctcgcagtttcttggcagaacttataatttgttttattattagactacgtttaatacttcaaatatcaaatatgtgtctgtatatccgatgtggtaaccaaacctaaatattttccgcaactaaacaaggcctctgtttcgggtatggatttccatccttgtttgcacgtcatctaaatagttataaaaaaatttgaaaaaaaaattaacaacatagattaatatgaaatatatcactccacaaacatgtaagaccaaattcgacttctacaagttgcaataaaagaaacaaattaaactgaaaatagttaacgtacattcgcatatatatttgttatttttattacaactaggaaggtagctcgtgcatttgtgcgggcatgtatcgcgagggcattcacgcggattcgtattttttaagaaacttataataatagaatatatatcaactcgatgacacctaccacgctttaaaagtactatttctctacaaattttcttcatcggcattgcttgcataatttttccaacctatctttagctttaaactatacaatatttattcatgccggtaagaaattaattataatgtttctcattatcttgcaggaaggttgacttaatttgtttaaaacaaatttctaacaaattaagtgtaaattaaaaataaggtgttttccttgcaagttgaatgtttacttgctctatttttgaacaaatcctagaaaattattattactaacaatgagttttatttgtaccataaagctgcccctctttctaattggttcatgctcacacaatttgttacattcttacatatatatgaatgaataaagaaaatatatccacatatcttgtttccatatgatatgtgatctatagaatttatttaaatacgtattcaacataagtgctaaaatttaaattttatagtaacaaatataacttctaaaccaactacttgctgccttagtgcggcttgtatatatgcaataatatattaataaacacctaagtctatggtatacggtacatgatagattgaattacattattagtatataaacacttaagatggttatggcaatagaataggcaatgtttgttccaatttaagtgaaaatatgaagcatttttaatgaatttgagatattttctccaattggttcaatctagtgaactttctttaggagtcatatatattctcccattggtaatatggatcatgaactatttattcacttataaataaaataacagttcaaacaacctgaaaagttagttgtatatttttgttctttttttttgaaaacatcacagcaggggaggcccccgtgttaaaaaaaattattaataatagaaagaaccaaaaagattacaacaacctaatccagtttaaaattacatctttatctctctcgttcaatctaaacaacaaaagaaagagatcacccttaagggaatatatccaagaagccaaggaaggaaaaatattctcaaaaagtatatttttgttcttaataatcttttgtctcaaaatttgctttctaaggtatagcaagaaaatgggatagggaacgtgatttagagagagggagtgaataataagagaggggacagaagatgggagtaagcatgtctgtgtccatgtataggccagggtggggtttaggacatgggtttttcttcattaagcttggttgaaaataatgggtttatcacattaagtaaaaattgatggctagatgttttttttttcatagaattcgtaggaatctttcataatttattggagcgtcacatggtaggttaggaatgctccatggatacgatactatgtaactaaaaagcatgttaattatgttttacaaggttattaatgtttaagtggtggcttagtctactaattttgaattatatagaaaattcttaggagtactctacggctgcgctcttttcccctcttttccaaactcacttcccttattttccgcgcgcacgcttttcaaattactaaatagtgcattttttgcaaaagttttttttatgaaagtttctttaaaaatcatattaatccatttttcaagttttttaggctaatgcttaattaatctcactataatcgtgttctttgttccgtgtcgagcggcaaggttgggaaccttgcctcctgaaacagcctaggtcgctaataataataatatatcaattttaagttaaaatagaagtcaatacgggtcttaaattgataaaattatcaatttagttgtaaatacaatgatgaatagataaaaatgagacatactaccccatctcaaaaaataccaatttttagctttgaacctgtacacacttatccagatacgtagctaaaatatgctatattatatgatggagggagtataattttgaagttttagctgtttaaaattcattatcccaaaattttatctgacactgctatatgtaaaaagaagagagaaataggagggaagcagaggttagagatggagtgtatttattactaaccggcaagcaaatcaatcagtgtatatataaagagaccacaggtacgcgtgcataggcgtgtgaataacaaaattcaaaagccaaaagtgaattaatcatcagcgcttcacatatgctgaaaggtggagtcgaaggaggcaagggcgtatacgaaatacgagcaggagcaggatgaccatggcgatgctctagggaagcttcgctctgtgtggccccgagctagcagttcgggcggtgtttgttttaatcttaattaagttggatggctaaaaatattggaccaaccacttacgtaaaaattgagggattgatttttactaataccacgtgataccttgagagcggtttaaggattaccacgtggtagtgtgagagtattttaaggaagtttaatggacttttaatatataatagaagatagatttgtataagttaatttttaacttagatgttcgtggagtgatatattttatattaatctatcttactatttttttaatcttttttatgattatttacgtgatatgcacgaaacaagaggatatacgggatgaaatcaccttccctttgtttaacatacactactggaaaactgatcttcgctcggtcgccccaaaaccataatagtcccggttataaaaagaacctggactaaatatgatctttagtcccagtttaaaaccccatagccattctacgatctttagtcggactaaagatgatctttagtcccgattcatcccctgtcagtcccttgtcagaggggcggggatctttagtcccggttggtgtcacaaaccgggactaaagatcaccactttagtcctggttggtattaataaccgggactaaagatctcctatatctttactcccggttggtaataccaaccgggactaaaatcacgcgtagtatataatccctattccctgtcatctcccccaaaaccggcttcaatctcctcaacaaccggcctctcctctcctcagatccatctccctctcctccccttcctcctcccatcccagccctctcctccccctcctccattcctgtcacaccccgaagttctcctcccaagcctaaatttaatttttaaaacgaccccaagaaaatgcaggtgcaaatcaagagaaaaccctaagaaagtaatgcaaataataatcggatttggcatgtggaatttttcttgagttctacatgtcgaaattcattaacaggatttttagtggaattttcagagctctagaaataatttgaaccaattaaaattgagcaagcaatattttaattccagggaaaatcctttttcctttttctttttctttttcctctctttttcctcctttttttcaaatgggccgtcggcccattttttcccttccttcccccctccctgcagggccggctgcaggccgaggcccagccaggccgccgccgccctcctctcccggggtcgccgacaggtggggcctacctgtcgggtccttcccccacctccggccgacgccgagccagcaaccgccgcgcccgaaaccgccggcgcgttcacgccttcgtcttctccgggccacgtcgaccacgcccgcgcgtgcgccgcgttccccgcgcccactcccctctctctcccgctcgcacccgcgcccgagatggtcgggattcgattttcgaatctcctcccccactcccccacgtcagccggcgattcccgcctctcccggccacgtccggccctctctctccctacttaagctcccccgtcgctccctctcgctttttccccatttcgcctccctctcccgagctccccatcgctcccgcgccgtgcgcccatccgccgctgctctcccgctactccggtcgcctctagccgccgctacactcgccgccgcaccgcgccgtcgccgctgttgggttcgcgcggccgaggtccacctcgtccacccctcctccgtagagattcgccgccgaagccccatccccgtcgtgcgctggaggttccggagctcgtcccgccgtcgccatcgtcctccgtcgcccgccgtcgtcgaccgttgtcggtgaggcctctcctcctctttctctctctcccgcaccgtttagccgtcgcgccgccgcttagccgcgtagctgccgcttcacctctagccgccgctctccgccgccggtcggtcgccgtcggccgccgtcttgcgccgctgccgcatgtgcgccgctgccgcatgtgcgccgcgccgtcgcgcgccatggtcgccgggccggtttgcgccgtgcccgcgcgcaccggccgcgagctcccgccgcaagggtagatcggggccatcggttcggccgccgcgtggcgcgccgctcctccccggtccgtggacccgatccgccgtggaccgccctccccgagccgctgaccggtggggcccgcttgtcggcgcccttcctccctccccgagccgctgaccggtggggcccgcatgtcggcgccgcgccccgccttgatgacgtcagccctggaatatattgcgcaataaatgagttaaggtttttcttgtatagtaataaaaacagtgaatcttctaaaattcataactaattcatccgagctccgtttaagcccattcaagtctcagtaaatcaagaaaaatgtgtagaatccattaaaaatggttttgttccctgtttcagtagtcttatagcctgtttgcaatgtttgctttgtatgtcgctagattccgattcctccgacgctccggtgtacttcgagatagtcgccgaggttcctccagcagcagagcaaggcaagtcatgcttgtcacttgaacatgttgatcctatattgcaaatgctctattgttttctttcaaatactgcatcgttttataatgttactatgagttgtttacctattgtcatagccatgctattgatgtaccatgtttctttgtcagcttggggttataacatgattagagtttggactagggattgcttagccatgcttagttcaactagttcacaatggggaaaaatcctattaatgtttagactgttggttctaatggtttgttggattagtaacaccgctttggtgttggttaattaaaataaatcacatggtgggctgtgggtgcatggttttgctggtcgcacccatggcagttaaggaccggttcgcgggatgccctggaagaacttatcgtacttaccacaagccagcgtgggcaacggctaggcttgtagcgtagctttcctctagccgacgcatccaggcaagggtgggcgtgatggagtttggatgggccctgcgacggcctatgcggctttcggattcacctaggcacgagaggggactgcccgctgccttgcgaggagtgggggtgaaacctgaggtgtggtgtgcttggttagagggggttatgcgaagggtcctgtcacggcctctttccggtatgtcgtggtgacatgtcggcgcacagaaacgtgtcgtggggctgtgtcttgtgggtacagttgtacacctctgatcagagtaaaactattcgaatagccgtgcccgcggttatgggcggtcaaccagattcaccgtgattagtctcaccttagtgtaatcttttgaatttggatagtttaggtggatggctgggcctgtcgcaacgtgggatagcgttggacagcggatgattaatattaattaattattacaactgtttaaatctttcaattcctgtttataaatgctcgctttatgcaaatgaaccactttagctcttctttgatgattccctgcaccatacccctattccggtatgacttgctgagtacagtgggtagtactcagtcttgctctacttttcccaaccccagagttcgagttcgggtcagatgaaggtttctccgaggagtaggctttgtccgtgccgtcgaggatgcctgtggagtggtgttcccgctgcagttttagtcaaggcttagctcttgttgtctttcttttcttccgctgcatttatgtaagacttttatgatgtttgtaagatgtggatctgaatgtcaacattgtcgtttgtgtaccccggccggtcctggacggggattttaatgcacattctgcttgaaattctattcgggaatttctgggcgtgacaagttggtatcagagccgaccttgaccgtaggacaagccaaatggaaaaacctaagagccctctgaatccttttcattgcatatgttctttgcaattggatttgttccgggaaaattgggatctgttcttgtggttcaagggaaaaatcttggtcgctcgtttaagtgagatttttcaaaacgagtcagtctagggttttagtaaaactgttgaggtttattcgtcagtcagttgggatctgatgggtgaaatgcattaggtcatagctcaggaacatgggttgcaaggtatttatgctttatttgttattattagtatgtatctaatttctcattattttatcgttatgtgagtctgtcttatttattcgctctcatgcaaaatgatctatgcataaaaatttcgctcttattcgattcccttatttgagtcttttattgctttatttaaattctcaaaacgaattagcagaggtcaagaagcaggttgatgagcagctgcagaaagggtacattcgaccaagtacttcatcttggggtgctccggtcatttttgtggagaaaaaggataagacgaagaggatgtgcgttgattatcgcgcactcaacgaggtcactatcaagaacaaatatcccttgccgcgaatcgatgatttgtttgatcaactgaaaggagctaaagtgttttctaagatagacctgcgatcaggctaccaccaattgagaattcgggaagaggatattccaaagacggccttcaccactcggtacgggctatatgagtgcacggttatgtctttcggacttaccaacgcacccgcattcttcatgaatctgatgaacaaagtgttcatggaatttctggacaagtttgttgtggtgtttatcgacgacattcttatctactcaaaatccgaagaagaacatgaacaacatctccgtctagtactcgagaagttgaaggagcaccagctatacgccaagttcagcaagtgtgacttctggttgacggaagtcaaatttctgggccatgtcattacagctcagggtgtggcagttgatccatcgaacgtggagttggttaccaaatggaccccgccgaagaccgtgtcgcagattcgaagttttcttggacttgcaggttattaccgccgattcatcgaaaacttctccagaatcgcccgacccatgactcagttacttaagaaagatgagaagtttaaatggacagctgagtgcgataagagttttgaggagctcaagaagaaattagtatccgcaccagttttgattctgcccgaccagatgaaagacttccaagtctattgcgatgcatcccgccacggacttggatgtgtcctaatgcaagagggcagggtggttgcgtatgcctcgcgacagttacgtccacacgaagggaattatccaactcatgacttggaattggcagcagtggttcatgctttgaagatctggaggcactatctgattggcaaccgctgcgaagtatatacggaccataagagtctgaaatacatcttcacccaaccggacctaaatctccgacaatgaagatggttggaactaatcaaagactatgacatgagcattcactaccacccgggtaaagccaatgtggtggcagacgcattaagccggaaaagttactgcactgccctatgcatcgagggcatgtgtgaggaattgcggcaggagtttgagcatctcaacgtgggaattgttgaacacggttttgtagccgctctggaggcacggcctacgctcgtggatcaagtcagagcagctcaagtaaatgattctgaaatagaagagctgaaaaagaacatgagagtcggaaaagcccgggatttccacgaagatgagcatggcacaatctggttgggagaaagattgtgtgtacctgacgacaaggaactgaaggatctgatactcaccgaggctcatcagacccagtactccattcatccaggcagcactaaaatgtatcaagacctcaaagaaaagttttggtgggtcagcatgaggagagaaatagctgaattcatcgcactctgcgatgtttgccaacgagtgaaggcagagcaccaaagaccagcaggtttactccaacctctttaaatcccggaatggaaatgggaggagattggaatggactttataacgggactgccccggacatcgtcgggtcatgattcgatctgggtagtcgtggatcgactcactaaggttgctcacttcataccagtacataccacatatacgggcaaaaggttggcggagctttacctttcgagaatcatgtgcctacatggagtacccaaaaagattgtatctgaccgagggagtcagttcacctcaaaattctggcagaagctgcaggaagaattggggacccgtttaaatttcagcacggcctatcacccgcaaactgatggtcagaccgagcgggtcaatcaaatcttggaagatatgttgagagcttgcgctcttgattttggtggagcttgggacaaaagcttgccatatgcggaattctcgtacaacaacagctactaagccagtctacagatggcaccgtttgaagctttatacggccggaagtgccgcacacctctcttctgggatcagacaggcgagcgtcaactgttcggaacagaggtattagcggaagcagaagagaaagtcagaatcatcagggaaaggttgaggattgcccagtctcgacagaagagctacgcggataaccgtcgaagggagctcacttttgaggcaggagattacgtgtatcttcgtgtcactccgctccggggagtacaccgttttcagacaaaaggcaagttggcaccacgcttcgtgggaccatacaaaatcctggaacgaaggggggaagttgcttatcagttagaacttccatccaacatgatcggcatccatgacgtgctccacgtgtcccaattaaagaagtgcttaagggtacctgaagaacaggctgattcggaacacattgatatccaggaggacctaacatacgtggaaaagccggttcgtatacttgataccagtgaaaggagaaccagaaacaaggtcacccgattttgccgagttcagtggagtcatcattcagaagaggaagcaacctgggaaagggaagatgagttgaaagccgcccatccgcacctcttcaccaacttctccgaatctcggggccgagattccgtttaaggggggtaggtttgtcacaccccgaagttctcctcccaagcctaaaatttaatttttaaaacgaccccaagaaaatgcaggtgcaaatcaagagaaaaccctaagaaagtaatgcaaataataatcggatttggcatgtggaatttttcttgagttctacatgtcgaaattcattaacaggatttttagtggaattttcagagctctagaaataatttgaaccaattaaaattgagcaagcaatattttaattccagggaaaatcctttttcctttttctttttctttttcctctctttttcctcttttttttcaaatgggccgtcggcccattttttcccttccttccccccctccctgctgggccagctgcaggccgaggcccagccaggccgcccgccgccctcctctcccggggtcgccgacaggttgggcccacctgtcgggtccttcccccacctccggccgacgccgcgccagcaaccgccgcgcccgaaaccgccgccgcgtccacgcctccgcctcctccgggccacgtcgaccacgcccgcgcgtgcgccgcgttcccctcgcccactcccctctctctcccgctcgcacccgcgcccgagatggccgggattcgattttcgaaatcccgctctctctactcccccactcccccacgtcggccggcgattcccgcctcttccggccacgtccggccctctctctccctatttaagctcccccgtcgctccctctcgctttttccccatttcgcctccctctcccgagctccccatcgctcccgcgccgtgcgcccatccgccgctgcctctcccgctactccggtcgcctctagccgccgctacactcgccgccgcaccgcgccgtcgccgctgttgggttcgcgcggccgaggtccacctcgtccacccctcctccgtagagattcgccgccgaagccccatccccgtcgtgcgctggaggttccggagctcgtcccgccgtcgccatcgtcctccgtcgcccgccgtcgtcgaccgttgtcggtgaggcctctcctcctctttctctctctcccgcaccgtttagccgtcgcgccgccgcttagccgcgtagctgccgcttcacctctagccgccgctctccgccgccggtcggtcgccgtcggccgccgtcttgcgccgctgccgcatgtgcgccgctgccgcatgtgcgccgcgccgtcgcgcgccatggtcgccgggccggtttgcgccgtgcccgcgcgcaccggccgcgagctcccgccgcaagggtagatcggggccatcggttcggccgccgcgtggcgcgccgctcctccccggtccgtggacccaatccgccgtggaccgccctccccgagccgctgaccggtggggcccgcttgtcggcgcccttcctccctccccgagccgctgaccggtggggcccgcatgtcggtgccgcgccccgccttgatgacgtcagccctggaatatattgcgcaataaatgatttaaggtttttcttgtatagtaataaacacagcgaatcttctaaaattcataactaattcatccgagctccgtttaagcccattcaagtctcagtaaatcaagaaaaatgtgtagaatccattaaaaatggttttgttccctgtttcagtagtcttatagcctgtttgcaatgtttgctttgtatgtcgctagattccgattcctccgacgctccggtgtacttcgagatagtcgccgaggttcctccagcagcagagcaaggcaagtcatgcttgtcacttgaacatgttgatcctatattgcaaatgctctattgttttctttcaaatactgcatcgttttataatgttactatgagttgtttacctattgtcatagccatgctattgatgtaccatgtttctttgtcagcttggggttataacatgattagagtttggactagggattgcttagccatgcttagttcaactagttcacaatggggaaaaatcctattaatgtttagactgttggttctaatggtttgttggattagtaacaccgctttggtgttggttaattaaaataaatcacatggtgggctgtgggtgcatggttttgctggtcgcacccatggcagttaaggaccggttcgcgggatgccctggaagaacttatcgtacttaccacaagccagcgtgggcaacggctaggcttgtagcgtagctttcctctagccgacgcatccaggcaagggtgggcgtgatggagtttggatgggccctgcgacggcctatgcggcttccggattcacctaggcacgagaggggactgcccgctgccttgcgaggagtgggggtgaaacctgaggtgtggtgtgcttggttagagggggttatgcgaagggtcctgtcacggcctctttccggtatgtcgtggtgacatgtcggcgcacagaaacgtgtcgtggggctgtgtcttgtgggtacagttgtacacctctgatcagagtaaaactattcgaatagccgtgcccgcggttatgggcggtcaaccagattcaccgtgattagtctcaccttagtgtaatcttttgaatttggatagtttaggtggatggctgggcctgtcgcaacgtgggatagcgttggacagcggatgattaatattaattaattattacaactgtttaaatctttcaattcctgtttataaatgctcgctttatgcaaatgaaccactttagctcttctttgatgattccctgcaccatacccctattccggtatgacttgctgagtacagtgggtagtactcagtcttgctctacttttcccaaccccagagttcgagttcgggtcagatgaaggtttctccgaggagtaggctttgtccgtgccgtcgaggatgcctgtggagtggtgttcccgctgcagttttagtcaaggcttagctcttgttgtctttcttttcttccgctgcatttatgtaagacttttatgatgtttgtaagacgtggatctgaatgtcaacattgtcgtttgtgtaccccggccggtcctggacggggattttaatgcacattctgcttgaaattctattcgggaatttctgggcgtgacacttcccatccgatctcctcctcccccttctcctcttcctcctcccatcccggccctctcctctccactactacagatccggacttcagtgacgggtcaactgtgacgggccaacgcaactcgtcaaagatgacggctaccagagaggacccgtcacagatgtgaggtcatctgtgacggcttgcacttgtaacccgtcacagatcgtctgtgatgggtcacaaccatggctcgtcacagatgacatgtcatgtcatgtcatctgtgacgggtgtagtattatgaaccatcacaaaagagaccactcatctctgacgggtctttaactaacacacgtcacagaaaacgttatctctgacgggtggtagttatgacctgtcagtgatgagtgaaaattcaaatttttaaattttgcaaaaaacctcggattgagacatgtcctatataaaagttatagctctcgatgatatccacaactttataactaacaacatttctattagagatcgtttacatccctgaacatgcattacaagtgatcagatctacttttaaaaacaaaattttgagttttttttttcaaatgacatggatggatacatgctccgtatcaaagtcatagaactcaaccagatctacaatattataattgaaaatattttcatttcacagagtttacatgttcaaaatacatgttataaagtgagatatattttgaaaaatgaaattttgaattcttcaaacaacattggatgaagatattttctatgtaaaagttataaaacacgatgagatctataattatttagttgataatattttcatttgaagtcatttagggtgttaaatatatgttaaatgattcagacaagcatagacaaaataataacattgggtgcatagtcaatatgtgctgagtaggtgagttggtaagggagctctatatggaggttgaggtcttgagttcgaatctcatgtgtagcatacaagttatattgcgggaaaaattgtgaatttgttaggtagtgatgtgtaaccatgaataggatggctagtaaaattcaaaatatttttttgaggtttttttgttgcgtttaaaattcaaaaattatatttcttgctttgtgaatttgtaggtagtgatgtgtaaccatgtataggatggctagtaaaattcaaaatatttttttgaggttttttttgttgcgtttaaaattcaaaaattatatttattgctttatcatcactaacgtgtcgtaagttacaacccgtcagagatgagtcatcagtgacggtcaggtagttgcgacacgtcactgataactcatctgtgacgggtgacaagttttaacccatcaaagatgacttatataccggtcagagatgggttatctgtgacgggtgcccgtcacaggtgattttgtcatcagtgaccactaatcactgaccaagaccaaacccgtcaaaggtgagggtttgggcccgtcagagatgacctggtccggcgtagtgctccctcctcccttcccatccgatgcccagcgagggccgccgcctcctcctcctcctcccttcccgcacgcgtcaggcggggccgcgcccggcggggccacacgctgtaggcggccggcggggccgcacacaggccgcgcacgggccgagtagcgagtggtggcaggcggcgctaccggcatccattctttttttcttttttttacaatttgtgattcagcgagatgtataattttgtgatttgctgtatggatctgagatgtataatatgtgatgtatttggtctgtgtgtaatttttttatgatttgtgatgtatttgatttgtgtgtacaagtagcttaagatttttgatgtgaatgttttgtgatgttactttgatttggggtttgatttgggaatatgcatcccactcgatttgggagaaaatacagggattaaactctggctaaaaaataataaaaaaaagaaaaggagacctaatgggactgccgctaccctctctttagtcccggttatttcacctgggactaaagatagtgatctttagtttcggattcatagtcccggttgaataaccggggctaaagggggttacgaaccgggagtacaaagggcttgtttggttcaataccctaccaaaatgttggtagtgccaaaacctaggcaagttttggtactaccaattttttggtggggtagagttgtatttggtttgaggccaatttagaaccaagcattgagtagaatatagaaaatatcaaattgggcattggcaatgccaatgatttggcttcaaaccaaaattaccagatacactgttcaaactaccaaagtattggtagggcacgtttttggcactaatccaaaacagcccagagggtttctccactagtgataacaagaaacttgtttagagcgtacctgcttcccaagcgtgtcgcccttatccggctgcctcgtgtccagacacctggcacaacacacatcgcccatcttacacgtgcacatgctcccgtgtcacctcctcaacacttgcacgagttcttcgttgcttgccgctctataaatttccagcttcctttcgatcctcttcaacaattacaataatcatcaagcttcttcttatgttcatccaaatccacagccataaaagtagccatacttgagtttaggtagccagcatgcaggccgggaagaacgcgatgcagtcgaccaaggaggccgcggcgaacgtgggcgcgtcggcgcgcgccgggatggacaagtcccgcgccgccgtgcagggccaggtggagaaggcgacggcgcgcaacgcggccgacaaggacgcggcggaggtgaggcggcaggagcgcctgcaggccgccgaggaggagaagcagcacgccatggccgccaacgcagccgccaaggagcgcgccacgggcggcgccggcgcgtaccacccgtcgcagggcgcccccggggtggacccgcgtgcggcgcagccgacgggagggcacgtccaggacggcgtcgccgagagccggccggtcgggacggccaccggcacggcgaggcccagcgccgcccacaacccgcacgtcggcagcgacttctcgcaggcccacggcaccggcggccagtaccagtgatctcattctcatatcaatgtgacaatttatgatctactagtagctgttcatcagttcatgtagagttcacttcgctactatgagttgatggggaataaaattgtacgtgttagaagtggtatcatgttgtgggagatgcttaattatgaaataaaacagagtactctcttcgtttcacaatgtaaataatgtaaatataagtccttatagtattttttatattcatattgatgttaattttctatatttatattgatattaataaatttagattaataaatttagagacatcaatagtacctgaaaatatggttacttcgatatgtgtatgcttgattgtgtttgttcatttctatccaaatatgactacttcgatgtgtatgattgattgcgttcgttcatttccatgcactcagtgacgtctgtgtttaataattactttctgatggataagcagaggtactggatttggtactagatttatcccgtgtgggaagtttttatatgttagtcgtgtgagacgtactccctccgtccttaaaacctaaaaaaagacagcttatttttagtctaaatttagtctaaaaaaaggacaaaccttgttttcgtgcttaacgtttaaccgtccgttttagtccgtcttatttgaaaaaattatgaaaaaaataaaaagacaagtcacatataaaatattaatcatgttttatcatctaataacaataaaaatatgaattatagaaattttaaattttatataagaccgacagttaaaattggacatgaaaacccagttttttttttcatcagacggagcataaaggatgggttttgcatttatttttctttttatttttattttttttgatggagggagcatgaaggattctcgaacgtacgtaaactactacgtcctactaaatgagtagtcaaagtatatattgggtatctgttcatctagacttagatcttgtgttacaaaattgggtgggtatcttaaacacgggtcttgtacattacttaaagccttgagatcatgtagtacgtctctttgactcttgaagatatagatcttttacccgttccttcaacatatatgtacatatctagaataggtacgtatgtatatatttttatctagaatcggtacctttacttcggtttatgtttttatctgttatcggtaccttttagttttttattacagctgtcgattttttattttgatattttttttgtcacgtgaaggtgggaatcttattttatgttgctcataccctgatgattcagggatagggaccccagttcccattccttcaacatatatgaacatgtttttatccaacatatatggatatgtttttatccacaagcggcacctatagatgtttaaaatatttaaaggtgttggttctttattgtttttaccatgtggaggtgggaaacaatgttaataggtgttggttttaaaaccagtatatatgagttgtttcttattagagcttttgttgtagtgatcatgattgttacggctttcataaggcggtaaggcgtgctcagggctcaagacgtctgttccgccttaccaaccgtgcataaagtgtcaccttagggcttgaggcgtcactaaggtgtgtgcaagacgttgcaaggagctaggtaaggcggcatgaggcgacgccctaggcgcgaaagaagagagagatgcatctggagatctaatctcatctggtggcggcatccttcccatctgatggtagcgtctttcccatctagctgcaacggtaccctcgatggccagaaccacccaacggcgaggagcggcggtgttaggggaagagggagccaaggaggagcagaggcgggcaagtggcaggggaagagggagaagtggaggggatgaaagggatggaagcgacagtggagcggaggcgagttggtgggtgcagatgcgattggggactaggatagatcgatagatatttgttagcatcttccattttagtccttggactttgtagatattacggagaagtccttcatttcctatttttgtcttccattttagtccttggactatgtagatattacgaaaaagtccttcatttcctattttcatatttgcataaggcatcgcctcgccttacgccttaccgcctaaggcgtaatgcgtgctgggtccttgccttacgccttaccaccttaacaaccatggtagtgatttgaaaaacgagaagacgttaggtagtccaactacaactaccacatggtcctgcatcttagcaactggtaccatctaccaccgctgcgcgagagagaggaagagacaaagaatagagagggaggaagaggggaagaagagtaatgacaggtgggtcccatattttttaattaaataaaatgctgactggattgccacgcgtgcaccacgttggacaaaaccgctctggattgggtcgagggaggtaatttgtccggtattgaaagtttagggtgaacaatgaccgattttcgggttttggggggtaatttggacgatcgcgatagttcgagggggtaattcgtacttttcctaatactaatatcgactccacagtaattgtctttccatgatagacatgggcaagattacggtgtgctcggttcatcacacccttttttttttctaggggtctgttcactttatggccaaaattaaccataccaagttttggcgtttacaaaatttggaaagctaacaatccaaacattgccaaaaattgtttccactaccaaagtttggtaaatctaaaatcttcctctcacaaaaacttaaaaagaaactaaacatagcctacacttgtcaactttatcaatttttttgtagtgccaaaatttagtaactttaatttaggcatcaaagtgaacaacccctaagtctttatcactcttctagctgcaaggctactcttccggaaaactcaattcatcccggtatatcttcttatttttgcatgttacttaaaatgtcatcaaaaaatttgaaaaaaattagtaggatagattaatttgtgatatgtcacttcacaaatatgcaatttcaaattcaacatatacaagtagaaataaagataacaaatttgacaatgaatagaacgcgtaattcacggttaaatttgttatttttatttcgaattgtataagttaaattttagcttgcatgtttgaaaaaagatactcatatattgatctatttaaaaataataattttttaaacgacatgcacaacaagagaacgtccccgaggaaaaaaatccacttcctatactccgtgacatcagttgctatattatattcctattcctagtcggagttgtagtagcgtttcagttcgtacgtagagtccgagtcagcttccacatcgctcatatatatgccgcgtgtttcgtaaccgtcagtgaaacccttcgcgcgaagcacagcaaagcaaagcaaaaccttttttcccgccaagaaacctcaatggcggcggcgaagatggcggggctgacgccggggttcaagttcgagccgagcgacgagcagctcgtgcagttcttcctcctgccctacctgcgcgaactgccggtgcccctgggcg

SEQ ID NO: 10004 - DNA, 8009 bp, Oryza sativa
ggcccgatttccccggccgacgtggggaggtggaggtggaagaagaggcgggattcgaaattcgaatcccaccatctcggggtcgcgggtgagcgggacagggggttgaggggcgcgggaggggcgggtgtggccaacgtggcgcggggaaggtgggcgcgggcggcggttgccggcccgggggggagcggctggaggttggggaaagggctgacaggtgggccccacctgtcagtgcccgagggagtgaggggggctcaggcgagcggctgggccgtggccttcggccggcccagcaagggcacgggagggggaggaaatgggctggcggcccatttgggaaaaaggagggggaaaaagggaaaaagaaaaagggaaaagaatttccagggattaaatattgcttgtgctcgtttttaattgcttaaaattatttccagagctttgaaaattccactaaaaatcttgttagtatatttcgacatgtagaactcatgaaaaaattgcacatgccaattccgtttattatttgcattaatttattggggtttctctcttgcttttacaccgatattttctctaggtgatttataaattcaatttaggcttgggaaaggaacttcagggtgtgacaaacctacccccttaaacggaatctcgaccccgagattcggaagagctggcgaagaggtgcggatgggcggccttcaactcatcttccctttcccaggttgcttcttcctctgagtggtggctccactgaaccctgtagaacctggtgaccttgtttctagtcctcctttcattggtctcaaggatgcgaactggcttctccacataagtcagatcttcttggatatcgatgtgctccgaattggcttgttctcccagtacccttaagcacttctttaactgagacacatggaacacatcatgtataccggccatgttggatgggagttctagctgatatgcaacttctcctctttgttccaagattttgtatggtcccacgaagcgtggtgccaacttgccctttatctggaaacggtgcactccccggagcggagtgacacgaaggtacacataatcccccacttcaaaagtgagctctcttcgacggttgtctgtgtagcttttctgtcgagattgtgcaatcctcagcctttccctgatagttctgactttctcctctgcctcagttagcacttctgtcccgaacaactgacgttcgccggtttgatcccaaaagagaggtgtgcggcacttccggccatacaatgcttcaaatggagccatttgtaaactggcctcgtagctgttgttgtaagagaattcagcataaggcagactcttatcccaagctccgccaaaatcgagtgcacaggctcgcagcatatcctccaagatctgattgaccctctcggtctggccatctgtctgaggatggtaagctgtgctgaaatttaaacgggtccccaattcctcttgcagcttctgccaaaattttgaggtaaactgactccctcgatcagatacaatcttcttaggtaccccatgcagacacatgacccatgtagatacaatcgtgccctgatgatgtcctgggcaaacccgtgatgaaatccattccaatttcttcccatttccattccgggatctagaggggttgtaataatcctgcgggtctctgatgttctgccttaactcgctgacaaacatcgcagagtgcgacaaactccactatttcccttctcatgctggcccaccaaaatttttccttgagatctttatacatctttgtacttcctggatgaatggagtattgagtctgatgagcctcggtgagtatcaggtctttcaaatctttctcccaaccagattgtgccatgttcatcttcatggaaatcctgggcttttccgaccctcatattctttttcagctcagctatttcaggatcatttacctgagctgctcggacctggtccacgagcatgggctgtgcctcaagggcagccacgtacccgtgttctacaattcctaagttgaggggttcaagctcttgtagcaacttgtcactcatgtctccaatacccaaggcgttgcagtagcttttcctgctcagagcgtctgctactacattagccttgcctggatggtagtgtatccccatgtcgtaatcttttatcaattccaaccatcttcgctgtcggagattcaaatcaggctgggtgaagatatacttcagactcttgtgatccgtgtaaacttcacaacggttaccgacgaggtagtgccgccagatttttagagcgtggactactgctgccaactctaaatcatgggtaggataattgctttcatgtgggcgcaatagccgcgaggcatatgcgaccacttgaccttcttgcatcagaacacatcctagcccttggcgggacgcgtcgcagaagacttggaagtctttcgtcttatcgggcagaatcagaactggagcagacactaatttattcttgagctcttcaaaactcttgtcacactcggccgtccacttgaacttttcttctttcttaagcaactgagtcataggtctggcaatcctagagaaattttcaatgaaccgacggaaataacccgcaagtccaaggaaactccaaatctgtgacactgtcttaggtggggtccactaggtaacttactccacattcgatggatccactgccacaccttgggccgtaatgacgtgacccagaaatttgacttccgacaaccagaagtcacacttactgaacttggcatataactagtgctccttcaacttctcgagtaccagacggagatgttgctcatgctcttcttccgacttggaatagataagaatgtcgtcaatgaataccatgacaaacttatccagaaattccatgaacactttgttcatcaggttcatgaagaatgcaggtgcattggtgagttcaaaagacataaccgtgcactcatacaactcatactgagtggtgaaggctgtcttgggattatcctcttcccggattctcaattggtgatagcctgatcgtatgtctattttggaaaacaccttggctcctttcagctgatcaaatagatcatcgatccgcggcaaaggatatttgttcttgatggtgacctcattgagtgcgcaataatcgacacacattctcttcgttttgtccttcttctccacgaaaatgactggagcaccccaaggtgaagtacttggtcgaatgtaccctttctgcagttgctcatcaacctgcttcttgacctctgctagcacgttggctgtcattctgtacggtctcttgtaaattggagcagttcccggtgccaaatcaatccggaattcgatctccctcttgggtggcatggtagtgaggtcctcagggaacacttctggatactcgcagacaatgggaataccttccaatttcctcgaacccttctcctcggtgaccaccggattttccacctcaatctgattcaaggagattccctgattcggtgagactggtgacttgtacaccatggtttctcccttctcattggtcaaagtgactgtgcgattcgcacaatcaatgacacccttgaacttggtcagccaatccatcccaaggatgacatctaggtctttggattcgagaaggatgaggttgggtagaaatcgtgatatttggatttctattagcacggaagggctataactgaccgaggttgaactatttcccggggtatgaaccctcattggtgtactaagctcttcttttcttaacccatgcaccccaacaaacttctttgaaatgaatgaatgcgttgcatcagaatcgaaaagtactgttgcagggattgagttaacaggaaacgtacccaatacgacctctggtgctgcttgcgcctcttctgtggacgcgtggttaacccgagcctggacaaacttgggtccagcgcgcctcggcttcgggcacttgttggcgaagtgaccagactcaccatagttgaagcaggctcctggcttgcctccggtgtccttctttgggggaacgggtgcagtctgctgaactggcgccattggcgggcgtggggctgcgccgcggttgtgctgcccttagccaagatggctgccactgctgccgggatggaagttgcttgggttgtaaggatgatgctgtcgaacaatcatggtggtaggtccaccctgttatccggaagtgaagcacggtcgctgatgacttccttggttggatcggaactgagttgcctttctcttcctatccattttgttgcgctggtcctcctgacggattgccttgtctaccagcttctcgaagttagcgtaatccccggagatcaactggttggtcagttcgtcatccaggctcgctaggaacttctcctatttctctgcgtcagtgcggacatcctccggtgcatatcgcgctaggcgattgaactcatgcaagtactcggttactgtcctgttgccttggtggagtgcccggaatactctcttcttttgtgccacatcctcgtctagcacctgagccttcctgaagctgcgacagaattctgcccaggtgacctctgtgcctggcggacgggtagccatgtggttgtcccaccaagctgacgcgggaccctggagctggtgtgtggcgaaggcgactttctccttatcactgcactgcagaagattgagtttcttctctatggcatggagccagtcatttgcctccatggggttggtggtgctggagaaggtgggtggcctgactcgtagaaactccagcagcttggactaagggggagggggaccaaactgctgttgctgctgctcagcctgctgctgcatcctctggtgcatctgctggtgctgctgctgcatctgctacatcatggctgccatcatctgggtctgatgggccatcacttatgcaagagtcggattctcggggagcggtggcggaccattgccggaggcactgttggggtatccaccgtcggtgcgttcttcgctgttgttgccctcacctgctgcacggctgccattcctagtgttgaccatctaaaggaagagcaggcggaggggatggaaaagaagaaaaaacatatgctcaggaactaagctttattatataggaatttaaactgcaattgttctgatctgaattaaaacacttaaaatagcaaacaaatccttattaagatagccacatcatagacacatgatgtcgaccgtcaactgacccataagcgaacaaacctaaacacacaactaacagacaactactaagcagtcgataagctaagggataatgggactaatgctcggaacggctcctgcggtcggtggagtcgaaggcgtcctcctgctcgtcgcctggcccctctgagcggctcctggagtactcaggctgataggtgctgccggtgcctgactccaagctggaactgctgatgaccacacgaccaccactgggagaagctggcagccatcctccactgccacctgctagacccctgtaggccgaagctggcacgaaagtgaagccgaactctagcacgggggctgaagatgctgcggtagatggagctggagctagaactggagctggcgccggagctgcaggcggtgctagaggtggaggctgcggcgggttcctaggcgcaagctggatgcgcactggagctgtggtcgacttccttggcgtggtgcggatgcgggctcctcctggcggtggacgtccctaaagcctagggacctccttcttgagtcgagcgttctcatcctgcagatctgcgatcctcacaagcttctggtcgttgagactcttggtcgctttgtggagcatggcgtgcaacttgtcgtagctcctcatcacgtcactcatgtggccgaaggtgacgtcgttctctccccacgctgacttgaaggtgctgctgttggagctggaaccgcggcaagggtggaagcggtaggcggtggtgttcaggacgccgtcatgcagctccctcagatgggccatcatcctgagggcggcctcctcacaagcatgctcaaatgtgcccccacaagctgtcacctccatgttgggcaggtaggtgggtatgtcatgaatctccaagcggacctgatgcgggaattcgccactgagggggtgaatgctggtgtactgcggctcccttggaaaaccaatcacaaacgctatgcgggacaactctgcaacgaagcctcccatagtctgaccttggtgcgtgaggggacagtcggccatctatagaagacaaaggatggagagtcaatgcatgctcaaatccaattataaaataaacggcaatgaactcaaataaaataagcgaatgagaccggaattttgtgcatagatcattttttttgcatgagaacgaacaaataagactgacttacatagcgataaaataatgagaaattagatacatactaataataacgataatagcataaataccttgcaacccatattcctgagttaggacctaatgcattcctcccatccaatcccgacttcactgtcaaataaacctcaaataattttactaaaatcctagactgacctgatttgacaaatctcacttaaacaagcgacaaagcttttttcccttgaaccacaggaacaaatcccaattttcccggagcaaatcaaattgcgaagaacatatgcaatgaaaaggattcagagggctcttaggttttccatttggcttgtcctacggtcaaggtcggctctgataccaacttgtcacgcccagaaattcccgaatagaattccaagcagaatgtgcatttaaacccccgtccaggaccggccggggtacacaaacgacaaagttgacatacagatccacgtcttacaaacattataaaagtcttacataaatgcaacggaaaattaaaagataaatggagctaagccttgacttggactgcagcgagaacaccactccacaggcatcctcgacggcacggacgaagcctactcctcggagaagccaccatctgacacgcactcaatctctggggttttggggaaaatagagcaagactgagtacaaccactgtactcagcaagtcataccggaatagagggtatgatgcaggatataatcaaaggatagatagagcggttcatttgtataaatcgagcatttataaacagtagttgaaagcagtaaaacagttgtaataattaatcaatattaaccatccactgtccaacgctacaccatattgcaacaggcccaaccatccacctgaactactcaattccattagactaagctagggtgagactaatcacggtgaatctggttgaccgcccgtaaccgcgggcacggctattcgaatagttttactctgatcagaggtgtacaactgtacccacaagacacagccccacgacacgtttccgtgtgccgacatgccaccacgacataccggaaagaggccgtgacaggacccttcgcataaccaaacacaccacacctcaggtttcacccccactcctcgcaaggcagcgggcagtcccctctcgtgcctaggtgaatccggaagctgcataggccgtcgcagggcccatccaaactccatcatgcccacccttgcctggttgcgtcagctagaggaaagctacaatacaagcccagccgttgcccacgctggcttgtggtaagtacgaggaattcttccagggtatcccgcgaaccggtccttaagtgcgaagcccaccatttaatacattttaattagagataatcccttatataccactgaaagttgatctaatcccttatatgccactgaaaattggctcttcccttatatgccattggtccaaatttgcgcaccctctcatgccactaccgttagttgaccgtgtgttgaccgttaactctcaagtaaaaaatacatatttgccctctctgagctgttaggcatgcg

SEQ ID NO: 10005 - DNA, 6839 bp, Oryza sativa
acatcgatgcgcgctaattcgcgagagttccttcgatttctcagcgtcttcttgtgctgcgcagcgcgtcgagtggtaacgatctatgatctaatacttgcatggttcctggtttacacgatagaaaattttgatttatgctatcgtagtctacgcatatcccaacagtcgtatcagagccgccttgtatagtttatgatctagatcattgcatatagttgatatgcaggtgtagtagataagatcaattatattgtacatgagttcttaggtgatcggaacgtgagatgaaccgatagccgcatgggttgatgagatcaatcggtatgtgtgttggtgacttcactagaatgtctagtactcaccaaggctgagcgcgattgtgttcatcggatagtctgatgtccactggaaccgcacgccaatgagaaaaaacgagccaatgagattgactctgtttcggcataatttgattacgccgttaaggttttcacatggcgaatcgtagatgagatctatgtaccccgtgtgcgttgccccttagatttcgcttggggtttttatatctatcttactttattgctgttatatatttgatatgacatggtaggatagattctctcagaaaaattaagtgtaatttatgctcttccagtaattgcacctattacggttcactacaagaatctatttaatctgtgacgaaatttgacgaaattttcgtgatgttttcagagattgtcacggatatgcaactatggatacaaggcccataataccgtgacagtttatcgatttcgtcataaaccggcccaaaacctgtgacgttatagcaatttcgtcacgatttaaatacttcaaaaccatataagagatatgtaaattttgtgaacaatgttactatcactttatcggatgaagaaatgaccaaaataaaagttataaatattgatgagttatacaacttggatgttgatgactttttccgttgaaataatttagtatatgaaaatattgtttgaacttgtcataatttgaaattcaaattcaaattattgaaacagagtcatataccaaaatggccaaaacaaaagttgtagatattgatgatttatacaactttgttgtatatgactttttcagttgaaaccatttggtatttgaaaatgttgtttgaagttgtcataatttgaaattcaaattcaaattattgaagagagtcatatagcaaaatgaccaaaacaaaagttgtagatattgatgatttatataactttgttgttgatgactttttcagttgaaatcatttagtatttgaaaatattgtttgaagttgttataatttaaaattaaaattcaaattattgaaacagagtcatataacaaaatgaccaaaacaaatgttgtagatattgatgatttatataactttgttgttgattactttttcagttgaaatcatttagtatttgaaaatgttgtttgaagtagttataatttgaaattcaaattcaaattattgaaacagagtcatatagcaaaatgaccaaaacaaaagttgtagatattgatgatttatacaatttttttgttctggactttttaagttgaaatcgtttagtatttgaaaatgttgtttgaacttgttataatttgaaattcaaattttatataggtcaattaaactcagatggagaaataatcaaaataagataggtagatctcaataagttatacaagtttgtttttgacaacttttccacataagtttatttagtatgataaattcgattcaaagttttaatattttgaaattaatttttttccctcctccctccttcaaattttttcatctcgtcttctctctcccattctctcctatattttcacttccccatccttatcttatcctctcctctcctctctgcctcttagggcatccataatgttgctagaaaccaggcattagacattcaatacatccttactacctggtaagaagtattgtgagggtgatacataactactatttagtcatatagctaatacctagtaagaagcgctgtatgcctgacacatggagtaaaaaattaaatgaaagcaactggttgccacgtgcaggtgtacaattgagtgatggatgatgttttttcaagaggggtctaccttattcctccctattacacataagcattgtggcctcctgtgatatactattgctatgtactgtttgggcccaccctcctaccgatttgggtaggatacattgagcttgcccttactctttcctcctctcctctctctcttcaccgacggcagcggcgggctcggcaccggcggcggcggcctcgaccgccgaccgccgacgccccgcgccgcctcctcgctcatcaggatgggctcggcggtgtatgccggtgccggcgtgctcgacgacttcctccggcggcagtccactttgttcgcggtcgcggcgacgtccccaacctccatgacgtcgtcgccctcggctactccggagcccgctgcccccggccggatttggaagccagctccacaacgacgggcgccgttcttcgccctcggcctccaccggcttcccttccgacgtcgccgccttgagctcctcctcacgccctccccgccggcccttcccgatctgctccacccaagccaccacgacgaccagatccaggaagtctctccatcgctctggtcctgacagtggctggaggaccccggccggttgcagcacttcatccccgcaaaaatatcaaacttgacatcgtcagcctcctcatttggataagtaagccccttcttcaccctgatttgtgcgctaatgctgatcttaatcggtgaatggttgtgttgccaggaatttgtgaatcaggatgttccatctaatttggttttgctcgggttgtcaaatactcgatggatatgtacctgcgcatgtgcatcaggttggtgtgtttcggcatatggtgggttgattttcttcagccaaggttgtgctcatctcttgtatcctcaaacactaagatactgatgttcttttcctcttctcaccattcccttgcatgccatttttttcaggtaaccaggttcaatgaagaatgggagaattatgtttactgataatgtgcatttttatttactgtgccttattagttcatttggcatggacgcccttacttttgcatcagctcaggcttagcaagaaagattctcatcctgttttaattgctgacccatgaatgattaatcttgaccccccaccctcaagcaactctgttgcttttcgcttgcgagaacgcagttctgtaatctagcttaactcagaccgattccttattttattgataatctcatctatttgtcatgtgagtaatttaagtggcgcttaaacaacaatgaaacaattgtccagatgtggttggaacaaaaccatatccacttgccgtcaaaaaaaaagaaaagaaaaataagtgcaaatttgttatttcttgttcctcgtatggttaaagatggtcttcctcgtatggttgaagatggtcttgtttgtcactatgaattattcttgtgcttgcagatggatgatactctgacaactggaagcatcaggagtacagagggggaaaagagacgtttagcagaggcttcacttgcctacaactgtgagaggtaattccatcatacatctatttaggtttgtgggaaatgataaaagctcttgcaagcatgtattgttagggagtaacatacttgccataaaagaaacagctcaattttcagtccgaatgatcttcccaagcgtaatgaattatgttagatgggtgacatttattacttgtgctgatgtgtaatatgatgccatcaatccttccctgtttgaagccatgggacactaacaagcttactttgttcttgtttccaaaatgtgttaatattgcgactaggtcttaattccaaaatgacaatggagaagtgggcactgaaaagaacagttgatcatgctctctatgttatttttatgcctccattttcttttcttccccttccgttgttgttcttctcttcttttgcttaacatgtatctgttttgcactttcagcaccatcatccacatattaacgtgcgcagcgtgaagccgcgcttgttcttctagtaacatccaatggccaatgctatctagagaatattcatcaagagcagttaagtatgcaaattattcaggagttgaatagttccaaaaagttggtatagagcatgctatctagtaattccttgatgacatgcacatcattttagaacacttagtctttacttggattttgaatatttctgttgaaatgtgaacactgactttcgacatggtcactacctcaaatgaatcattaatataccttgcctgatttttgtttttgcaggatatagaagactaaatgatttacagattacaggggaaaagagaaacggccaattaatcagttctacatgtagaaagctgtagatagctttaattagtgagacaattgtgtgaacttcattttttttttgccattgcaccttttttttttggtttaaatgtaccgttgagctgtaacttcgatgatttatccaatataaataaaaatagttatgatcatataaattttacagttaaataatgggccgtcattaaataatcaatggaccaatgtaaaaaaaataatgggttgtttaaaaattaatgagccgtataaaaaagttgctgacgtcagctgccacatcatcattgacatgtcatcgcacacgtgtcaaaacgaccatgtcacctgccatgttggtcgccacgtggcaaccatccgtgacgtttaatttcatcacaaaggttgggcctgggctggactacacgagcccataagcgttttatgacggttaaaaaacgtcatagattgtgctgatccgtgacgatttcagagaaaacgtcggcacatttaatctgtgacgctcaatagatgacaataagtataatcgtcacagacaaattcctgtgacgaattttcagtgatccatgacgattttttttcgtcatagattaaatagattcttgtagtggttgtgatcataagtgatgggtttgctatagcaaagtgtaactttttatcatgataaaataggatagatgtcggacatctatatgcggagattattggtttacttgacaaggttatcaaaacagttttggaccttggggcataggttgggttggacatggagatgtcacctcaacagcacaagagtcacatatgatgtgattagcaaggtgttgcttacctattttgatagttgtctagctgtgatgccaaagctcactagagactaataaaatgatgatcttgactcactatgttactagagggaattttgtttcacaatacatagtggcagtatcttttgttaaattttttaatgaaaggttaaatgtaaacatggtgctgattttgcatacatatatttctattgtagatcatggcagctcctgcaccatacaattttatcttgcagtctattcttgagaaagagaagttgactggaacaaacttcatggattggtattgcaacctgagaattgttctcaggcaagagcacaaagagtttatgcttacacaaccttttccagctgacttgcccaacaatgctcctgttgctcaacgtagggagcatgaaaggcgatgcaatgaataccttgatataagctgtctcatgcttgctactatgtcccctgagcttcaaaggcaatatgaggcattggatgctcatatgataatcacgggactacgtaacatgtttgaggaccaagcaagagctgagtggtttaatacctcaaagtccttgtttgcgtgcaggcttgtagaaggtaatccagtgagcccacatgtgatcaaaatgattggttacatcgagagtctggataagcttggctttccccttagctgagagttggctactgatttgattctctagtcgctccctcccagctttgagccgttcataataaatttcaatatgaacaacctgaacatgaccttgacagaattgcatgggatgctaaagactgtcgaggaaagcattaagaaaaactccaaccatgtgatggttatgcataagcgcaagcccaacaacaagaagagtggtcaaaagagaaagctaaactctgatgagatcacgagtacaagcagctctaagaccaaggttcaaaagacagggcccgctaaggatgcagagtgcttcttttgcaaggagacaggtcattggaagagaaactgtaagaaatacctacagcagctcaagcagaagcagcaggatggaaagagttccacctcaggtattaatgttatagaaattaatcttgctacttcctttactgattcttgggtatttgataccgggtcagttgctcacatatgcaaatcgttgcaagggctgaaaagaagtaggagcttagtgtcacaccctgaagttcctttcccaagcctaaattgaattttaaaatcacctagagaaaatatcggtgtaaaagcaagagagaaaccccaataaattaatgcaaataataaacagaattggcatgtggaattttttcatgagttctacatgtcgaaatatggtaacaagatttttagtggaattttttagagctctggaaataattttaactaattaaaaacgagcacaagcaatatttaatccctggaaattcttttccatttttctttttcctttttccccctcctttttcccaaaggggccgtggcccatttcctccccctcccgcgcccttgctgggccga

SEQ ID NO: 10006 - DNA, 1348 bp, Oryza sativa
gtttgcacaaatgttgcaacacaataagttttgtgtgttttcgtttgcagaggtacttgcttgggtgaaagaaaagagactgagcgtaaggaatgcatggatgattgaagaaattgattggggaccaaaccaagaccttctccaagtcttctttcatctcaccatgtcacttttagcccatagaagacaagagatcaagttgtacacgttttggattcggattcgggcctcctgatagcatcaacttcaaacggatctagccgctgatctagaaggaatttagaggcccatgagcacttgttggaaagattatgaagtctactttcatatggttttggtcccatgtcaaaattcctaccgagctgccgacaatcagcaaaacaagacacatatctcatctagtccgaatctgattttgagttttgggccttgtaattgtgtcgtgggcttagcccaaggggtgtgcgccctagggcaaccctaggacgtccctaagcacatttattccgcacgggttctcatcgacggaggcaactccattaacctactcttcaccagcaccttggacgcgatggggaccccacgaagtgagttgacgcccactgatcaacccttccacggaattactcctcactcatcgtccaagccactgggcaagattacgctacctgtgacttttggccaagcaaacaacttccgaacggagcagatcacctttgatgtcgctgagtttgacacaacatataatgccatcatcgggaggactgcactcgcgaagttcatggccgcatctcactatgcgtatcaagtgctcaagatgcctgggccgaagagaacaatcactattcaggaaaacgcgaagctggcggtgcagtgcgacaaatggagcctcgacatggtcgagcatgctcccaacccgcccgccatagctgagccacccaagaaagtgaacaaaaccaacaagacgtcgaagccagacagcgcaatcaagatcgttctgctctccagtgccaaccccgataagactgttaagatcggggcgtcactggatgagaaataggaactcgcgctcatcaccttcctccgcgacaatgcagacgtgtttgcttggcagctgtccgacatgccgggggtccccagggaggtgattgagcacaaactcatggtgcgaccccgatgccaagctagtaaaggaaaaactgcggagattcgcatcagatcggaaatgagccatatgagaagagctcgacaagcttctcaaagctggtttcatccgagaagtcctccacccagagtggctagccaatccaatcatggtgcgtaaggccaacgagaagtgggggctgca

SEQ ID NO: 10007 - DNA, 11783 bp, Oryza sativa
ggtgcggcacagcaagctgttggccggcgcggcgggatgggcagccggcgtgcgggcggcgctcggattgcatctctctctttttcttttgcttttcttcttctattcctcttcggtcatggcgcgtctgtggcagtggcacggcatcttgcagaatgcggccgatgcacggcgaggtgcggccatctcgctaccgttgtgcatggtgcaaccttgctatcacacaatgttggcgtgatgcatggctagttccgatgcgattcgtcaatcatgccggcgacttcttggcagcctcgaaaggactcgcaaccaatcggcaagatgccggcgacttcaagtcggcaatggtggtgttggacgaaaatcgcaaaaacggaacaagaacgaaaagaggaattcgttttcgcggtagatcggcgagatgcaatgcggatctgcgagttcttacccttcttctttctcggtctccggtagaacatcgtgctgataacgtattacgcaaccctactgctacacgaagtagtccaagagggtcccgtaattctacaaaaagtggagacacaagatatgagggtgtgttatcctttctcattcatccattgcattctcaagtgtacaatcctcctctctactcctttatttatagccattccctcttccaccttttcatgtttagtgatgggcccaattagtgggtaaccgggccgggtcttcgtgggccggcggtttcctaaccgttactactctctaaatattaagatttaaaatattttagctctaaaaaacattactactgtagtaccactgttactatgcatgttctttgttactacaaattttgccatgttgttactgccaaaagtgtagtaacaacctataaattttgcagtaacaacctactgattttgtagtaacgtatcatgttactacctttctgggataatgttactgctgactcatagtaacaatgtaattattacagtaacataactggttctcacataatctgaatagacatacaaagcatgcaaacaatgttttctattcacaaattgtcatatggtgatttggttaagaaagcttgccatgaaccatgagatcatgggttcaagtaatgaattcatcaatttatttttaatttttataaaaaaaagaaaataatagaaggaaaaatgagagatgggaaggagagaaaaaatcaggaggagcgatcgtggggaggaggaggagcgatcgggagggggaagggggagaatcgctgggagggggagaggaaggagctgggagggggagggaggaaggagcgatgggaggcaggaggcgggaggaggaggagcgatcgggagggggaagggggagggggagggaggaaggagcgatgggaggcaggaggcgggaggaggaggagcgatcgggagggggaagggggagaatcgctgggagggggagggaggaaggagcgatgggaggcgggaggaggagagagagataaggagggagtgaggggggaggggaggggggtgtagaatagttattctaagggagagtgtataatagaactatatatatatatatatatatatatatatatacctttaaaaaaataagagatgcttccgtcgtttgtcaaaaaaccggtgaaaataaaccgggcgaaaaaaccgtaactgttcgatagaaaaaagggcgaaaaaaaaatccgattccgtgaaaaaaaatataatccgattccgtgccaaaaaaaagggcgaaaaaaaatctctatctctatctctacatctacttctatctcttctctatctctactaagaggtatttcggtcgtccgtaaaaaaaaccgggccaaaaaaccgagcgaaaaaaaccgggcgaaaaaaagtccgaccaaaaaacggagtgaaaaaaaaaacgggagaaaaaaaatgtctgataaaaaaacggagctaaaaaaaaggcaaaaaaaaaaacaattctgtccgaccaaaaaaataggaacggggcgaaaaaaacgagcgaagaaacctggcgaaaaaatagtctgatccaaaaaaaatcgaagcgaaaaagggagaaaaaaatttccgatcaaaaaaaaacggggcaaaaaaaagcagaaaaaaacgaaacagtcagtaaaaaaagagcgaaaaaatttaaaaaattttccgattccaaagaaaaaggaattatatatgacacggtaaaaaaaatcgaccgagcgaaaaaaagccgagaaaaaaaactgggcgaaaaaaagtccgataaaaaaacggggcgaaaaaaaaacaaatatgtccgacccaaaaaaaggcaaaaaaaaggaagaaaaatcgaaacgaatccgactctgccgacgcggtaaaaaaagggcgaaaaaaatttaaaaaattgtccgattccaaagaaaaaggaattatatgtgacacggtaaaaaaaatcgaccgggcgaaaaaaaaagcgagcaaaaaaactgggcgaaaaaatgaaaaaaagtctgataaaaaaaacggggcgaaacaaaaaacaattatgtccgatccaaaaaaaaggcaaaaaagggaagaaaaatcgaaacgaatccgactccgtcgacgcggtaaaaaaagggcgaaaaaaattaaaaaaaagtctgattacaaagaaaaataaattatatgtgacgcggtaaaaaaaatcaaatcctattatgtctagaaaggtccgacactataataaagtggtgaaaaaaaccgttcgaaaaaaaatgcacgagaaaaaaaataaaaagggcggaaaaaagcacggcggaaaaaagtctaatttctattcatcgttttagtagtccgtttatatctcttctttatctctaatctaatctaatctaactatagaagtttctatggtatattaaaaaagaaaaaaatgtgcgagaagattaaaacggttttaaaaaaacgcgtgaggaaaaaaatgccagaaaaaagcgcaaaagaaaacacgttagaataaaaagttccatagtcccaaaaaaaacacgcgagaaaaaaatatttccatcgtctgtaaaaaggaaaaaaaaaagcatatgaggaaaaaaactgttagaaaaaaacgctaaattgatggatacttggtcggataggctccatccacttttttccatctcttacacgacttttatttgtcatctattctcctgtagtggagaccctgcacatttttgtaggcaattatcatactatttttgtgaagtatagctattattcttgataacatattatagctcttattcttgattacatattatatggaaataatcttagaaaataaacatattttaattgttatttagagaagagtgcacagtgactctattttgtgtagacttgaccatacgagacagtgtaggatttgattggttgtaagaatgagattaaaagaatattttagattatatgcatgttgttatataaataattcaattattttaggtaaagcaaacatcgtaaggttgccatcatcgaggttgggctattacatttaagatgttccaattttctgattgtcatcgacatggttatgaatgaaaaacgtgtatatatatatatatatatatatatatatatatatatatatatatatatatatatggcaaaatctaaatcgcgtgcgctctctgttttgtcttatcgcgcgacacgctcatcggccgtccgatccaacaagcgctggtgcgtccgaacatggcctggtgattcatggacgtggcatcatctagagtaatccaaattggaagccatgtgatgctctacgctacgccggcttcaaaaataattttctcttaaactaatcatccgatctacgatccgattacaccgttgtgttcgtaagagttgaatctttataataagatctcacatgattatattttgatgaaaaattagaaattactttcataatatatctaaattacttttagatttcactaaattacttcttagatccataaagtaaattcaataaagcctaaaagtaatttacatatattaatatataagtaacttagaacaaaaagaaaataaccttatcatgacattaaagtaaatccgttatggaggtaaaaacatgagtttatatagaaattaaatttaatcagcataaattacatcattgactaaaaatgattataaaataaacaactcacaacatgaatgtacagatttcttttaatgccgtaacatgttactttactcacttttgttttaagttacttctataatataggtaaattacttccaggctttattaaattacttttatggctaagaagtaatttaatgaaatctaaaagtaatttagatatactataaaagtaatttctattttttcataaaaatatagtcatgtgagatcttgttataaagatttaattgttatgaacacaatagtgtaatcggatcgtaaatcggatggataatctaaaagaaaattccataagaagaagaaaaatacatgcacttttgagtatactagtagcaactggataagcgattgaggtagctggttatgtgtgtgtgtgtgtgtgtgtgtgtgtgtgtgtgtgtgtgtgtgtgtgtgtgtgtgtgtgtgtgtgtggttctatactcctagggagtaagtactccctctcccatccaccgttcatctgatcgatcagatatgtactccctccctcattataacgggtttggctcggtggatccgattagtttttctaattaaaagacggactgcttatcccgtaatttggggtttgctcccaacaggccgaactgcttatcccgaaaattggggttttggggggcggcgcggcgacggaccagcgcgacgatggaccagcgattcagcggcgactggatggctggcggcggtacagagatagcagctcgttccttcctccagtgatgactcctccccttcctccagcgatggctcctctctcaacagcatgtgttcctgaagcagaagtaatcgatttggagtcggctgaatgcaggagcggggcaaccatggcaaaatcgacgggccatagcagtggatttcatccaaagcagcaggttagtattcgtttatttttgtatggcaagatcaagacacgttgcctaaaattttctccttcgccgcagggtcacaggaaaatcagtttgtcaccacagtccaaggtatgcctcctgaaattgaatatatgtatgcctgtagagagggattaggtgtatagttcggttcatgtacgctctcagtttcagatgctaatttttccccttttagtgcatatgatgtttttttggttgatgaagtaaatgctgttttagcccccacccccctaaagaaaaatgtagatggtagtacgtactgaattttcaacggtatatactcattttttctttggagggatacttattggaatctgctagacggtattatgtaatgaattttggtgtggcagggttcttactgaactctctgttagacgatagtatatactgaatttttatgtggggagctttgttctcaactttgttagacgatagcatatactgcattttccacatgtatactgaatctttccacaatgatttatagactgaactttgatacgcaccagtatttactgaatttttcacagatatactgaatttttctatgggaggctttgtactgaactttgttatacgacagcatatagtatgtactgaattttctatgtggtacatactgaacttttctagaagatagcatatactgcatttttccacatatatacagaggcttttccatagtggtttacatactggaccttgttacgaagaagtatatactgcatttttacacagagaggtatatgctgattttttacatacagtagtatgctctaaactgtgcatatactgacttttctgtcagtacacatgattttttttatttagagggtacacaaaggtagaatttgctacgcagtattatgtacttcatctttccatacatatatgagtgtatgctgttttttttaaaacagaagtatatgttgaatttttaaatacactggtccatgtagtattgtctatttatgaaatgaaaaactaattatctgcaggctttgaaggtttctggcacaagaggcagcctaaataagactgttgcacgggtggtatccaggtatcggcaaagcagagttttaaatagacagaagaaagacaacactatctttggtatcaactgcaggtgtcagcccaaatgcgtagtgaatatcattaaagaattcgatgataggaagaaggagttgattggtgaaattggatttgatggacttttggatatcaagcttactaaggtaaacaggcagtttggggcatggctactaagcaaagttgatccgaaatcatgcgctactgttaaagatgtcaaccaggagttgccattcggttccaatgatgtgaatgcagtttttggcttgccatgctcaggtcaacctattatcccttgctctcaagatgaattggatgggaagaaacaaatattgtgtgaaatatttaagataccaaacttttcacacctgaaaatatcactcttaaagagaatcctaaagaagcagtatggttatcccatgacaatagatgaaaagagggttttcatggcggcttttgtgctttatgtcacaacgaagcttttggcaccgcaatcctgtgcaaacttcatatctcctaggtctattatggctgtttctgatgttgacaatataaaacagtacaactggtcccaattcgttgtagatgaggtgaagaaagcagcagaatcaatgcccacctgctttccgaataaggctcaactatccattaacgggtgtatcatctttctaatggttagcatttaaaactgacttgttaatgcagcatataatcaacacacatattgtcattgtgaatcattttttcaggtaaaatacttgagaaatctcctgttccggaaggttgggatcacatgtgttaaaacatgtcacatttctcagtttgaggatgatcaaattgctaggatgattcaacaagatgtagttagtaaacataacccaggattccccttccctcgttatgggaaactccaggtatgtacgataccctggccgtaatatgcctatttcgggctgcaaaatttagctaatttccaacatacatgctgttcagttgatgaaggatccaagagaaaacaacccccatgtgccagagctatctcccctaaacttatgctcctgttcgaagatcccatctagagccattgatggcggtaaaaatttaataaaattcctggtttcacacttctcttcgttagacgtacatagaagtgtcgggtcacaggtatgtcaaccatccgtatgctatgttacttgattgtttcttcattaagttgtaattttcatatgatcaagggattttaaactaacatgtggtatatatgataacataaaacaggcatacgaggagttgaaatcttccgttcaggatggattcgatcggatcgataagattttgcctaccatatcagatttcgtcgacataagcaccatgcaaactgctattcacgcatctaacctattcaagagagctttcaagactaatattacagtggcagttaagatagtgataagggcagcaataacgaaagttattgataccattgaggatatacaagggcctctccatccatggggagacacaactgccatgggataccacacacccacaaactactccacacatgctacaaaagatgctagtcaattggaccaaccaaccaacacggtcaaacgttaaacgtgaatagtgtaaaactgcacttattttggatggaggaagtatatctttaggccgtgtttagttgcaaattttttcttcaaacttttaactttttcatcacatcaaaattttcctacacacacaaatttccaacttttccgtcgcatcgttccaagtttaaccaaacttccaattttgatgtgaacaaaacacagccttaatatatcaccaagcttacactacaaaaatgaatatatcttcaatcaccatgtgaaaatattccaaaaatgatatgtagatatatcaggtaacctaaaaatatgtcattcgttgagacatgtcattagttcagacagtagccttcactatttgtaaatacatttccaaaaatatacatagtttttccttaaaaaatagatagcttcagacaagtacttgcggcggtgttccagacacaaaaacatcccatgtatgcacattatttgtgccatcatataattgatatttatatatatctccattcaccaaaaaatgcatgcacattaaggctgtgtttagttcacgccaaaattagaagtttggttgaaattggaacgatgtgacgcaaaaagttggaagtttacatgtgtagaaaagttttgatgtgatgaaaaagttgaagtttgaaaaaatatttcggaactaagcatggcgtaaggctgcgtttgatacttggggttaggaacccaactcgaccgcacggaaaatggagcggtctattagcgcgtgattaattaagtattagctaatttttttaaaaaaaatggattaatttgattttttaaagcaactttcgtatagaaactttttgaaaaaaacgcaccatttagcagtttgaaaaacgtgtgcgcggaaaacgagggagaggggtctagaaccttgtggaaggaacgcagccaaccatggaaataaaccaggtgcattacatccaaaaaatgagagctcattcttgatccagttgttttaggaaaaatctaggcactgtgttttccagcccagccaattggcttattcatattttggtaggtagaagctggaaaataaacaacagcattcaccgtttctatctacttgctgacaagctttgtagaaatggtatatctctattcagcaaaaataatgtttacaaacttacatacgatctattatatgtgtgctgacatttttatttttagagatgataaaaatagatgggcagatggcacagttctagaaggcctagagggtgagcatttcagcaaaaacaaatagatccatctagggaaaaaaaatagtgtcagatcaaaaaacatgatacatctgtaaatagcatttcaaaaatacatttctctgaatcaacgaatgatagatttctaattgacagtcagagcatgatgtttctaagccccataattttcaaaacatttcagagctttgacacctgttgggatacgcgtaggctacaatagtataaattaaaattttctatcgcgtaaaccaggaaccatgcaagtattagatcatagatcgttaccactcgacgcactgcgcagtggaagaagacgctgagaagtcgaaggaactctcgcgaagtagcgcgcgtcgatgtagaggaagtagtcgatcgcaccagctcgaccttctcctcctctgcgttctcctcgccgtactcccacgccgatcagcaccacaaaccagcagcgcctctaccggtatccacacgtatagggacggaacgccacgtgcagatgtgctagcacccgcgcgtggctagggttttgctcggggagggaactgatggctagggtttctcacgtgatgcaatgcctccgccggtcacacccctcacgaatatataagatccatcactcgggcctccaaggcccgtaggactcctattcggatccctatccgaattaagctcatattggatctccatccaatccccttattccggcccattaagcgtgcgaccttgtaggttcatgtatactcggctgtaacccgaaaactccttttcggtccacgcgtcaacagcggcccctagcagaacatattgacccaccgggcatacataaagatcatatcggctgaacctctagtgtatacttgtatgaacccctttgcctcacgatatcgattaaactcaaggctagatatgtgccatcctctaatagctcaatcattcaatcgaacctgttaatagattatataacttgtgattgactcctcaatcacctttggcatggccatgcacttccataatctacaacattgaccgcaacagcagcaactcttgctccattgcccacgcgaatgtccactttgcctcttgctaagtgtcacgcccagaaatttccgaatagaattccaagcagaatgtgcatttaaacccccgtccaggaccggccggggtacacaaacgacaaagttgacaaacagatccacgtcttacaaacattataaaagtcttacataaatgcagcggaaaattaaaagataaatggagctaagccttgacttggactgcagcgggaacaccactccataggcatcctcgacggcatggacgaagcctactcctcggagaagccgccatctgacacgcactcaatctttggggttttggggaaaatagagcaagactgagtacaaccaccatactcagcaagtcataccggaatagagggtatgatgcaggatataatcaaaggatagatagagcggttcatttgcataaatcgagcatttataaacagtagttgaaagcagtaaaatagttgtaataattaatcaatattaactatccactgtccaacgctacaccacgttgcaacaggcccaaccatccacctaaactactcaattccattagactaagctagggtgagactaatcacggtgaatctggttgaccgcccgtaaccgcgggcacggctattcgaatagttttactctgatcagaggtgtacaattgtacccacaagacacagccccgcgacacgtttccgtgtgccgacatgccaccatgacataccggaaagaggccgtgacaggacccttcgcataaccccctctaaccaaacacaccacaccttaggtttcacccccactcctcgcaaggcagcgggcagtcccctcttgtgcctaggtgaatccggaagccgcataggccgtcgcagggcccatccaaactccatcacgcccacccttgcctggatgcgttagctagaggaaagctacactacaagcccagccgttgcccacgctagcttgtggtaagtacgaggaattctttcagggtttcccgcgaaccggtccttaagtgccatgggcgtgactatcaaaaccatgcacccacagccgacaatttaatacattttaattaaccaacaccggagcggtggcaataaccaacatcattactagaatctgatacctatggattaatgtagtcccccattttgtactagttgaactaagcatggctaagcacttcctaatccaacagcgaatcattttacaaccccaagctaacaaaggagcgaggtacaaaaatagcatggctgtaacagtaggtaaatatcccatagtaacaatttaaaacaatgtagtatttaagggaaaacggtagagcatttgcaatatatgttcaatatgttcaagtgacaagcatgacttgccttgctctgctgctggaggaacctcggcgactatttcaaaatacaccggagcgttgggagagcaggaatctaagcgacatacaaagcaaacaatacaaacaggccataagactactgaaacagagaacaaaaccatttttaatagattctatgcattttttcttgatttactaagacttgaatgggcttaaacggagctcggatgaattttctatgaattttagaagattcactgtgttttactataaagagaaaacccttaattatttattgcgca

SEQ ID NO: 10008 - DNA, 11668 bp, Oryza sativa
aaccagtcaagacatgtgatgcccataatatactggaacaatagtaacagatgaatacctgaataatgttatcgtgctcttaaaataaccaataacagtccaggtgtcaggattttcctagtaaggataagcctattgtaatcatagaatacaaacacatgcacattaaactaacatccttaaaaaactaattgggatttgtgggccatggaaccaacatccttcagcatctaaaactgttaaatagccatggtccgatgatcatatcatatcgcatatagcaagacaaaaagagcatatgagacaagaagccaaacaagtatgacaaaaagggccagggaaggtaccctgccatgtatcctttttatcacaatagatagatagggaaatcaaaccggataactataaatgtcaaataaacaagaaagctattacataagaatgcacaataatataatgtgaaaagaaaatccataacctgattttaatactcatcacatgatcctgaccttgcatcataaaaaatgtacacagttttctatcaatcatgccaacagtgcctaggactcacattttctttttttctacaaaatgctattccatgatttcatataattatgcactgacaagtcaatattcataccctaaaattaaaatgcaaaacgctcctcacacacccgcaccacgacgcaaaaccgagaaattttggcaagcagtacgttcagcgcctcaagatcgatccatcacggtctcactgtcaaatcatgcgccccaaaattttgtataaacaattcaaaattgccgtaggaaacgaagcacacaaagagggattagatcctgacgcacctagcactccggcagcggtaggggtcggaggagagtggaatggatacggaccagcggcggttggggatcggaagagggtggaatgaatggattgagaaggggaatcgcctcggagaagtggagaaggggatggaactagcggtagtgagatgaacgcgggagagggaagggccacactagaagcggggcgatggtggccatttttggtgggtagcaacaatgtcggaggcctggctgataaaatcctcacgttctagtacttttcctttttttttttgattatttttcttatggatgcgactacagggagcgcatgcactcggttgtgctaaccagcgaccatgctttttaccaaaaatagtgcagtgtgtaatcaacttgttacccttcttactaaaagtagtagcacctgccacttgcatcctcattacccatctaaatttcaaataattttttctcttaaattacttatctgatctacgacccgattacatcgtttcgttgcaattatatctgtacatcaagatcttacatgattatattatgatgaaaaaaatatttatgcttgtaaatcactttaattatatactaagttacttttatcatatatatatatataagagttggattttttgcacgcagttcacatgtacccacaaggctagtatattaggtgctaacaaaatgtaacatacatgttatactatattttttacaagtgtaaaataccttgtttatataatttttgtatttcttatgcaaaacttgtttatgtagtttaccttgtttatataaattatcttgtttatgtagtttttgatggtaggatatatatcattttggaaatatcatttttgcaagatgacaatttggtgatatagtagatatattgttttctcattttgactaaatatcatgttataaacaaaataagggttagaaaaatacaatgcactagatatataaatgttatatatgattattattgaaaaatttatttggtaaaaaatgcaacatacatgttatacatatagtgaaccaacctaatcctaattatcttttctccctatagtaagcattcatttcgttaaggttagctacattttgcagcaggaatcttggaacacatcaacagtgtagattgtaggtacatatgaacccgagtgcgaatctgcattatacacacacacacaagcaaaatgcccatgcgttgcattgggtgaagcaaaaaaaagaaaaagtagtaatgggtgtgtgggaggagtgtaaagccaccaaggttaattgagctcctcatagtcaaatcgaatattcccggtgcaagaatgctctaaatccacttacatggattattataagaaatcaattaataccactataaaatctctataatataaaaaaataaatttttttgccggtactttagtacgtcatccgtgtatgagtcggtttttaacttcgtttacttttggaaatacattttcgtatttgagttagtttttaagtttgttcgtttttggaaacatagaaggagtcgtataagaaatctctttaaaaaaactcgcatgctagcttgagatgatcggactcctaattgcagcttatgactttctaaaaatatatatatctaagcaaatttaaatagtgaatttcacattaattaaacagtataacaataataagattaaaataactctcatccattgcaatgcacggggatttttatagtgaatactaaaatttgaaaccataaaaagtatttatttttatcatgagtcagttgcaatgtacggttatttttttgtcattgatattgataaacacttttttatatcataaagagtacccatagtagaagaaatatttttagctagctatcagatcaagctcactgcactccagtagcagaatcgttttcactaaaaaaaaacagaaggaaatcgtacgataaatagaaaaaaaaagtgacgtggttaggtgtcctacggcgaatgagaaattgacgcggaaaacaatcttgatgcaaacacaattaattttgttggtgattacgtgtttttcttgaaaaaaaaagcatgcgattgttttttatattttaaaaagtaaatcattttgttggtgattacgttgttttttattttatttttaaatagtaaaatagcatctatttttatctgatctctggtacacgtgagtccaaactttataattcagtgtttataacgacgtgcaagcctcatatttaagcaggtgcttgagtgcttctcaagctgtggggaagttattcgtgttacagtaccacgatgctacagtctcggttgctacagtaccgtgcagtactgtgctggctggtgctcctctgttatgtgggctggctgttgggttgagactgctgggccggccttatactgctttggttgggctgcttgctagctttctgttttttcttttctcttttatttgtgggtgtaagagatctccatcacgcttacggattgtggattagcgacaaaatattgtgtgggcccatgcttaacgacggacgaatgattaaccggaagctttacttatttttttaattaggtactgcggactctaatatgtcgtgttttgttgatgacgaaaaaaaaagatgtttaattttcaaattaaaattgattcattataagatttctgaatcataaaatatctgttgaagaaagcggtgttaaacgtttgatttttcagtgcatggtccgtgctagtggcagagagaaaaaaattgggattaaatagaatttgagatgtgagaggcaaaatagacttattctgagtaataattagtgttcaatttttttaaacggtagtgcagcatatgagaggccggcccgtactcagtgcaaaaggttaggcatatgagaggccggcccatactcagtgcaacggtagtgcagcatatgagaggccagcccatactcagtgaaaaaggttaggcataggaataagtttaccggaggtccctcaacttaacagcgagattttctgaggtcccttaaccacaaaaccagaaatctccacccctaaactatacaaaaccgttcactcaagctccctaggcagtatatatgggtggtttcgctgacgtggcatcctagtcagcaaaaataattaaaaaaatacgtggggcccacatgtcagccctgcatattttttttggcaaaatttgctacaggacatctaaaaaacgtgtaattagttagaagataccgcaagaatgtttatttgttgtagggcattgtaaaaaactggtaattagctgatgggcaccaacaagattattttattatatttggaggaatatgagagagaaacaagcattaaataccagtttacccttgcctcaaattagttagtcttcactaatcacatattctcatcgccaagcaaagagcaagagagaggaggctctctcgagcgcagcagcagagtcgtgtcgtttcctccgagggcagcagcagtcgccgctgccatcgccgctttctcgagcgcagccatcgccgctccctttgcgctgtcgttaccgcgcaccggaccacgtgcaccctctgcgccgtcgtcgccgctccctttctccgcgcataggaaccatcgtcgcagctcccattttccggaagaagcaaccgccgccgctgtcgtttcctttctccgcgtgcagcagctgtgccgccgccaccaccgctccctccctccgcaagttgccgctgcgccgccatgtgaccgtgcgaggcgtggcgtcggcgccggcgggcggaggcggctgttcagtgcgttccggcggctgcgggtgcggtggctagtggcgctgtaccgccgctcgctgcggcggctgcgcgcgtactacaccaaggcggtccaagacctcctcgagggcgcgacggtcatgagcacgctgcactcgtaggctgccacagactgctcgttcggcgccgctttcacgccggtggtcgtcgtgaaacaataacaccagtggttgctcctcctccttcgcttgcaggacatgaagccatggagtagtagcaccggtgacggcaggtgagcgagcgccacgacgataggcgaagcggcggcgagcaaggttgaaggcagcggttgagaacagagagagagagagagaaagaatgagagagggagaaaaggataaggaagaaacaaaaaagaaaaagaaaaaaaatcaaaaggtactccctcgtctcataatataagagattttgagtttgtatttatattgtctgaccacttgtcttatttaaaaaatttgtgcaaatataaaaaacgaaaagttgtacttaaagtattttggataataaagtaagtcaaaaaaataataattttaattttttttaataagacgagtggtcaaacaatgcaagcaaaaactcaaaatcccttatattataggacaaagggagtagaaccgtacttacacagctgtttctctctctaatttttttagatataataaaataattccgcgggtgtccagcagctaattaccaattttttgcagtccctacagcaaaaacgcgttattgcgatgtcttctagctaattacacgttttttgaatgtactgttagcaaattttgcctattttttttcttctctgttcttcctcttctgttctcttttctctcttctctcttctctcttgacttcttgggtgagggaggccggcggcgggcagcgagcggcagcggttggcggtggcaggtggagtggcgggtggtttcgccggcgtcatctcttgctggctcccaatacgtgccgcgacctggagccccgcgcgcgtggcggcggtgctcgagcaggccaccgcgggtgacctgctgaccatcgcgctcgacggcgccggtgagcgcgtccagaacgtcgacaacgtgcgccacatcatcttcgggcggcatgaacggccggagtcggaagccggaagccgagattacatgacttttatagctaagaaaacaaacttcggtcacatcgtacgggcacgcagcacgcgatcaacttaatttggcagccactagctggccgcatgcacgaagctaactgccacacaactcatgcaacacattcatgtattgactagctctaactaatcagctaactaagctatgcatgcacaccactaacagttttgtggttaggtggtgctgaggcgctgagcgcgctctactacgaccagctcaagctccagcagtggcaatggcggaggagacgagggcggcgggtgggacgcgtatgggaatggcgtgatgaggtcatcggcagcggggtcggcgcagaagcaggcgaaggaggatgcggaagcaggcgaaggaggagagcttaagcatgcaggatgctcagagccgcctcctccggcgagctcacctttgccaaatcctgcacgccacacgtcgtctcttcctggaaagaacgaaccagcggtgtggacgtcgtcttgtccacggtggtggcgtgctgctccttgacgacggacaggaggaactccacggcgccgggcgcgccctggacgcaccgctggacgggagcaaggtcggaagaactccacgtacgcgaacgggagcaaggtcgccgcccgcctcacccgccttctccgccgttctcctcgccgccccggtgcgctcgtctgccgtgggcccgcagccgctccgcccaccggccgccggcttagatccctcactgaagaagaagaaagaagaagagaagagagaagagaaaagaggagaaggggaagaaatgtgcagctgacatatcggcttcacgtatatattttttttcctgactatatgccacgtcagtgaaaccacccatatatacctcacgtatatatatattttttcctgactaggatgccacgtaagtgaaaccacctataaattcggccggcttagatccctcactgaagaagaagaaagaagaagagaagagagaagagaaaagaggagaaggggaagaaatgtgcagctgacatatcggcttcacgtatatattttttttcctgactatatgccacgtcagtgaaaccacccatatatacctcacgtatatatatattttttcctgactaggatgccacgtaagtgaaaccacctataaatgtaaaaagttagggtggtgggaatcgaacccagctggccaaagcaaagtttcactccgctaaccaagttggcaagctgctagttgtgttcaataattcaatcaattaatacatattctatatcaatcgtgattttgaagtagattgaaaatggtccgactcgactattgagccgattaaaaatgattttagcaacgtttgaacaggatgacggacggaaaaaaaatccggaaaccttacgtattttttattaggggtgtgtgtgtctatatatatatatatatatatatatatatatatatacatacatgtatatatatatatatatatatatatatatatatatatatacatatatatatatatatatgtatatatatatatatatacatatatatatacatatatatatacatatatatatatatatatattgtcagggttacggataaggtataccctctatccttagacgtacgatgagtattgatacggtatacccacgcgtatacggatagttccagtatatgttaaggaaatctatcacgtgatagaaacagaatccacggatgtaaggagtcctactcgggcaagaccgggtctttaccatatcgtgagaggtccgatatctccgagttctacttggagatcaactaacccgcggtataaaagggaccccctgggcaggacctagggcatcgaatctcaccgcaaacacatccaccacagctacgaagccggagcgcataggagccaagtcgccgggagatctagtcgaaccaactcgactactctctcgtcggtaccatcgagttctgttattccctttgtattatgtgatttccatcatataatcccataccaactggattagggctattacctatcaaggggcctgaaccagtataatcattgctttctgtttgcttgatgccgtactacgtagatcctcgttccaacggaccccaggtctacgggtatcctccgttgacagtggcgcgccaggtagggcgacttggtgctcaaggttctactactatgacttcaagcctcttcgacgacagcgtcgaccccggcatcaaccaaggagcctcaacttcaacgatgctggtgtggactcaagtcggcgaaatcgtcttcccggtctacaccacgatgccgatctcgaatggcccagcaattaccaggagcgagaatggcgtggttacgaccccggtcgactccacgtcgaaagatcctcctgcagaagcggagaacggaacatcgacaacatttgagcccgagaaggatcctaacacggccaaatcttgtctccccgacgagaagcacgagccgacaaggataacttccgaggcgacaaggacctggtgtcctatccacaagaccaaaaggcacaccttgcaagcttgctcggtttttcccgacgtacaagctgaaatccgtgcctgcaaataacgtggaattcaacgtacttcccccactcgtgatgtctattgtcccattcacaaggcaaagactcacgacctctcgagctacaaggtccttctcagtgccatgaggacgtcgcctcctaaggtctagcagtcacaaatctcccctagagatgcggacaaggagcgaggagtggcgactatttcagatcgattcgtcggggtaatcgatatcgacccccacgagccgtcttcctacatctgctcgaagaccaggcctcatcatcaacaagtacagcacgcaacgtgtacgctattgatgggaccagcacatctacaggcggcaacacggaagcggaggatcaattggctacgcaggcccaacatatcagaaccatcaatgcaatactgagggaaaccccttatgatcccgtcttgaacgctgatcttgatcagtggatgaaacgactacgggaatcagtggccaacctcagtaacgcgttcgaggaagccgctgccagggcaccaccagaacaaccgccgacaggcggcgctaatggggaacagcctgaacagcggacgccacctcgtcaagccacccctctgcctcgcggcactagtgatctccgcgaccatctgaatggccgccgagaagcgcgacgtactcaagataacgaaaatcgttcccgacatcgcgtctcttcgcgacatcgcgagaacgaagagcaaggaaggcatccgagcgagaaccgagaccgtgatgatcgccacaaccgtcgcgaacgcactaatcgcgagcaacagatgccgggcgataccagtcgaggacgacgccgtaatgacgacgacgatggagatcagcgccgggacaacaacggtgggcgatgacaaggttctcaagaacctgagcgtcatcctcgtaatcgcactccgaagccgagtgactcgtcatcatcctcgtcatcttcatcatcttcatcatcgaacaggcatccacgacgagcacatgatcaccgacaacccaccgcccctagcggcgggtgcagagctttcactcgttttctgcgagaggttagatggcctgagaaatttcgactaggaacaatagagaaatacgacagaagcaccgaccctgaggagtttcttcaggtctattccacagtactctatgctgccggagtagacgacaacgcattggcaaattatttgccggcggcgttgaagggatctacacgttcatggctggttcacctcccaccctacttgatttcttcatggacagatctgtggcagcagttcgttgctaacttccaaggaacatacaagcgccacgcgatcgaagacgacctacacgcgttgaagcagaatccgggcgaatcattgagggactatattcggcgctttaatgagtgcagaaatacgatccccgagatcaccgatgcttccgtaatccgcgctttcaagtctgatgttcgagatcgctacactacccaggagttggcgacaagatggatcacgactgctcgtaagttattcgagattgtcgatcaatgcactcacgcggacgacgccctgagacgcaagaacgacaagccgaagacagggggagagaagaaaccagccaaggatgcacctgaggcaagcaagaggaagagtcgcaggagtaggaaaaggaaagctcaaacagaggtcctcacagcagaatatgctgacccacccaagcacctagacccacaaggtgacgacacgaagcaaatatggtgcccgatacacgagtcggacaagcactctctcgagacttgtttcgtcttcaaaaaggcactcacgaagcaactggcgttggagaagtgatgaggacacaactaactcggatataaccatggctactttatgtattaatcaaccaaaagtgcatatgttctatattagatttaccttgctaagttctcaaatggagaaagcggagcaatggcagtaccatgaattatttgaaacaaagtttgtggttaaggatagagcatgtcgtactataatcgatagtgagagttgcaataacttggtgagttcagatttggttgagaaacttgagttgcctacacaaccgcatcctcatccatattacatcaaatggttcaactcttgtggtaagttcaaggtaaatagaattgtgagaataaacttttcgattggaaattaccatgatactgccaattttgatcttgtccctatgcaagcatgttctttgttgttaggtcaaccatgggtatatgataataatggatcgcataattttgttgctaatacatacacatttaaacataatggtcggaaaatgaaattggtacctatgagttttactgaaattttcgaagataatcttgaaaggatgaagaatggaatcgaggaaattttcaaagatagtattgaaaggacgaaaaatagaatcgatgagattttcagagataccaggaaagatactattatgatgccttcaactaagtctaagttattacaaaatgaacgtaatgttgtgcctattgttttggatactaatattttgcaggcatctgagaataaacaaggtaatgggaaagagaagaaagacgaagaggaaaaagacctatctttagctccatgcatgcttgaagaatgtttaattaaccaagcacctataatttctgaagatgagaaaaaaggtaatgataatggtgctacagctacttaaggtatgcatatttatgaggtgccaactatgtccactacttatgctacattagagcaacccacggtggaaacaattgttgaaatacctttgtcacaaaacaatttccttgatgtttcttgtgataaagaagtgttgtgcgatgcttcacttatatccatgccacaactagtgaatgaacatgttagttctatagtagagccaccatgtgttcagtttaaacatgttattcacattgctagtgagaatgaagagcttaaattgctatcttctttaaatacttggggttatattcaatttgatgatatttgtccactcaactgtctaaagaagaaattatttgctagatttgaattgccatgtccttctgatgtgatttttcatattattggcaattatgatagtaaaggagaatataatgtgcatcgagtatatatttgttcgaatttgactatacctccttttcatgatgaaatgtattatctagaggaccgcatgcatataagtaattctctatctagttcctctagtt

SEQ ID NO: 10009 - DNA, 9868 bp, Oryza sativa
tccccctagccacctcagcatcgccccgccacgtcggcggtgggacggcgccaaagaggctggcgccgtcctattgaacgacggcgccagccactctggcgcctcaaaaaggaccatttttgggataagtttttctagagatctacttgcgaaataagtttttcaaaaggaccaaaatatgaaaaatccagtatatttgtcgcatacttaattagccacggttatatatataacgaaaggatttttcaaactatgttatactgataagtgaagcgctagttttgcatgtgtgggagatgctatatatacagatacatgtcaatacattaactaaagtagatatagaatacataatctgtagtacttaaacataagttctacggctctattgtatactttaatttagacgtggtcaaaattaaatttacctaagctatatgttatctgaaaaatcaatttttatcacgcgcatttagacaggtgtgtacccaactagaaatgggtatttttccaaaatatgcatttcagtgggtatatgcacgtactcaaatcttgatttcctggaaccatgaggtcccaattcatcttccttgcctaatttattagtttgtactctacaatatattatacctagtttaatagtatatatatatatatgtgtctatatatatatatagtgaatctattctacacccccctcccatgggccaatcccacctccccacccttcctagggcccaaatcccctctcccatatcagtcaaaggctggtcaaaaccccctcccgccggtcagacctcggtcaaacccgcccattgactccctcccccgcccaccacttcgttgttcacgtctcgcaggaattccgcagtaacataacggtcattgtgcagtaacatgacaactttcttgcagtaacaacatcgaaaaatagtcatgatggatacatttttttatgaacatcatggtgcagaccgattagaaaaattctatataacgtgggagatattgctctctaaagattgagatttactttttttaagttctcgtctctttagaacggcgtagtaacgcgatgatcaatgtgcagtaacacaactactttccgtagtaacaacgttataaaagcattattgtctcgatcatcgtgtagtaacaggattattgtctcgttgtaacattgttttaaagaattatggtgaaaacagttctaaaaaataatatgtgatgtgagagatattattgtttaaagattagaattctaaaagtttacttgtactaagcttgctactatgtatctttgtatggacaaagagaagtattttttagcacttgtgttttgcacaagattgagatttaaaaatttagctatgcacaagcagtggtactgtagtagtacctttactatcatatgttctctattactgtaatttcatcatgatgttactgcaaaacgtgcagtaacgacctataaatttcatagtaacgacttatacatttcgcagtaacgtaccatgttaagcacttctgcgataatgctagttccaaattaaagtaagaagcttcgatttctatagtaaatataactgattcgaacaaacatataaagcaaacaaacgataacctgtaatcacttagtgtcataaggtgaattggttaggggagttttccgtgaaccatgagatcatggtttcaagttttaaattctcttaatttatttttcttttttttagaaaaaagaaaccggatggagagattaggaggaggagccgggaagaggagggagagaaaaaaaagaaaaaaaatgaggagggagattgggaggagtagccggaagagaagggagaaaaaaaagagtagcaccgagagagagaaaaaagggggagggaggcgtgcgcggggtcaccaggagggagggaggcgcgcgcggggaggaggcagggaggcccgtggggagggaaggaggtgtgggctaggctggactggtagggagggggtgtagaatagttattctaagggaggggtatataatagagctactatatatataggcaacatatcctatgtacacaggccctcacgtgtacacacgtacacaccaactaaaaaatgtcaccaaaaaatctagaaaaaatcatacacatactttcaattgtattacacctagggttaaaatcttaacgtcaaattcattatattttagccgtaacaaaaaaaaacaaaaaatctgacagttttaaggttgcaattttgtcagaattttatcttttttgttattctctatgtagaatgaatttgaagatgcgactttgcacgtagatgtaatactattgaaagtacatgtatgaattttcctagaattgtttgtgataatttttagttggtgtacacggtgtatatacgcgagggcctgtgtgcataggatacgctcccatatatatatatatatatgtcgacgggggataccctagaccagatatagagggtattggggtccgttggaacgaggatctacgtagtacgacatcaagcaaacagaaagcaaggattatactggttcaggccccttgataggtaatagccctaatccagttggtatgggattatataatggaaatcacaaattataaagggaataacaaaacttgatggtaccgacgagaccgtagtcaaattggttcgactagatctcccggcgacttggctcctgtgcgctccgacttcgtaggctgtggtgaatgtgttcgcggtgagattcgatgccctaggtcctgcccagggggtccattttatactaggggtcagttgatctccaagtaggactcggagatatcggacctctcacgatatggtaaagacccggtcttgcccgagtaggactccttacatccgtggattctatttctattacatgatagatttcctaaacgtataccagaactatccgtatacgcatgggtataccatatcagtactcatcgtacgtccaaggatagagggtataccttatccgtaaccttgacagtagcccctgacttctgcttaaatgaactcatgtaatcgatcggaacttctgatgtcggaatcgttgtcattctcatctggtcgatcccggcatgagaaccgtagaggcaaagagtcatcgacaacgtcgcatgaagttcaacagttatgagtgaatttaaattgaagtatgaaaactaccgcgcgcaatggacccagaattttccggcggcaatctctctcctttcctcggaatacgcaccgtcggtagtgcacttatttaaagggattttggaaacccatttgaagtccgttcaccaaaaaactcttcagccttctagcgcccttcgtcttctccgctctccgcaaagaaaaccctagcttgcttcttccctcttgttctccggcgatcctccggcggcgatggatcttgacaagtccacctcaaccaccgcgtccatgaagaagttgcaggacgacggtgccctccctggtcgcgggaccatgtagagggagacaggaggtattaaacccgaacccgtcttgggccgcatggttgtggtcgaagattacatttcttgcggttttcttcctctgccttccgagtttcttcttattgtcttgaacttctatggtctttctttgcttcacttgaacccgaattccatcgcatttcttagcatctttgctcatctttgtgaggcctacattggggtagagcccttccttgatctcttccgcttttactacaagttgcgttggatggaacccaacagggtatccggatgcgttggattccgacttcgggatcgcctgaagtcacgttacatacccttccaatgcccctcttctcgtagcaagtggcaggcgagatggttttatcttcagatagaaaattcagaccccgtccttgttgttcctgaagaacagccagacaaaatcccagagtggaccgccaaacccgccctaactccctccctccagtctttcatcgacatcatcgatgacctctgaaaacgggggttgtcggggtacgaagtcgctgccgactttgtaggtaggcggatccaaccgctgcaggctcgcgcccatccggcctttgattactctgggccagaagacatgacccgggtttctcctcggggtattttttcttgtatttcaaactttactccgagtgcgtctgtttctcctgacttatcgagttcttgttctcgatttataggtctggacagtgacaccgtgggacgccgcgtcggccaggtgatgattagtgccccctcagaggcgagcgacatcccgatccccctttgcgagaggggcccggccgaacgcactgctgcgatcaatgtgagtgtactcaatgactcctttacatctttctcctcgagatcgcgtcgtgatttcacgttatgtaggctctccctctgacggacgtcatcggaccgctcgtggatcatcaggcggcggcgtcattgaaggagggcgtcgccaaggaggcgtccgatgttgctgctgctgccgctgctaccacgagtggcagcaacattccgaagaaggggagtaaattctcctctgtactcgggacccatcggaaagcgccaaacccggcggtaagcctctctcttgttttttaacgcgtagtcggaataacttgacctgacaccatctcatcttacttaggactcagacgcgtctcctctggctcatcgaaggcaaaggcttgtgacgatcggcgagaagtaagtagacgtttttgaagtcttttcattcacggagtcttgatcgcttagctttatgaaagagaggaaaatcttcgtaggacggcgcgggcgaaggcgacgcaaggtgggaccgatgctgcctccagcgcgtcccctgcggcgacctcgacagatgtcgtggtcgctactaaggaccgggaggcggcaccgagtaaccccatcatcagcctcatgcctactcggggcccatccaccgatgacctcacctggggggagctccaagtggagatggagcatatcctccaggccggcgctcgcggcgtaggtcgtgagattgaggaggccagggtggtggcgtcgtcggcaaaccagcgtgccgaccaactggctcgcgacctggcggaggcccgcgagaacctcctaaagatgagggagctggtggtcggcaacgagaggcagcggcaaggacttgagcaccggatgtcggagctcgagaacaacctgtcaaggatccgaggctcgctgcggatatcgcacaccggcctgcaccaactcgccggcgagtgtggtgtcacgactaccatcccggcgaaccctgacgagttctcgctgacgtcctcactcgcggaactggctacggcgatggaggagatcacctccaagcatgcggccaggattggggaggagacgtccaataggatctacaccggggcgtgccatgtcctcgcatgcgtgaggctggcacaccctgatctagaccttaagaaggctttggatcagggggccgccgatgacgcgcgcaagggtgtggtggaggaagtcgatgacttgggggagtccgtcctccccctttttgaagagtaagatatttgttttcccctatacccttaatcctcatgctgtaaaacctttgttggatgcaaactgctcttatctgaacagtcgtttccctcgttttcttagcatgtgattccgagtactttgttgtcgttgtagagatatcgatattgaggatgtccagcagcgcgggcagcctaatatgccggtggtcgttccggcgcttgcactcgagccgtttgtgccgcgggaagaggtcagtcaaagcccgtccgcggaggcgaatatggcgatgacgtccctaggtttgcgtcttagtctctttcactccttgtattcggattgacttaattagctgtgtcctcgaaagagaagagtagcttgacttagtctttttcgtcccaggcagattttgagaacacgatggctgaccgagtttgtcgaatccaatattggaggacgaagctcgagatggccaaactcgaaaacaccatgatcgaggtgaagaaggatcaggctgtggaaactcttcgaggtcgcgaggtatggttcaactcgtacctcaagagctgctgtacggcgatggcgagggtctgcaaggagctccgagttcctcgcagagatctcgaggagtcggcagccggatatatctcatggttgaatggggcttgtgcacagctcgaagggatcggcaaacgtatcgacgaggccctaaagcaggagtgtcgtcgatcgagccagtacaccagaggacatgtgctggcctgcatccgagatcaccgcccgcagcagcacctcgagttccttcacgaagggttctcacgttctcggaggactcccacggagattgatggtcttgagcagtcgatggcgccgcttaccgagaaggtatttcggtccgtggattggcgttggccgtcctggtagtttttgtatcctgtaaaaaatatctcaaagaaacatgtaatatattttggagtatctatgacttgcaagaaacacttgtgaaatagaaaaggaatctatctaactaagttttcttactctgggtatgttgtgtatgagcgttttctcactttgcgacttcgatcagtcacttgagccatacactcttcctagcccctagccttgtcgtcggagaattattctcagaggataaggctcttggactcttgacttgccttggttgaaaaagcgctgaccctagcccccagccgtgaagttggaaaactcaatttccgattacacggcttggttaatacgcacggcgagaactcttacatgaccagaacttacatggtcgtttgtctctacatgatccgacaaggccttatccgctctaggcgtccccagccgaagttcccttaggttcctcagaggccttgtcaggatggcgtaaagggacatgaggataggtttcaactctaggtgtcgtcgtggtaagggatcgccgggaaggaacacttagactgtagtctttacctgaaatcaatctttattgaaatcgtaagatgtcttacaagtatggatactattgatttatacataaaattttcgtaattgatcaatgttccatgaatttgctaactcgcgaccatcgttgtctgcaatcttgaatgcacctggccgcaagaattgcgtgatcgtgtatggtccttcccacttgggtgagagcttgttacgccctgcttggctttgaacccgtcggaggacgtaatcgtcgatcaaaagtgtgcgtgctctgatgcgcttctcatggtatcggcgaagggcctgctggtagctggctgctctgacaacaactctttctcgatgttcctcgagtagattcacatcgtcacttcgctgcttctcctgttcctcgtcagagtacttctgtactcgtgtgctctgatgccgtagctccgtggggagcatagcctatgagccatacacgaggaagaagggtgtctccttattgaacgttgtcggtgtggtgcgcacggcccatagatcagaggggagttcttcgacccacttcttgtcgtgtgacatgaatctgtcgtagactcgggtcttgatcccttgtagtactatgctgtttgcccttttgacctgtccattgctctgagggtgagaaaccgaggcaaaacaaatcttgactcccaatccaatgcagtaatcctggaagtcggcattgatgaactgggagccattgtctattatgatgcggtgaggcaatctgtatctgcagaatatcctttgataaacttgatggcgtcgtcagccttgatttcccccgtgggcatcgcttcaatccacttggtgaacttgtcgatcgccacgaaaaggaacttgtagccgccctgtcctcgtgggaatggtccgagtatgtcgagcccccaacacaagaacggccatgtaagagggatagtctggagcgcttgtgccggtagtcttgtgtgtttgctatgaaattgaaaggcttcacaccgctgaaccatgtcgcaagcgtctttacgcgcggttggccagaaaaaaccttgtcggaaagcttttcctaccaacgtccgaccggcggcgtgtgacccgcacatccctttatgtatgttgaggaggagatgtttgccgtcatcgaacgagatgcatttgagaagtaccccttttggcacctttttgtacagatcgttgccgatcatacaatagatcttggcttgtcgggttattttctcggcctctgcatcgtcctcgggcaactcgtcggtactcaggaacttgatgagcggggtccgccagtcctctgtggtctcgatgtcggcaatgacgtgttctgcccctatagcccccgagctaatgtcggggacaactgtgctatcttcgtcatttgctttttcactgatggctttgtcaagacgtccagaaaagtaccaggttcgagtggctctcgtctagacgcacgccgtgctaggtcgtttggttcaatgttgtccttgcgatatacgtgccggacctcgatcccatcaaaccttttctctagcttcctgacttctgcgaggtacttggataactcggggctagagcacttgtagtctttgtgcacctggttcgcgactagttctgaatcccctttcacgattaatcgcttgactcctagtgcggctgctgctcttatcccgatgagtagtccttcgtactcggctgtgttgttggtcgccctgaagttgaggtgaattgcatgcttgaactgatctcccgaaggtgatgtcaagatgaaccctgtccctgctccttggctattgaatgcgccatcgaacgccattgtccatgtctcgctgtcggtctgactgtctgacctgttgtcgagcatagtccagtcagctacgaaatcggcgaggacctgggacttaatagttgttcgtggcacaaagtgaacgtcaaattggcttagctcgactacccattttgcaatgcagccgacgacgtctctgtttctcacgacttctccgagggggaaggaggaaacaactgtgactctgtgggcttggaagtagtggcgtagctttcttgatgtcatgattactgcataaagcagcttttgaatctgtgagtatcttgtctttgcgtcgtggagagcttcgctgacatagtaaactggtctttgcaccttctctctcttgacaacaatgacggtactcacagaatatggtgtggcgacaatatagaggaataattcttcattaggttggggagcaacaagtacagggggatttgacaggtagcatttgagcgcgatgaacacgtcttcggcttcctgtgtccacacaaatttgtcttgtttcttcagcagagcgaagaaaggttgtcctcgctctcccatcctagcgacgaatctgctcagtgccgccatgcatccagttagcttctggacttccttgagtcttgtgggcgactttatgttctcgattgccttgatcttctcgggatttgcttcgatccctcttccggagacgaggaatccgaggagcttgcccgatggtcctccgaacatgcacttctccgggttgagcatgaggcgatattgtcagaggttgtcgaacgtttcctggaggtcatcaatcaatgagtcgcttgtctttgtcttcacaacaatgtcgtcaacgtaggcctcgacattgtgtccaagttggtcattaagtgccccttggaccgtgcgctggaaggtatttcccgcggttatcagccccaaacggcattttgatgtagcagaatacaccgaatggcatgatgaatgttgtcttctcctcgtcctcttttaccatgctgat

SEQ ID NO: 10010 - DNA, 26894 bp, Oryza sativa
cccctagccacctcagcatcgccccgccacgtcggcggtgggacggcgccaaagaggctggcgccgtcctattgaacgacggcgccagccactctggcgcctcaaaaaggaccatttttgggataagtttttctagagatctacttgcgaaataagtttttcaaaaggacaaaaatgtgaaaaatccagtaagccagcatgcaggtcaccagcggcgtcgtgatccatcggcaacttgatcggcatcgatggcgcgcggcgattagatctatgtccacagccacgttgcagcgactcgatcggtgtccacggcgcaggcgctcagccgatcggcaaagccgaaggtgacgaccaatccattggctcgctgaaatcatatggtaaaggcaaaaagcggcgctggagacatcacagcactgcttacagcatcgacaacagcatcgtccaccgtacatcaatagcatcgttctgggggtaggtactcccgttttgattttcttttctggaaaaataattcccaaaattcttaaatccatgcaaatcgatcggaagctacaaccaacatctcgcataaatctggtggtgaccaatttacccagccattcggtatttacaggttgggtgcgtctgccccgtcagcggcggcgagccgtcgaaccctcttctcaagcggctgacaccaccagcaagaggaggctgcaccttgagcatgtagctatccaggggcctgaagcgttcggggtttatacgcgagcggagcgccggcagatccaaccatgcacatgtttatacccaaatttgacacctatgattaaaataggaaagattgccaaaatttagaagtctaccggtttcctccgagtgggccggtctgactgccgtgtgttgggcggtcagaccgccggttgagggccagtcagaccggcggagtgtggccagtctgaccggcaggtccgagtccgactgtgtttcgtcaggtttcgaggtttccttgctcaggaaggcatgttttgggtttcctttagtttctaccccgagttggacgtggaggagggcctgtagaggacaagaccaacccctatataagggacatggccgattcattgtaaaaaaccaatctacaataaatcaatcgaatcgtttttcatattgcttttagttttctcttagtttatccatctttgtcggtttgcgtcgtaaaccgtccgccgccgctgccagagtgcgacatctctttgtaggtttgtcctgaaaaccttccgttttgcccacgagacgggtagttatctagaaatcggctccgctagccggtttagttattaaaacccatctagatttagctctttgctagatcgaggtggttggcgactctaggatcaccgcaagacttaaggtgctgcgatcgtgcttgttaacttgtcaaaaaagttgccaacatgatttttggcgactccgctggggaagagatccgttcatcgtcaactcaacttcgatttcgccatgatgaagccgccatccaagacggaggtggagccatccaatatgataccggtcacattggatgatttcgtaggagaagaccgcaaagctatggaggagtacatcaatgaactcacacgggagacgttgatgagggcaagcaccaggactcgtcaaggtgtgatcatcaagcccgggccacgtcctaagctcgcccccgatttggtaagcaatgatgaggtaacacaatctatccaacaacaagtagcatctacaatagattcatctatgattgcttttaaagataagttagatgcaacttttatattgcgtttgttttctttatctttgtccggtaatgcttttacattgtttacttctttaccggcaaattctattcatacttgggctcaattagaagaaaaatttcatgattatttctatactagagaaactgagcttaggttatgtgatttaacatcggttaagtaaaaatataatgaacctgtcattgattatattaagagatttagggatgttagaaaccgatgttatagcttgtcacgaccggaaataacccaacgggcgttccttacatgcgtgtattattccttgtcccaggaggcaaggtacaccaaaagttgatacaatacagagtttaacaagcggaagcgtaaatagttaatttattacatgggcggcgagggcccagcacacatgaagataaacgaaaaacaatggaagactagggcgacgaccacaggcgcttgacggcaggcacgagctagacaccaaagccttcatcatccaggaactcctcttctgggattgggaaaaattgagcaagactgagtacaaccaccgtactcaacaagacacacccacgagtgcaaaataaatgcaaaggagtacaagggagttataatataggggtggttagggtttgcagtgaacagcattaaaagacacttagttgctcaaagctatttcgtaattacgatcctagagctatacaatattattaatcaaggccatgaacccacacgaacctgccttaacccaaggcctacgatgatttggaccgaactggcaacctgaccctgggtcctagctcgtcccaagccaacccaggccaaccatttcacattttagttgttaagcgggttttaagaattaaaacactaacttgggtacattgctaggcatgcccataaccgagggcgcggctattcgaataggttatactctgatcagaggtgtacatctttacccacaagacacatcttcttcacgtgtaaccatgtgccacataccaccacggtatacggacggaagacgtgacatagtttccaacccatcctagccatagacaagagtaccgacccaaccccacctacggccggaacctccaggacaggtaggcaggactgagcccatagcagtaggacaccagccctgtgccatgacatctcgactaccgggccgcagctcgtgtagccttcatttgccctagagatgtccatcgacccccgacttcgtccatctccatccgtatacttttgtttataaccagactgagccacaaactaagccttacccactagacatgtggaagtacggtagtgctttgcaacagaggcacgagcttaatccttatagtacccaaggtacgacaaacaaaacccaaccacgcacctcgagcccagcctaaaaccattttgggggttttgaatagagggggaggtatgtgtccaattccaccataatccaaccattccatagtgtctaagtgatatgagaattcccaaagtctaaagttataaaaccacctaatgttgcctaattaaccagcgaagcatctacctaagttcatactagtggaaccataaatagagtacccactagttggggttttattttcctagggtgaacaaggtaataataaggtcataacaaaggtaaataggcatggctaaataaaacagtgataacgcgggaatttaaataaagcgataatgcattaatttaaatcaaaataattttataaactgggattcaatatgctcaaggatgatgtgacttgccttgctcgcttttccaaacgtcggcttcaacctccacgtagagcggatcttccgaagctacagcgtctacacgaccaaagaaaaggaaaaagtattttactctaataaactccatataacaagcaggaacaaagtacaaaaatgggttcttgacttcttgaggaaaaattagagacttgaacggtccaattccgagttcaaatggccaagttatggccatttgaagtttatatgctctttaagtgaatatttgcgaatttcttcatttaaattttaatttaaaaaggatttattgcgtcagccgaggggagagcgcgcgcggaccgggtccacgggggtggggcccacgcggcagcctcacggtccacggtggactgggtgcacccgggctcacaccggccggagccgtgggccccacgcgtcagcctcactcgagggcacgggcggctgacggccgggccccacgcggcggccactcggcgcgcccgaaggcggccacgacggcgcggtcggcggcaggcggcacccgcgcccctatggtcgccggcagcggccataggcacggcggagcagcggtcgagagaggggaagggaagggggaaaagaggcggtggtccacggctcaccctaggtcgacggcgacgacgaaaaaggcggccagagcggaggaaggcggcggcgcggctcgggtcgacggggtcggcggcgttccggcggtcagcgagctcggcgtgggggtggacggggtcgacggcggtgcggctaagccggaggaggcgacgccggggcgggagacggtcctggcgagcggagaaggccggccggaggtcgtcggcgacggaggagagagagggcaacgacgcgagctcgattccggcgaggagaaggcgcggcaaagggtggaaacgggcgaaggaggtgcggggagggtttaaatagggttggaagggggagagggcggccgggagaggaaggaaaccggccgggaggtccggctgccatcaatggcgccggcgaaatttgcgtgggcaaatccggccgtttgaatgcgagagagagagagggaaaatggggggaaagggggaggggatcccggggaatgattccccccacttaattgcacgcggggacggcgggatgcggcggattcggcggcggcggcggcgcttagcgcgggcggggcggcgggaggacggggatgatgggtgggccccactcgtcaacgagggtggcgggcgggcccgcccgtcagcggcgcgcgcggggggagaggccgagtgggccgcggggagaggagagagacggggaggggactctttagggtttttctttttataaagcctttttaactttgtttatttcttcttaattattatttgtgctctgaaaattccactaaaatttatttacacattttaggcttttaggaattatacaaaaatactctaagccttatttgacttttactttgcacattttaattttttttgaggctttcacgaggattttaattattctaggcataattttaaaggatatattttagggtcgctttgggacgtgacatagcttgaatataactgacagagatttggctggtcttgcttttaatagtttaattgctccttttagagaaaaactagatggccaacaatttcttgatgttagtcaacttatgcaaagggctctcgcttgtcgcgtcccaaatcgactctaaaatacatcctcgaaattatgcaaagaataagtaaaatccatgtgaaagcctccaacaattaaaatgtgcaaagctaaaagtcaaataaggcttggaggatttttgtatatttcctaaaagcctaaaatgcgtaaataaattttagtggaattttcagagcacaaataataattaagaagaaataaacaaagttaaagtggttttataaaaagaaaaatccctaaaagtccttttcccccccgcttcctctcttgggccggctcggcccagctccctccctctctctcctctcccctgcggcccatcggccttcccccgcgcgcgcgtcgctgacgggcgggcccgcccgccaccctcgctgatgggtggggcccacccgtcatcccctacctcgcgccgcgcccgccgcctcgcccgtgccctagcgccgccgccgccgcggattccgccgcatcccgccgcccccgcgcacaataaagaggggaaaatcactccccgtgattccctccctctttccccccacttttccctctctctctctctcggattcgtttggaaatcctcccgcaaacttcgccggcgtcattgatggagccgagatcgccgcgccggtttccttcccctccggccgccctctctcactcccaacactatttaagcactccccgtgcctccctcctccgtttccgacccttgccgctttctctacccgtcggaatcgagctcgcgccgtcgtcctctctctccgccgtcgccgccgagcttcggttcgccgccgtcgtcgccccggacctcctcccacttcggcatcgcctccttcggcttcgccgcgtcctcgtcgacctcgtccaccccttcgtttcgcccgccgaccgccggaacgccgccgtcctcgtcgacccgagccgcgccgccgcctctctccgcttcggtcgccgttcccgtcgtcgccgtcgacccggggtgagccgaggaccgccatctcgcttcccccttccctcccctctctcgggcgccgctccgtcgcgccggaggtcgccgccggcgaccatcggggcgcgggcgcgccgcctcccgtcggccgtgccggcgaggccgccttcgggcgcgccccgcggctgccatgtggggcccggccgtcagccgcccgcgccctcgagtgcggctgacgtgtgggacccacggcgccggccggcgcaagccgcgtgcacccggtccaccgtggaccgtgaggctgccgtgtgggccccactcccgtggacccggtccgcgcgcccctcccctcggctgacgcaataaattcgatttaaaattaaaatttaaatgaagaaattcgcaaatatccatttaaagagcatataaacttcaaatggccatatcttggccatttgaactcggaattggaccgttcaagtatctaatttttccttaagaagtcaagaacccatttttgtgctttgtttctgcttgttatatggagtttagtagagtaaaagccttttcttttccgttggtcgtgtagacgctgcagcttcggaagatccgctcttcgtggaagttgaagccggcgtttgggaaagcgagcaaggcaagtcacatcatctttgaacatattgaatcccagtttgtaaaattatgttgatttaaattattgcattatcgctttatttaaattcccgcgttatcactgttttatttagccatacctatttacctttgttatgaccttattattgttattgttattatttctttgttcaccctagattaaacaaaaccccaactagtggacactctactcatggtaccactagtatgattataggtagatgcttcgcttttaattaggtaacattaggcggttttacaactctagactttgggaatgttcatatcacctggacactgtggaattgttggagtattgtggaattggattcacaccgccccctctattcaaaatccccaaaaatggttttaggctgggctcggggtgcatggttttgatagtagcacctcggccatataaggaccggtcttcgggcctctgttgcaaagcactaccgtacttccacatgtctagtgggtaaggcttagtttgtggctcagtctagttataaacaaaagtacacggatggaggtggatgaagtcgggggtcgatggacattctccagggcaaatgaaggctacacgagctgcggcccggtagtcgagatgtcatggcacagggccggtgtcctgctgctaggggctcagtcctgcctgcctgtcccgggggttccggccgtaggtgggattgggtcggtactcttgtctatggctaggatgggttggaaactatgtcacgtcttccgtctgtataccgtggtggtatgtggcacgtggttacacgtgaggaagatgtgtcttgtgggtaaagatgtacacctctgatcagagtaaaatctattcgaatagccgcgccctcggttatgggcaagccgagcaatgtacccaagttagtgttttaattcttaaaacctgcttaacaactaaaatgtggaatggttggcctgggttggcttgggacgagctgggacccagggtcgggttgccagttcggtctgaatcatcgtaggccttgggttaaggcaggttcgtgtgggttcacggccttgataaataatattgtttagttctagaatcgtgtttacaaaatagccctgagcaactaaatatctttaaatgctgtttactgcaaccctaaaccctttatggtataactcctttgtactcccttgcatttattctgcacttgtgggtgtgtcttgttgagtacggtggttgtactcagtcttgctcaatttttcccaaccccagaagaggagttccaggaggatgaaggcttcggtgtctagctcgtgcctgccgtcaagcgcctgtggtcgtcgccctagtcttccgctgtttctcgtttgtctctgtgtgtgctgggccttcgttgcccatgtaataagttatctatttacgcttccgcttgttaaactctgaattgtatcaacttttggtgtaccttgcctcctgggacaaggattaatgcacgcacgtaaggaatgcccgttgggttatttccggtcgtgacaagttggtatcagagcccccttgaccctaggacgagccgtagatcccaagccttagcaatattttcgaaataaaaatcctttgtatttgtgaaaatcctctagtctctctctgtcttgctgcttcatttatcgccaaaatctgacctttaaaatgttgcttttctttttgtttttgtttgtagatggccggcagcgtcacccgtcgtggtttggacatgactggtttcgtcttggagctgcggggcatgtgcgtggccgtggggtatccacacggagtggactaccaggccaggccgcttctggagcaggagggtgacgatgcagagccccacgctgcttgggaggtcactgcagtgatcctcgctggctctcccgagcggacttcgctgacagtcaccgcgggtggagactccttccccgccgcttgccagagcgccgctctcctcgccatcggcactcttcaccagcgctacccggacgagttgcagcactcgccctaccgctaccaccctcgtcgcggaggagcccgcgaccacgccaccttccgggatgctagctcggaggatgacgctaccatcgtgcacttggcgcgcatggtggaggcgtacgacgcggctcgtatcgacttccatcagatggtgcgccgtgggatggtcgagaacaacctgaagatcctggagctgcgtcaagagaacctgcagctcaagaaggacctggacgcagtggaggcgcagctgcatcagctcaagatcgcccagggagagatctgccgccccaagcgtcgccgcgtctgccgcagcctgaagatcaccgcccgcaagagcacctccaggcccgagcttgttcgtcagtccctggcgtggacttgcttcgtcgagacccctcgtgccgagcccgcgcccgtggttccccaggagggggaagcctccggcgttggtagcacagaggatgcgctgttgcttaccttccgtcctggcccgtcgcagcagtagacgagcagttagtaggcttgcgcgtgtgttctttctcgtttgtcttcttgttgggttgtgtggggcacggttatgccggtgtgtggtgtaactgtgtcggagcctgtctttattttattcgcctaagcaacttgaactttaatgaacccatttaatagcagtaataaatttaagaattatggtagtcgtgggtggttagctttaattgtcagctctctctgtttgctggttctgtgtggggttttcagatggtgatgaccaggagaagtgctaacaccggtgatggcaaccaacctgaaggcagcaaccacaaccatcagggcaacccacctccacctcctcctccgcctccaccaccaccaccagacaccaacgccattctcacccaaatcctcgcccagcaggccaacatgatgactgctttcctccaccacctccaaaatccgccacaacttaatgctccaccaccaccctcacaacactctaaacttgccgagtttctccgcatccgcccacctaccttctctagctccaacaaccccgtggatgcgttggattggttgcatgccgtggggaaaaagctagacactgtgcagtgcagcgatgaggagaaagtcatcttcgccgcccaccagctgtagggacccgcatctctatggtgggaccatttccaggctacgcagccagagggacagcctattacatgggctcgcttcaccgccgctttccgaagaacccatgtgcccgccggagtcgtggcccttaagaaaagggaattccgagagttgaagcaaggcaaccgctccgtgatggagtatttgcacgagttcaacaacctggcccgttacgctccggaggatgtgcgggaagatgaggagaagcaagagaagttcctggcaggaatggaccctgagctgtccgtccgtctagtctccggggattatccggatttccaatgtctggtggacaagagcatccgcttggaagccaggcacaaggaactggagtcgcacaagcaccgcttggcgaatttccgcaaccaacagggtgctaaccaaagggtccgctacaccaatccctatccagggggatcctcctcgcagcagcaacaacagcagcagcaacctcgctccgcgcctcgacctcaattcgtggtgcgcgtcccacagccgcagcagcagcagtatcaacaagggactcgtgcgccccgtcctcctccaccgactgtgcagcttggtcaaggccgcagggacgctcaaggtccgcagcgtctgtgcttcaactgcttcgagcccgggcactttgcggataaatgcccgaagccaaggcgttagcaaggccaagcgcctccccgccccaacaacggtggtaaggacgtcattcggggtcgtgtgaaccatgtgacggccgaggacgtgctgacaactccagacgtcatcgttggtacgttcctcattcattccatccctgctaccattttgttcgactctggagcttcccactcgtttatatctgtgccattcgtggggagaaatcagttgggggtagaaaggcatagaaaccctctgctcatcaccacccctggaggggttatgacagcaaagtattatagccctgccgtccctatagaaattcgggggattccttttccctcggatctgattctgctagacaccaagaacttggatgtgatccttgggatgaattggttggctcaattccaaggagtagtggattgcgcgagacgcactgtcactctgtaccgagggccggaacaaccggttgttttctttgcacccccaacctcagtcagaagttcagaacttcatcagatagaactgtcagaaattcccatcgtcagagagttcggagacgtgtttccggaagaactacctggtatgccgcctaagcgagagattgagttccggatagatcttgctccaggaaccgctcctctgtacaagcgaccctaccgtatggcagcaaatgaactggccgaagttaagaaacagttggaagagctgaaagaaaaggggtatatacgtccgagtacttccccctggggtgctcctgtgatttttgtggagaagaaagacaagacaaagaggatgtgcgttgactacagagctctcaatgaagtcaccatcaaaaacaagtaccctcttccccggatcgatgatctgttcgatcagcttaaaggtgccactgtattctccaagattgatcttcgttccggatatcaccaattacgtattcgcgaagaagatattccgaagaccgcattcaccacgcgatacggactgtatgaattcacggtgatgtcgttcggtttaaccaatgctcctgccttcttcatgaacttaatgaacaaagtgttcatggaatacttggataagtttgtggtggttttcattgatgacattctgatatactcacaatcagaggaagaccatcagcaccatctccgtctggtattgggaaagttgcgggaacatcaattgtatgccaaacttagcaagtgtgagttctggttgtccgaagtcaaattcttagggcacgtgatatctgctaaaggagttgctgtggaccccgaaacagtgaccgccgtcaccgattggaagcaacccaagacagtcactcaagttcgcagtttcttaggtttggcaggatactaccggagattcatcgagaacttctccaaaatcgctcgacccatgacacagttgttgaagaaagaagaaaaatttgtgtggagcccgcaatgcgagaaggcgttccaaactctcaaagaaaagctagtttcctcgccggtgttaatcttgccggatactcacaaggacttcatggtgtattgtgacgcttcgcgccaaggattggggtgcgtgctcatgcaggatggttatgtggtggcctatgcctcacgccagcttcggcctcatgaaggcaactaccctactcatgatttggagttagccgcggtggttcatgccctaaaaatctggcggcactatctcattgggaatcgctgtgaaatatatactgatcataagagtttgaaatacatcttcactcagtcggacctgaatcttcggcaaaggagatggttagaactcatcaaggattatgatgtgggaattcactatcatcctggtaaggccaacgtggtcgccgacgctctaagtcgaaaaggccattgcaacactcttaacgtctgtggcattccacccgaacttaatcaacagatggaagccctgaacctaagcatagttagtcgcggattcttggctgcgctggaagccaagcccaccttgctcgatcaaatccgcgaggctcagaagaatgatccagacatgcatggactcctcaagaatatgaaacagggtaaagccgctggtttcacagaggatgaacacggaaccctatggaacggaaatcgagtatgcgttccagataacagagaacttaaacagttgatacttcaggaagctcacgaaagtccttattccatccaccctggcagcatgaagatgtacttagacttgaaggagaaatactggtgggttagtatgaagcgggaaattgcagagttcgtggccctttgtgatgtgtgccagcgtgtcaaggcagagcaccaacgaccggccggacttctccaacctctccaagtacctgaatggaaatgggatgaaattgggatggatttcatcaccggacttccaaaaacccaaggtggatatgattctatatgggtagttgtggatcgattaaccaaggtagctcgattcattcctgtgaagaccacctatggagggaacaaactagccgaactctacttcgctaggatcgtaagtctccatggcgttcctaagaaaatcgtatctgataggggaagccaattcacctctcacttttggaagaagctccaagaagagctgggtacccgattaaacttcagcaccgcgtatcacccgcagacagatgggcagaccgagcgtctaaatcagatcctagaagatatgcttcgcgcatgtgtcctggatttcgggaagacctgggataagagtctcccctatgccgagttctcctacaacaacagctatcaagccagcatacaaatggcaccttatgaagcgttgtatgggcgcaaatgccggacaccgctaatgtgggatcaagttagggaaagccaagtgttcgggactgatatcctgagagaagctgaagctaaagtcagaaccattcgggataatctaaaggtggcacagtcccggcagaaaagttatgcagataaccgtcgccgtgacctggaattcgcagtggacgattttgtatatcttcgggtcacgccattgcgaggtgtacacaggtttcggacaaaagggaagctcacacctcggtatgtgggtcctttccgtatcgttgctcgacgcggagaagtcgcttacaaattggagctgcccgcctccttgggcaacgtgcatcatgtgttccatgtgtcgcaactcaagaaatgccttcgagtgccatccgagcaggccgactcagagcaaattgaagttcgcgaagacttgacctacgtggagaggccagtgaagatcctggacaccatggagcgcaggaccaggaaccgggtaatccgtttttgcaaggtccagtggagcaaccacgccgaagaagaagctacctgggagcgcgaagacgagctgaaggcagcccatccagatctcttcgccagttcttccgaatctcggggtcgagattccgtttaaggggggtaggtttgtcgcgtcccaaatcgactctaaaatacatcctcgaaattatgcaaagaataagtaaaatccatgtgaaagcctccaacaattaaaatgtgcaaagctaaaagtcaaataaggcttggaggatttttgtatatttcctaaaagcctaaaatgcgtaaataaattttagtggaattttcagagcacaaataataattaagaagaaataaacaaagttaaagtggttttataaaaagaaaaatccctaaaagtccttttcccccccccttcctctcttgggccggctcggcccagctccctccctctctctcctctcccccgcggcccatcggccttcccccgcgcgcgcgtcgctgacaggcgggcccgcccgccaccctcgctgacgggtggggcccacccgtcatcccctacctcgcgccgcgcccgccgcctcgcccgtgccctagcgccgccgccgccgcggattccgccgcatcccgccgcccccgcgcgcaataaagagggggaaatcactccccgtgattccctccctctttccccccacttttccctctctctctctcggattcgtttggaaatcctcccgcaaacttcgccggcgtcattgatggagccgagatcgccgcgccggtttccttcccctccggccgccctctctcactcccaacactatttaagcactccccgtgcctccctcctccgtttccgacccttgccgctttctctccccatcggaatcgagctcgcgccgtcgtcctctctctccgccgtcgccgccgagcttcggttcgccgccgtcgtcgccccggacctcctcccgcttcggcatcgcctccttcggcttcgccgcgtcctcgtcgacctcgtccaccccttcgtttcgcccgccgaccgccggaacgccgccgtcctcgtcgacccgagccgcgccgccgcctctctccgcttcggtcgccgttcccgtcgtcgccgtcgacccggggtgagccgaggaccgccatctcgcttcccccttccctcccctctctcgggcgccgctccgtcgcgccggaggtcgccgccggcgaccatcggggcgcgggcgcgccgcctcccgtcggccgtgccggcgaggccgccttcgggcgcgccccgcggctgccatgtggggcccggccgtcagccgcccgcgccctcgagtgcggctgacgtgtgggacccacggcgccggccggcgcaagccgcgtgcacccggtccaccgtggaccgtgaggctgccgtgtgggccccactcccgtggacccggtccgcgcgcccctcccctcggctgacgcaataaatccgattttaaattaaaatttaaatgaagaaattcgcaaatatccatttaaagagcatataaacttcaaatggccatatcttggccatttgaactcggaattggaccgttcaagtctctaatttttccttaagaagtcaagaacccatttttgtgctttgtttctgcttgttatatggagtttagtagattaaaagccttttcttttccgttggtcgtgtagacgctgcagcttcggaagatccgctcttcgtggaagttgaagccggcgtttgggaaagcgagcaaggcaagtcacatcatctttgaacatattgaatcccagtttgtaaaattatgttgatttaaattattgcattatcgctttatttaaattcccgcgttatcactgttttatttagccatacctatttacctttgttatgaccttattattgttattgttattatttctttgttcaccctagattaaacaaaacccgaactagtggacactctactcatggtaccactagtatgattataggtagatgcttcgcttttaattaggtaacattaggcggttttacaactctagactttgggaatgttcatatcacctggacactgtggaattgttggagtattgtagaattggattcacaccgccccctctattcaaaatccccaaaaatggttttaggctgggctcggggtgcatggttttgatagtagcacctcggccatataaggaccggtcttcgggcctctgttgcaaagcactaccgtacttccacatgtctagtgggtaaggcttagtttgtggctcagtctagttataaacaaaagtacacggatggaggtggatgaagtcgggggtcgatggacattctccagggcaaatgaaggctacacgagctgcggcccggtagtcgagatgtcatggcacagggccggtgtcctgctgctaggggctcagtcctgcctgcctgtcccgggggttccggccgtaggtgggattgggtcggtactcttgtctatggctaggatgggttggaaactatgtcacgtcttccgtctgtataccgtggtggtatgtggcacgtggttacacgtgaggaagatgtgtcttgtgggtaaagatgtacacctctgatcagagtaaaatctattcgaatagccgcgccctcggttatgggcaagccgagcaatgtacccaagttagtgttttaattcttaaaacctgcttaacaactaaaatgtggaatggttggcctgggttggcttgggacgagctgggacccagggtcgggttgccagttcggtctgaatcatcgtaggccttgggttaaggcaggttcgtgtgggttcacgaccttgataaataatattgtttagttctagaatcgtgtttacaaaatagccctgagcaactaaatatctttaaatgctgtttactgcaaccctaaaccctttatggtataactcctttgtactcccttgcatttattctgcacttgtgggtgtgtcttgttgagtacggtggttgtactcagtcttgctcaatttttcccaaccccagaagaggagttccaggaggatgaaggcttcggtgtctagctcgtgcctgccgtcaagcgcctgtggtcgtcgccctagtcttccgctgtttctcgtttgtctctgtgtgtgctgggccttcgttgcccatgtaataagttatctatttacgcttccgcttgttaaactctgaattgtatcaacttttggtgtaccttgcctcctgggacaaggattaatgcacgcacgtaaggaatgcccgttgggttatttccggtctactaatgattacatcgagcatattgtaaatggcatgattctcattctcattctactaatgattgcaatgtgtttcgacgataggttcaatcggccatagatgaaggacgattgaagttcactgatggctccaagatgaatcttgatcatgatccttttccggtgaatacgattaatttcaatgataagaaggtgttgattcggccggagcaagccgaatctactaaaggaaaaggagtaatcattggtgaagcaaggcctaaaatgatagtgccaaagaaaccggaggttggcgtttggaaggaaaataggagtggagcttcaacttctaaagcccctagaaagaccaaagtgacttttgatatgcttttggaaaagtatgagaagcaaggtggtgagagggttcgcaacaaaggaaaaagaccaagatcacttcctagggagcgatttggtcattcaccaagacagtcgcattcacctccatatcatcatccacaagatatgtcatggggttcttatccaatggccaccgccgggttatccttatccttattacatgccctccaatgcaattcaaccaagggtggggaggaccgaggaggccaattcatgagcgtttattttcaccgaacaacggccggttatatggtaagaatcgggctaatgaagaaaagagggaaagaaagcgcatcaaggtggaggtaaggacttcggaagtaattaccatcaaagtggggtctcatgatgtgtcaataccttctggagatgaagttggagagtcttcaaggaaaaaatccgaggccggtaccagctcatcgcagtcggatggtctgaccaggccttctggccggtctgaccgcagccatacagccggtctgatcgggccatcaggccggtctgaccgccgacccgacagcggtccgaccgacacctcaggctggtctgaccgtgcgccaaatgtcggtctgaccggcgcatctggccggtctgaccggtggtctacgtccggtctgacccggctccagcgccggtttgataggaggtttgcaaagggcgatgtgagggcttcatcgtcttcaaacaaggttaatagagggcattatttacctcctggaacagagccggatcctaggtggatgcctaaggatttgacggctactcaaaagagaaggttgcaacgtcttcgggctcaagagataagagagaaaaaagccgaagagcaaagagataaaaggttcaatgagttgcgaccaccaccggtatggaggcataagtccatagagaaggaaaaaccggttgttgtagaggagaaggaggaacaatcggttgataaaggtgaatcatctccaaaagaagacatgaatatgaacatggtatgtatgttgcctatgcagttttgtgctatggatgaagccgaggttgctcaattctcattaggtcctaaagacacggtttttgagaagcccgatgagtcaaaccgtcacatgaaccctctctatctcaaaggccatgttgatgggaagccgatctctaggatactagtggatggaggtgccgcggtgaacttgatgccgtactcattattcaagaagttggggcgtgaggatgatgagttgaagaagaccaacatgattctcaatggtttcaatggtgaaccaacggaggcaaagggtatcttttcggcagagctcaccgtgggaaacaagacgctaccaaccgctttcttcatcgtcgatgtgcaaggtaactacaatgttattttgggtcgttgttggattcatgccaattgttgtgtgccttctaccttgcatcaatgtttaattcaatgggacggcgatgatgttgaaattattcaagcggatacatcggccgaggttgcaatggccgatgctacttttgagtggcgccatgggaatatccaatgcttatcggggagggatctttctagctacgattttattagtatctccgatggcaaatttgtatctatctctgtaaagccggctagtatagcacgactaagccatataaatttgtataatgagtaaggaggctaatttagaatggttacaaaagagggtgcaagaatatcagtctacaaagaacgatattggtgaaatcgttgaaggttttgatgaagtggagaagcttggacaagggtttacatcggccgatccattggaggaagtagacataggtgatggaaccaaaccaagactgacttttgtaaacaaaaatatgagagccgaatataaggttaagataatcgagctacttaaagaatatgttgattgctttgcatgggaatatcatgagatgctgggtcttagccgtgagcttgttaagcatcggctttcaattaaaccgggttttaggccttataagcaaccgccttgtcgttttaatcctttgctatatgaccgagtaaaagaggagattgatcggttgttgaaggcggggtttattaggccatgtcgttatgcggagtgggtttctagcataatcccggtggagaagaaggggagtcgtaagattagagtttgcatagattttagagatttaaataaagccactcccaaagatgagtatcctatgcctatagccgacatgatgattaatgatgcatcgggtcataaggtaattagctttctagatggtaatgctggctacaatcaaatctttatggcggaagaggatatgtataagacggcttttaggtgcccgggatttgttggtttgtttgagtgggttgtcatgacttttgggttgaagaatgccggtgcaacctatcaaagggcaatgaatttgatctttcatgattcgctaggtattatcttagagatctacatttatgatattgttgtcaaatcggatggtatggaaggacacatagcagatttgaggttagcttttgagaggatgcgccggtatggtttgaagatgaacccacttaagtatgcttttggtgtgtcggcggggaagttcttaggatacatggtgcatgagagaggggttgagattgattctaagaagatagaaaagattcgtgatttcaaagcaccgacatgtaagaaggaggtccaaaagttgctaggtaaggtgaattatttgagaagatttatttctagcctagcgggtaaaatcgatgcttttattcctatacttcgcttgaaaaaagaagccgattttacttgggggcaaaacaacaagaggcgtttgaagagttgaagagatatttgtctactccacccgttgtgcgagcgcctaaagccggaaaaccttttcggttatatattgtctccgaagacaaagtcattggtgccgttttgacgcaagaggaagatggcaaggatatatcattacatatttgagccgccgtcttttggatgccgaaacgaggtatgtctttatagaaagactttgtttatgcttatactatgcttgtaacaaattgaggcattatttgttatctagtacatgcatagttgcttgccaagccgatgttattaaacacatgttgcaaaggccaattctaagtaggagaattggcaagtgggcatatgctttgatagaatatgatttggcttatgaaccattgaaatctatgaaaggccagattgtatgtgattttatagtggaccatcatgtagatattgcttatgagaaagagatttgcctagttgaagttatgccttggaagatttattttgatggttcttcttgcaaagaaggtcaaggcataggggtaattttgttttcacctaatggcatgtgttatgaagcatcggttcgtttggaatattattgtacaaataatcaagccgaatacaatgctttgttattcggcttacaagtcatagagatggttggagctaagtatgtggaagcttttggtgatttggaattggtggtgcaacaagtcgccggagtctacaaatgcttggacggatcactaaataggtacctcgattcatatttggatattattgccaattttgataattttgctattaaacatattgctaggcgtgataattctagagcaaatgacttggcacaacaagcatctggctataatgtgaagaagggattatttctgatattagaggagccggtgcttgcttttaaatctttgtgcgaaattggcaaagctggggaccaggggcggtctgaccggcattgcgtggccggtctgaccggtgaccaggggcggtctgaccggctacatgccgccggtctgaccggcgaccccgagcggtctgaccggccctgtgtggtcggtctgaccggttctgggcagagcgctggggggcacgtttcaatcaatttagaggccgaattaattgtgaattcggacatttgtgcccaggaagcagaagaagattggagaattcctttgattcgatatttgaaagatcccacacttaaggttgatcggaaaattcggcggcaagcattcaaatacacattgcttgatgaagatttatatcgccgaaatatagatggtgtcttgttgaagtgcttagatgaagatcaatctaaagtggctatgggagaggtgcatgaaggaatttgtggaacttatcaatcggcccacaagatgaattggttgcttagaagagcgggattctattagccgaagatgattgatgattgcttcaaatattatagaggatgtgaagcttgtcaacggttcggcaatgttcaattggcgcccgtcgccatgttgaaccctataatcaaaccatggtcgttccgagaatgggctttggattttattggtcaaatttatccttcgtcattaaaggagaaaaggttcgtgctagttgctacggattacttcaccaagtgggccgaagccgtgcctttgaagaatatgactcatacggaggtagttgactttattttgaagcatattatccatagattcggtattccacaaacattaactacagatcaaggtgcttcttttatgtctaaggaagtgaagaatttttccgaatcttatgatattaaattgttgagctcttctccttacaacgctcaggctaatggacaagccgagtcgagtaataaaacattgttgaagttagtgaagaagaagattgaggaatacccaaagaggtggcatgaggtgctttctgaagcattgtgggtgcataggatatctaaacatggtgccactaaagtcactccttttgagttggtttatggtcaagaagccgttttaccggtggaggtaaatcttggttctcttatatcaagcaagatgatttgtcaagtgaagattacaagatgttgatgggagacaaccttgatgaagtcatcgacaagcgcttgaaggcattggaagagatagagaaagagaagaagagggtggccaaggcgtacaacaagagggtgaaagaaaagttgtttcaagttggagacttggtttggaagacaattttgcctttgggtactcgattcaaggagttcggtaagtggtctcctagttgggagggtccttatcgagtgtgcggcattgttcgagggaacgcgtactttttggagacacttcaaggggagcgttttcagcgagcgattaacgggaaatacttgaagaaatacttcccgagcgtttggcaagacgcttaggaggtactatggccggtaattgggttatcgtcctaagaccaaaaacgtgttctatgcttttagattcacgttgttcatcaaaaagataggggggcatgtgtttacacccaaatttggcacctaggattaaaataggaaagattgccaaaatttggaagtctaccggtttcttccgagtgggccggtctgaccgccgtgtgttgggcggtcagaccgccggttgagggccggtcagaccggcggtgtgtggccggtctgaacggcaggtccgagtccgactgtgtttcatcgggtttcgaggtttccttgctcgggaaagcatgtttcgggtttcctttagtttctaccccgagttggacgtggagaagggcctgtagagggcaataccaaccccctatataagggacatggctggttcattgtaaaaaaccaatctacaatcaatcaatcgaatcgtttttcatattgcttttagttttctcttagtttgtccatctttgtcggtttgcgccgtaaaccgtccgacgccgctgcgagagtgcgacatctctttgtaggtttgtcctgaaaaccttccgttttgcccacgagacgggtagttatctagaaatcggctccactagccggtttagttatcaaaacccatctaggtttagctctttgctaaatcgaggtggttggcgactctaggatcaccgcaaggcttaaggtactgcgatcgtgcttgttaacttgtcaaaaaagttgccaacagcaccagagcagaaaagcgaatacgtcggtacaacggcgccctattcttccacccatagccgggagccggcatgcagttcgtccactcgccggcggcgtgatatatccgatccatctactctgttcccaggtgacggtgcaaaactcttcgtccatgcgtgcatgggatattcccaggcggttttgcttcgttccggtaagtccattaagtttctttgatttttcttgctgatcgaaccttcccttttgttttctattagatcgatctatttctattctaatggaggatcatccaggcgatctcgcagtcatccgcagacggcgtcatcggcaacctcagttgttctcagccggcgtcattgtcaaacatacgttggtacttggtaggtcagagtgggccgggatggtgttatttcatcgttctgccgtcagctcgattccaggggtcggtgatgcccattcggatgatccctgggtgttgaatgctgcatgccatgccgttcctcattcttttctgctagatcgaattcccattactgctgctaaatggcagtatatatatggcacatgattattcatcttcgtgctgccaagccgatgataccttgatcgattactcagtatgattacatactgctcgttcttctacaatatgtactgctcttttttttttggttatatactgtcttttctacctatgatatgatatagtcagatgtatatactaagtaaaagatcatatatactgctttctttggagaaaaatatacgtactaaaagtacttgaaaaatagtatatactgctccatcgagaaatgtagtatatacaactaaaaatgactatgaacatggattaatttgtagtatgtactgacaaaaagaaaagtatgaacctagatttgtagtatgtaatggcaaaaggaaagttgtatcctttcattctaagtagaaatcagtatatctcaattcataaatcagtacatactgattacttgaagaaatcggtatagcccagctcttgaagaaatcagtgcatatccactcagacaaaaatcagtatatactcattccaagataagtcagtatatactcgttttaaaaaaaatcagtatatactcattccaatatatgtcagtatatactcattcggtcgttccaacagtatattgcagctaccaatataacacaaagtagattatactgaccaaacataaaaagtagtctacgtggtatatactgagcaaacaaaaaagcagtataaactcctttagccacgatgatgcagtatacactgaccaaatataaaaagtaatatgttcagtatatactgaccaaacaaaaagtagtatgcagtatcaaacaaaaacgtagaatgcctaatatactgagcatacgaaaaagtagtatatgtactgaccaaacagaaaagcagtatatactcattcagtccggatcgatgtagttggaaagaaaatttcaaagcaactgcgtgccaacgctctctccattaaaaaaggggagtacataacacctaggtgtacagaagagtcgtctctctctctctatctctctatatatatatctccgatgtcaattgttcgtcatagaataataataaaaaacacctttgattttacaatctcctccttgatgaacacattggcaaactcattaaaaatgttttggtgtttggaaaaataaaaacaaaagtggtaaaaagcacacttcgtacaaacgtacacatcgtgctcaaaaatccaaaagaaaacttatccccctttgtaaaagaaagaaattcccaattgaaccaacaaacgtgctcttctcaacaactctccaaaaattcaccttgcttcttctaaaaatccaaaaaattttacattacttctcccccttttggcaatgatttcatcaagcataggaattatgttcattaatgttcaaaagcttagcatacatatagcatatcaagtcatgtgttgcaataaaaagaagatgaacccatctataatataacaagcatgtattaaagtataaccatgaaccaaagattttacaattaagcttgaatcaacaatcaaaattcatgatttcaaacgatttataatgcaacatcttaacaaatacataggttgaagaataaacactaaacacatatacctattgcatttatcactctttctcaaataacctttagcacaaaataaccaagagaatttttaactttttcttttcttgagccttttttctcatatttttctcttttattccggatacgtccctgtcgtcaagacagtttccagagattcggcacctattattttgctcacatcgaatacgtccttgtcgtcaagactgtttccaaagattcggtattcattttttttcatatttttattctctttttcacaatgagcaattaaagctatttgaggaataacaattcaataaagcatatatatagagtatttacaaatcaaaccatatgctagcatcaacattgcattttttttaattcaagtatagaatttaagtgtcatgcatcatctcccttaagagcaaaatctaaatctcatgaaaaaactagaatacatacaagctatgctagagacaaataaaccttcaaagtattgctagcatgcacaagaaaataccatatgcataaacaaagctctcttttatcaatttttctcattgtcatattatagcttgataaaaccatgaggtactaattccccctcaaaacatgccaaaaggatgaattatgcccaattcaccatgaagaaaagcaaatcgattagaatccaaaggtttagtgaaaatatcagcaagttgcaactttgtgtccaaaaactgcaattcaacatctctcttctcaacatgatccctcaaaaagtgaaaacaaatatcaatgtgctttgtgcgtgagtgttgaacaggattcttagcaatattgatagcactagtattatcacaaaagagaggtactttctcaaaagtaagaccataatctttcaaagtagataaaagccaaagaatctgtgaacaacaattagcagcagccacatattcagattcagcagttgatgagcacactagattgtttcctaaaagaccatgccatcaatgatggaccaagaaaatgacatggtcccctaggacttttccgatccattttaccacccccca

SEQ ID NO: 10011 - DNA, 34212 bp, Oryza sativa
tatatatatatatatatatatatatatatatatatatatatatatatatatatatatatatatgtaaattaactggtgctacatggagtatgggctccaagattcaaattgcgtatatacccaatttgaatgtttaaatgttttttttaaatgtttagatatgaatattaacttctttactaacaagttcaaacaagtttgaactgagtttgaacttttttttttagattttggttctagatatataacatctaaacatataattcgttatgtatgtaataatgaattgtgaaatgaagttgagtttgagttgttttgttgttaggtatttgtatgaattaaattcatatacctagatatctacttacaatttgtaaatttttaaaaatttgagagaatttgtgttttttataccttagagcccggacaccataaagtcccctatggatatcatatatatatatatatatatatatatatatatatatatatatatatataacacgatcatgctacgtagcgcgacacacagacgtagcacgctaggaaactacgtagcgcctctcacaggagcgatctcctcctgtttttccgtttctccttcctccctttctgtttctgggtttttcgtatttttcctcccaccaagagtgttttccgtttttttcctgcacaactgccacccggtctccacgtgccctcctcaagccccttttctcactccatcagttcacacggtgagtaaaaatattcttgagagaaatcaggttcccataatcagtaaaaaaattccttaacaaaatcaaaccctctttctatgggcaataaaatttttactcctagagtctccataatcagtaaaaaaattccttagcgaaatcaaacactctttagaccgacagtaaaattttaactccccaaatcccaataatcagtaaaaccctctttggacgggcagtaaaatttttactccccacaagttcagatactcatcaagatcacactctttcgaccgatattaaaatttttactcccaaatccccataataactagtaaaagaagcgaaatcaaaccctctttagactggcagtaaaatttttactcccacaagttcggggctggataatactcatcaagaccaaggttagtgaaatttttactccagcatatttcttacatcattggcgttcatagtaatatttttatcacatatattttggtaattcttttactcaatctgttcgtatggagaagagaaagagaatttttttcaggcattaacatatgagaaccattatcatttttacgggacatattaacacatacaatcaaaattagggagtattacattcaatcatgcatatgaaattatcaatcacacaaaatcttctgtgcgtaaaaaactacagaaacaacaggaggaaaaaataacatctccatccaagggaggagaggagacacagcagagatgttgatggcatgaggtgctgacgtgctgcagcagttggcggcgactactcgagacagatagactagcagctccaatcccatcccagccaccagcagctgttggcatcgaagcaggagcaaggcgacagggctccagtttagccccgcacaaagcatggtcggggttggactcgggttcatctgccagccagactacgccgctgtggcctagagcaccgccgcgcgacgtccaccatctccccgtcacctactccttcgccgttcctgtcgggataggacaaggcgctggatcccacaccggggaggagtttggcctgcaaatccggcgcagccaaagctcaccagcaccttcatcggcctcctcaccatcctcatcgacagcggcctagtccgcctgtaagctggtcaccggggctgacgtccattggcgcaacattttcctcctcttctggcttgaacgcagcctacgcacggtgagcaagaagaaggcgacctaacaccaaggtcctccctgacgattgatccagtgccctgcttcaggaccaccaccacagatcaaggagcgcgtcctcctgatccgccctcctccacgctgcagacggctgctcatcgtttgaagagctgttggagtagttcgtcgtctcctcacccgccgcccgtcgaccggtggcctaagccacacagagggcgagcaccgcccgtcaccctctagcacggacagaaccactgggcaacctcgtcggtgcgcgtgctggtcaccgaccgccgtcaccgaattgctgccatggccagccacgcgctcagatccgaaatacccggagagagtaagaaaaaataggatcggatatgtgattggttacaaggtgagaaaacaacatacatatatatgctgaaaattgggtaacattaagttaaaagtttactcggattataagcgtgggggaggaggcgcaggggtaagttaaattttaactacatactgtggactgggaggagggaggttgcaccagggtggtggcgctgtgtcgctccacctagttaggcagcgcccatagcgctataatatatatatatatatatatatatatatatatatatatatatatatacacatatatatatatatatatatatatgtatgtatgttaatgaatctaaacatatatgtgcgcctagatttatgaacatctatatgaatatggacaatgctagaaagtcttataacctgaaacgaaggtagtagtaagtaagaaagaaaatcttacaacttgtgtatactattttatcacacaattttctcgcggcaacacgcgggatatccatcttgatcctttagtttactagtggtcaaagattttttagccacataaattatgtcatgtcatatgtttgttataaaagtttaatacactctctgtcatggtcatggatatcacatacctaatagtagttgactaaacttggcagggcccaccacatacgatatcttatacgaaaacaaatcccgtatatataaggagttccggataagaaaggataaatagagttctatatagaaacgataaggactactcggattgtatccatatttatctccctagttttacttggacaaggaggcatctatgggtataaatacaagccctctaaggaggagaggagatacatcataaagccacaagacacacccaccataggcgcacaatacacaagccaatatacgccaagacaagtcgtcgcatatcaacatcagagataagcctagacatatcccatccggtgcctacggaagccgacaagagggatcaagtgccatctctgatctcgacgtgttcgtacttcaggaggaagactaccctgtcgtcgactacgagatggttatctagccgccaaatcgacgacaactagataggttatcccaaatactgtatttgtgtgatccagatgaataaagagcaacaccggcttcggctaacaggatgtagggctattacttgtcagataaggggcccgaacatgtataaaaatccttgtctctatctcttttacctcaatctcgcacataccctagtaccaacgatctccataccatcaaataacgtagtcgcggtaccaaccgttgacagcggtgcgccaggtaggggaatttttggtgcttcaaggtttcaacgacatgggttcaagagatggattctccaatgacaaattactcgacgacttcggctgtagggaaatctaacccgaccggagtatgtcccccgacgagatcgggaccatcgccaaatattcgatccgtcgagatcgaccaatatttaagatttcgtcacagcggaaaaccaacagtatcgacgacatgagagattgatccaatatgtgtcggtcttattcctaacagggtgtcctcggacacgttggcccgattcgtaccgagatcaaacgtcgcgctgctagctggtgcaaggcattggcccgctgagtccaagctggacatgacatccactatcatcgaccgagtacgccgacggacatgaggatacaaaccaagagcatgcatgcatgcgtggaccagccaacatgcatccacacagtgcatgtgaaaattgcttcgttaagacatgtctatactactcggacacgtgcacacaaggtaattagtgagattgattttttttaaaaattaatctactaaattcgtagatatatccagcatatatctacaaagatacgcaatattttatatacaatttaccgtacctatttttcagatatatatacaatattatcagatcaataatttattatgtttacctagaccgtgttttttatacaatatttattgtgcgagtgtttccaatattaagccaaccacggtttaatactggggctcgccctacttttttcaagtataaatcatgcttgtttacggtttacataatgcccgatatttaatttgcttgttatatcctgataatactataactctagaagattcatgcagttttttgagtaaatactcgatattgtctactatattgtcttctagaaaatatttttcaggaacaattgagcactcgagtacgatgtggtcgagtacaccgcattatcgagaacgttctcgaaaaatgctgagttgtcgcacccaacctaccaacaaagaccgacgacttatctcatatatagcgttggctacggctagactatttgagaaaatattgttaacagataattcccccgcgaacgttgtcggcttgatcatccgacatgattgcgaacagacatccggatatgctataagttgggtatgtgagtcatgctggccacatgagatgcacatgtaataaccaactctagcgcccctataggtgattaagagatgcctaatcctagttatcgaccagacagttgtagcgacatctcatcgcctatcaatttaaattcacttgtggaccgttgaactccatctatcgttgtccaagactccatgcctctacggtcttacaccaggatcgaccaagtgagtacggcaaatattgataaaggggggtcgtggataacaagagaagtttcatcttcaggtgatcgagatacgcctacacctggtcctcgaccagtacatcgtagtgatctctcaccacctaaaaattcatcttcaggtgatcgagatacgcctacacctggtcctcgaccagtagatcttagcgatcttcaggtgaccagtagattgttgaccagttggttacaacaatctctcgacatctaacgcgacaatcaacattgccgtgatagcgacaaccaagaccgactagatcgccgttgtcaccaggacgacaacgtccaggactaatgacatcggaacgacaacggacaaggttaacgacatcacgacatcacacgacgacgacaaaacttgagatccccatacttctagagggctcgaggatgaggtagtaggtccaggaacggaacctccgactacggtaattcctcattgccttcgtcgtcatcaggaggcagttctcgcaggtcacgagaatgtcatccatctattactctggattcccttcaagtggtcgaggtactactacaactggttctctactagcaacgtagcgatcctcgtaccatgacttctaatggtcgaggtgcgactatgactggtcttccaccagtagcgtagtggtcctcgtaccatgtcttccaaaggtcgagttacgattacaactggtcctcaattagcagtgtagcggtcctcgcacctcaatttcaaacggttgagagactcctactcctggttctcgaaccagtaggtcatagcgatctctcatacctccacttcaagtggtcgagttatgactacaactggtcttcgaccaacggtgtagcgattctcccactacttttgtgatttgttgagtacaactatacacctggcctttgcccagtgtggtggtcgtctcatcatctacatcaacttctgtaagtgtttatatgtgcaatatttgtccgatgatcctcttttcttatatctcctcgtcttcgaagtcggtcctatcgtccctttacactattctgacaagcctccgagaaacctaagggaattttggctagggacgcccagagtagataaggtcttgttggattatgagagccgaacgaccatgtcaaacctggtcatgtaagagtgctcaatggacgcgtattaacaaggccgtgtaatcggaaattgatttttccaacttcacagctgggggctaggatttgtcagcttcagcatggtttgttataagatttaagttgtctctgtggaaaatggctttttcataaaaacaactaggggctaggaatggtaccaaactccgattgctaagggtgactctagcgagagtactcttttatcgtcacatgcagattcaatttattttcgatttttctatacatattatatcatgttacccttgagtgttcgctcgagggctatttctatttaatattctattttgagtattgattttaggaaagttctattcaatattgtcgaagactccgtgtctctacggttctacaccgggattgactaagcgagtatggcaaatgttctgagtattgatttcaggaaaattagacatcaaaataatcaagtcagatttcaaggctctatcgtagattctatgcctactcgattactcgagaacggttgattgggctcgacaaggaatatggaatgaagcgatggtctacccaccgagatggaatttcttgacttcaatccaaattctcgattacagcaagacaagaaacttagtcgcatgctctgtatcttctcggtcgacatcggagattaacctagacaaacctaatatagtgcctacaaaggccgataagaggaatctagctagccttatttctgatcacaccgagaacggtcaagcgatcacgacaatagttgttccaaagtcttcgattgagaaccttaactcgttcatttgcaatgaagtcgggggttactgtcatggttatggataccacatacctaataatagttgactaaactcggcagggtccaccacataccatgtcttatacggaaacaaacctcgtatatagaaggagttccggataaggaagtataaatagagttctatatggaaacgacaaggactactcggattgtatccatatttatctccctagttttacttggataatggggcatctatgggtataaatacaagacccctaggaggagaggggatacaccacaaagccacaagacacacctaccatagacgcacaatacataagccaatatacgccaagacaagtcgccggatattaacatcagagataagcctagacataccacatcccgtgcctacggaagccggcaagagggatcaagtgccatctctgagctcgatgagttcgtatttcagaaggaagactaccctgtcgtcgactacgagatggttatctagctgccaaatcgacgacaattagataggttatcccaaatattgtatttgtgtgatccagatgaataaagagcaacaccgacttcggccaacaggatgtagggctattacctgtcagataaggagctcgaacctgtataaaaatccttgtctccatctcttttacctcaatcttgcacataccctggtaccaacgatccccaaaccatcaaatactgtagtcgcggtatcaactgtcgatactctccataaaaatatatagtagcaatatagtatcagataaaatatgtcatagtactactaatttatatggacctcatctaaattgatagtgttaagatgtgccttattcaggacgaaggaagtcaagtaaaacaacgatcaaacaaacccttaaaaacgcacgcaacagactaacagggaagaagcaccttgactcgataaaataatataaataaattaaatagttattttgtttagagatgactggattcgaggcatacgtgatcaacaacacaacaccgtctttgaaagcagaaaagaagctggtacttgtttcttcccccaaggtcgcttgagcttatcgggatgcccgaatcggacactcctactggaactccttttcttttttctttttaataacgctcgaagatgagttggattattctcctctccgttcaaaaggccgtagtttcgttcgaattagctgtttggctcagcttattagcgccatgcgaatcagcagagtactaataaattattacgtactattataagtctgaaaacatttattttttcaagggaaaagcctgaattaccctgaattattaggtgactaagaattaccctaaacttgaaaactaaatatctttcactctcaactagtaatatcagataaaaacccctctgagcactgttttggatagttttaacttgaaattgcacacgtaacgccaacgtggcaatccagttagtaaaaaaaatataagagaaatccatggacacacttgtcatctctccctcaagccatcctctcatgtgctctctctctctctgcaatagctgcaatggaggtggcattgtccacggccttggttcgtcgtcgcctcgacggcaccaggggcgcagcggaggtcgagctagctctgggatggcctcaggtgcggttggtctcggcgacggcaaccagctcacaaagcggcggatctattgttcctagccccgggacgaatctgccgttcccagcctcaggtgcggcaggtctcggcggtggtagatctggtgccctcggccctaggaggggtggatccgctgccccaactttgggtgcgacagttctcaatagcggcgacgacgacgttgagtggcatggaaccggcaaggtggcgaagtcggatgcctactcctagctttccgcctctatcgccatcgtcaccaccttgtcaagttgctttctccctccgactcttggtttgcaagtggccgacgatgaccgagatgcgacggaaagtatggagacgacgacctccgccggagtgcgcatgtgatggctaagagagctactgcccgcaacatcctcttcacgcgtcacaactgtcgtcggagtgtgcctccgtctcccaccatgtgccggagtgcgccggcggaggccgaggagaagttatgcggtcgtagaggaggcgcatgccggcggaggctgaggaggacccgcctcccccgctagtcgcccccagctgccttcgccgctctagctcatccgccctgctgttgtgtagtgtcgtcccctgccgatggacagactaggagggaagggtgaagagagagggggtgagagggagagaatatgacatgagggtcccaccatttttataaaaaaaaagtgctgactagattaccacatatagagctaaaaccaactaccacatatagagctaaaaccactccgtattgagttaaaagggttctgcatctagtattaatacttgacggtgaaaattgtctagttttcgtgtttagaaggtaattcgtacttacccaatagttcaggggtaattcagacttttccttttttaaaaaatgaacttctatatacatatatttttaaaaatacatttaaaaatacattgtttagcagtatgagaaatatgcttatgataaacgagaaaataggtgagaaaataatctgtttagaattcagcctcagagaaaaaaaatcatttggtcaggagatcttatttcatgattgataaatgtttttaatgaaataaacacctgtatatatgaatattcgtggatataaagttgatgctttagatttgtcctaccttatgttcttatgttttcttgttgctatgtcatgtgtatcttttaaacgaagttttcaactttcttgtgttcttaatttctatagaaatttaatgagtatgacactttattcttgtgttttttgtttttacaatcttgtgcttcaaaggagctgtatacgagattaggtgtagaaaaaaaatgatgcaacactataaattgtactacgtagcaactactaatatggcatttctacacaaacatgccagcaaactcacgataaaagcatgtgcctactcttcaccagattccgccattaaatttagcgtaaatattatacgaacccacttacatgacgcgcgagtgtgcaagcaatagttcaaaaggaaaaagaaaacttcaaaagttttaaaacatactgtaggagtattaatcattctaaaagcatttcaaatcaaacaacaaacaaaatatttttcatccttatcaagagaacgcaaggacaaataaattagattcctctcatattgccaaattgtccaaaatctggaccatgcatgatgcgaccaccaccccatcagcccatctgatagcgagcgacaagcaggacagatccgcgcggaaaatcccaaactcgcccgcccgcatgggatccaacccccaacctgtgatctcctctactctcttctactccgttctataaaaaattcaatctacataaaaacttattaggatttattattgtacgaagtattccatcatgttattaaccttttatgggtctaatagaaaccaatctagataaagactcatttaaacaattacatttattgtgttagaaagtattttatcatattattgattttctatagatggaggaagtactcccatccagggtttcccaaaccgtcgaggccagggttaccgtgtaaaatttatcaaaaattcaaattattttttaaatttatttaaatttcaggaggttattatggtatttatattaccgtactctatgataaacccgataactatggtaaccgcgcggcagtaaaggaaacctgctcccatctactccacggcctcactcactgctctgctctctctccccgcggttaaacttaaagctactatcgctagcgctttgccttggctaccgtgcctcttgacaaaaaccaaagcccaactactccccagtccccactgctgcaatgtctgctcgtgttctgcggctgttacggtagtttaagagcaagtttaatattatagcctattactggcttcaatttatctatagctaatctaatagctaattgatataatagttgtttactatactattaatatatggtcccacctattatacacactgtgttttgaaatccgtgctgcagctggctacagatctctagcccatttctcttctctctcatcttttatctaattaaaatatatttatagctgactaatagtctgctattatacctgctctaataactttgttttactgctaattataatcaccagtagagagaggggggaggaaactgtgatctctggtctccatcttttagcaatagtacgcataatttataagtaaatattttatatgtatgttatgatttaaatatcaatattgaaaattaaatttatataaattcctttttaaaattcaaaatttgacagcagctgattctaaacgaagcaaatcattggggcctctgaacagagtgacaatagtgtgcaactgttgacgtactagtagaaggagagtagtaccactaccgtggtagcagctgcttaactttgcccaccggccaccgttcaggggccattaatggcgtgcagggccgctgctgctgctgcttgctcttgctcttgctgctgggtggagtgagcgagagatcccatgtggcattggagcgctgtctcctgctgctgcacagtctactctcacctgctccgcctctcccctcgttaattcttggcggctgtgtggcgaggaagaagaagcggtgatggcatgctgatgggctgcgggttcttggatgcatttgggtggatatgcggacatggtggtgagttcgctgcctctcgcgcttctctgagcctgtattgattttagaaatttcttgtatttcgttctaactctagatggcattgatgctctgcttgcttggttcttgttatcttcttgtactctgtgtatgtgtgtgtgtgagagagatatttgaactgaagattctgcagtttcagattttctttggcctgtttctctctctcccccgagcggtagccattctctctttcttgttcttctgccaatttccagctgtttccagtagctggaaacttcgaattgcttaaagttcagttgtttgcttgctatgacttcgtttccccttcaagtttcactgcatttcctttccagtttttccttcaaagctcggatttgtttcttgcctcttcagcattcttttttccggcctcgattttgtataaagccgtttgtttgtgtcaaaatgttcaccaatatgcctttctcatgagcctcatctgttcggtttactgtacatatgctcttaatggtctgtcaatagtctgtccagaatgtcattttctatgtcgggaccgtacagatttttaaggctgcagcttccatattttttaatttgaacaaatgacaactactgccttgttttttctgttcaatctggagtaaaacttgttcgcgatgttcttgcatccggtctccaaattgtttttttttttttggtttttggaaataagtatgattcagtcccgtggcattcacatcttgcttctccttagtttcttcattgatttgggctgtaaatttaatctttttcctttgcaggaagctgtaatttgagagcgatgggagcatcttcttagggatcctcttccactggctagcctacagctgtttttctccttcattggtactccaatcttggctggaattttgaatcttttgtccgggaagtgataaaatttagaaagacaacacaaccattggcacttcttacagttgtgagcgctaagctgagcctccaatggcgtggcattttactgcggctttcatgatcgcaacctgtttgatgttattcccaagaagcgagcagtcctcgcagggtgaggtgctgcagcagctaaggaagcagctggagtacccaaggcagctggatgtatggaataacccaaacagtgacccctgctacacccagcctacttcggtggtcaccgtggcatgcgaggggaacgccattacagagcttaagattatcggtgacaggatcaccaagccaccaaagttcagtggctatcctgtctccaatatcaccctctctgaagcctttgttctcgattcgtttgttactacattggcaaggttacctgccttgcacgttgttatcctagtatccttggggctatggggtcctcttcctgacaagattcaccggctgtcatctcttcaagtgcttgatttgagctccaatttcctttatggatcgattcctccgaagctgtcagccatgccaaagttgcacaccttgacattggatgggaacttcttcaatggtaccatgccggactggttcaacttgtactcgaacctcacggttcttcgcttgcagcgtaaccggttgaaggggcccataccagcatcaattggtaaagctaccatgcttagtgagcttgctcttgctggcaacagcatcgctggcgaggttccacaattaggcagcttgaataagcttgagatgctggacttgagggacaatgagttggatggggagctcccagagctgcctacagcattggtaacaatcctactcagcaaaaactcactcaagggcgaaatccctgagcagtttggtcagttgaaccgacttcagcacctcgatctctcattcaactttctcgtggggaagcctcctgaaaagctcttcgctcttccaagcatcagctatctcaacctagctgcgaatatgctcagtggatcattttctactagtttaacatgcagcagtacccttggctttgtggatttgtctacaaaccaactcacaggtgacctgcctgtctgtcttaatgttaatgtcaataacagggtagttaagtttgatggtaattgcttcagtgacgaccctgaacaccagcatgaaactaagtattgtcaacaacctcacaaggggagaggatcaaacaaggatgttggacttgtggtcactgttgttggggtggtgtttattgtgcttgtgctttctcttatattaatggcttcaaacagaagaagctgtcagagagttttagcagaacaacagttacttcaaaagcaaatgcaagataattcgacatcaggaatgtcaactgaactgctagtaaatgcaagtaagtcttcttctgaagaaattttgctagtaaatgcctagtttcttatgatatatggaatgatgtgctagatgtggatcatgtgtgcatcactgcatcccatgttttgagatccatccagccgattgtttgtcatagtcacagatagatacatcatacatgtagactatcctaatggtagatgatggtattggaatgaactccaaaatttatttccctgaataataaacaagagataattgtatttcctcctattgaaattctcctctccctcacttcattgcagggtacatatctcaagctgtaaaattagggacacaaataatgcccatgtatcgagcattttctttggaagagctcaaggaagcaacaaaaagctttgagaggtcggcatttttaggcgaggggtcaattggaaaggtctgttgccatcttcaacatctgtctgatactccgatttagttaggaatttaccgtatacatgagataataattgtactgcttttaacctgttaacagtattataattactccattttattagctctgcaagctagatagtttctgacaatttttcctcatactattttaatgtggcattttccttactcctttcctttgttttcagctgtacaagggaaaactagagaatggaaccctgattgccataagatgtttggcattgcaccaacgatactcaataaggaatctaaaacttcgattagatctactggcgaagcttcgtcacccaaatttggtttgcctcttggggcactgtattgatggcgaagttgatgaatcaagtgtgaaaagggttttccttgtctatgaatatgtacctagtggaacgtttccttcatatctttctggtaaggaactaaaaataaaatgaggaattaaagtcgtacgaagtgatagcaatcgaatttgtaacttgtggttcgtgaatgcctttgctgtggtaggctctagtccagagaagactctgaactggtgtgagaggctccaagtgctgatgaacattgctaaggctgtgcatttcttacatactggaataattcctggttccttatataaccggttaaagccttctagtattttacttgatgaacaccttgtggcaaaactgagtgactatgggctatccataattacggaggagatatacaaacatgaggttggtttgccatatcatagaatgatcctactcctcttcccctgtatttaaaggagtctcaattatagaccattctttattttaatgcccttattcctattggtttacactttacaggcagcaggagaagggcagagatgtgtagaagacaatggtggagaattgtaagtacctgcagaacttgtagcaaagtatttcttacacaaagttgcatacaactaataaatgatcagacatgctgaaagtctaatataatttatgtttttagggaaaatttggaggatgatgtgctttcttttggaggtattttacttgaagtacttatggggccaaaacgtcataggaaagatctctctgtgctaagtgagctggtatgttccattttgtcttttgcgtaaagataattaatcaaatatccagatgatagttataataatgatacttcgatcaatatcacggtgatacatagctcgagcgctgtctggactgggctaatttcatgttgtattaagctatctatcaactcaatacagatattttgttggttgggtatgaccgtataactttcgtcctcattgtgctctgcaatccatgatatcataagctgaattatgacaccacacactaataagttctgagtatgaaatgtatgtttcaagcacttctgcttccctgcattagcccaacaaagagcattacatgcacaaatattaggagcaatgttgcttgcagagtaagaactacaaattttaatatccggattaatttggcatgataaaacttcaactgataggatccttagctctctaaaaccctacatgactcatatgctctgatcataccagaacaatcaaaattttacctgtatctgcaggttctgtcaatatcaaaacaggaagagcgcgagcaagttcttgatccggttgtgctgagcacctcttcgcaagattctttgtcgatggtgatttccattactgtcaaatgtttatcagttgaatcttcagccaggccttcgatcgaagaggttctctggaatctgcagtacgctgcacaagtccaggcaatatctgatggggaccagagatcagaagtttcctcgcagacctgttaggctaactgaacataaaacaccttggaggttattgtccatatctgggaaaagacggcgccgcacgtgcaagctaatttgatcttggtgtgcagaagagaatgaccaaactgactgatctcttcctgggagtaatcctgcatttgctgctacttcaacagcatttctgacacatcaacaagttaattaacatgtcaaatgctgtatgctaaacacagatatggtcacgttacgtcctgtaaagagttttttttttctcgattctagcttcccattgctgtgaaagcatccctatgagcagttcttgatttccaaacttccaatcgttgtattagggcattctcatataattaagtagtaggacgagtgatgtgatagcaaaattgatgagttgatagagaagggtatcccatgttagtgtagtaatgagaagatgtaattcatttgccacatgactcgtgctagtgcagaccaaagtgaatatgctccaaaactaaatttgggtaataaaatatggcctaaattctaatttactttaggattcaatgatgcaataatattaattccatttgttataaaactggtccgaaatcactatcgaaaaccaaacacgaaagaaacgtcataggtaattcaaacacgatgatcgcattgaagtacgatatttgttaacgagatttaaccgaagcctacatccctggagtgcttcttcccatccagcatttacagcgtattagagttataacaactatcgatcgaacgccgttggcagccgctccctctcactatgcgaactctaacaaactcctccttagcgaatatgccacgccaacatgaatttgttatttgctcgaacctccgtgtgccagaacttgagttggttcttccaccgctcatgctgagttggcccgacaagccttcaccaggatcaccacaacaagagactcccgctatccctgtaacttcttcctcttgattgcacctgcaacagtgttccaccctctcttatatcaccacaatcgtcttgctaagtgaaattgaatttctttctacctgttacatcatagactcctcaaaaatcatgttcaactacatctactgttttaaatttgacttgttctaatccatggccagataacacgcattgttaccaaatagaaaaatcaaactcactagacatgaagagaaccttttcttctttgatgtcttacgaaccgagctaattaacaaatccaatatccacgcttctacatagaaagtctcatgtaatatgttgccagaagttgtttctattgaaatctggagtcactgactccaaatcaacagaacatcttatgttgaatcccatatgagtactaagatcctttcgtgtgagatagtattccgtcccgaagaatcggaacgtaataccttcccacacgtatcgcaacatacagagaaatcgtacggtaagaaaacgtgaaccagagtcatctactagcgcgaaatcatcccaacatattgctttccacacagtagcagaatcaacattcatacctattttagcaagcagctccgggtcgtatgctcgcgtatgagcgaacacttgatccctgagaaggttgtaggcctgcatcaactgatctttttacaagtacagctcggagtcgggacaaaacgtcaagccttgatcctcatgcattgacacttggccataagattctgcatgtccttcactcggcacatcctctttggacgagcacgcactcgagctgtaggaatggtggtgtgagctcgatactgataggaactataaaatggaaggtggactgctgaagtataaaggaaggatatatgcaggtaaaacatcttaaaccaactactaagggcataccactcctcctttggggccattatggaatgagggccacttgccatagaatcaaaatgtttttttactagcctggtctcaagagggatgctgacaaaatggttagggaatatcgtatgccaagcgactaaagaagaacacaagttcatattccaggactcctcaatccttttgatatagttgacatggcttggtcacacattaccatgaatttcattataggctaccaaaatccagaggaaaggatgtgatatcggtggtggttaacagattgactaagtatgctcactttttggccttgtttcatcattattcagtggagcaggtggtggatatctttatatggatatataacatccacaaactacatgggatgccaatgggtatcataattgatggtgacaagatattcactagctgtatatttcaggaagtatttcaaatcaatgaatatgcagctgagattcaacgaaaaaaatttggaaaaatattcttctttttaaaaatttgtgtttatatacctgtatgggagggtttagcacaaatatacctaatttgcagattggaaacgcgggaccacaaagcaagcgcgacatggacatgcgggaacggcggatgcttcggtgccgcggagtgaaaacgcggaatagcctcggtcccgtggagcagaagagcggaaccacattgctccggcggccctgtcctgcggcagcgtggtagagagcggcgtcgtgcgggatagcctcgctcccgcggaaccgtggtgcgccaccgacgcggttcagtgtcccgaatgcgcgccatctttccggtcccgctgctccgcacctcggaagagcagcgccgctttggccggcatcgttaattagctcacaaattttttttcattgcttgttggagataaatccggaaacaaaatattaaactaagcttaggctctgtttgtttcaacttaagattattgtaatccagattattaaatcagattactctaagctggattataataagctgatatagaataagttgcgagttgtttgtttctctagattactggagacatctaagggtagtgggtctttagccactcaataatctagaaaaagctcctccataggagattattagattatactaatctggcttatagattataataatctactggtttgtttcggcttactcataataatccagattataataattttaagctgaatcaaacagggttaatcacatcaacaaattaagttaccaacggaggttcattagccagtataatattttcttattagttgttggagattaatccggaagcagaagagtaaaaaaaaaagcctaatcacatcaacaaagtaagttgcttttttttacggttgtgacctctaatccagaacgcaatgccgctcgtgctggtgcgttcccgcactactatgccgcgggaccgacgacctgccggccaattgcgtagagattgattcacggtcccgcatgatggttatgcgggaaagggagcggtgcctcacgacgggaccagatcggtgccgcatatccgggatgcagaaccgcgtcggtagcgcaccacggttccgtgggagcaaatcggtcccactctccgccacgttgccacaggatagggccgcgggaacgatacggtcccgctcttctgctctgcaggatcgggcctattccgcgtttccgctgcgcggcaccgaagcagccgccgttcctgcatgtccacgccgcacttgctttgcggtcccgtgtttccgaaccgcggattagatatatttctgctaaactctccaatgtagatatataaacacaaattattaaaaaaagagtgtatttccaaaatttttttcgagattcaatacaggtcacctccatgaaacaaattgttagacagaaagagtgaatcaatgtctttgagtcctatatgagaaatatgaccttccaagagccccaacattggtatttatggtcggcgttggctgagtggtaatataccacatatcatacaactatcgagatgaccctattcaaagcattatataggtacacccattcaattgggtgggtttaatatattttaatgagtctagtgtcttgcatcaaattacgatatttttagagtgtcctcaagaaaatttctttgtggtgtcccacagctaattacgcatttgagtgtcttggagcaaatttggtgtaatatataatatccacccaactgatgagagataaatcacataaaatggcagttttgcccttatcttcttctcccttctcatagtcttcttccgacgctcactcgcagtgagctccattggcttgtccattgtgaacaaccgctcggtgcagtcgatggcgcggttgcacatcatgccacaggcgccagtgagattgggcatcgccaagccggcgtgcatggtgaggtggtgcgctatggtgctgccgtccgagtcaccggtgacgaacacgcggccgaagtcagcagcctcggtgagccagccatcagcattgtccaaggtgtgttccctaatccagtggaggaaacccgtcgcatcgtcaactgcggtgggaggcggtgcttgagggcgaggcggtacctgatggagaacacgacggcactggcatccctcacgtggtcgtctggccggggcacggccaccacggtggtgcgagtgcaagtggctccggcagctgcgccgcctccgcggtcgcctatggtgttcggcgtccggtagcggtggcctcgacatgttgcatgaccatgctgagcaactatctaccatgggcaagccggtggagctcactgcgagtgagagtcagaagaagaccgagagaagggagaagataaagggaaatttgtcattttatatggtttctctctcatcaaattggtggatactatattttaatgcgtccactatactacagaaaattaccacacttttagagtgtccttggcaaattgatgtctttgtgatgtcccatagctaattgcaatttttttaaatgttttataccaaattttgcctacctaaaattgcagccctacaggcgtacatcatttggtatcaggggctctcttaagctgagattaaaattttatggccctttcacaattactaggaagattggacaggctgcttagagactccaacttcaaagggctccaatatacatcctatttttcatgtcagccaactgaaaaaacacttgggagctcatgcagttccaatggccaatctgctatctgttagaccagacggctggatcaaaactgaaccagttgttgtattgcaaaggaggatggtgctagaaggggagaagctgtgactcaatggttgaatctttggtaaatttatcaccggctgaaccaccctgggaagataccactgtgatccgaagtatgtttctacctttcaatccttgaggacaaggattgtctcgaggggaaggtaatgtcggaatctggagatgagaaatggactgaatatgttctgaatttatgaatctctgaggatgcttaagccaattgaagagaagaggataaggaaacaattcaggagcggattatgaagatcggacgactggtaatagacgaggcatattagttttgcatctgggagcttgctcgttgtcaggaaccactgtttacatttcattttgtcgcttctctgttttcctctgcttttaagctagctctcgtgtggaaccaagggtagatactgaatgtactataaattgagatgccttatggccaaggaatggatatgaacaaacttatgattatcttttatttcaaagtaacttagcttttgagccttttgtgtcttgcgtcatacactaaatttcatgcagtgggggatggcaagcagcagcggacggacgtgggtgacaacgagccatggtggacaattggagctggatctgaactgagggttgctagacgttgagccggcggcggctagctaggatttttaggattttactcccttgctcttgctccggtacaatatcaatatacagggaggagaaattgggaatttaacttttcctggagtttaatcctaaatggcatatcaattatatacactagtgatagaaagttactttaatacttttcatacaaactatctcatatatacccttaacatacacaatgctagacaactgcagtcttgtttctacgtgtggattgaatagaagccgtgatgcccaaaatatatgaaaccctaaaccatttgcaattttgatcatcatatacatctttgcaacattttctgcaaaacgtttatataaataaataaataaataaataaatgcaatagaacaaatcaattcctgatgttcccattcaacaagaaaatataaagccgtgatggtcagaacatgtgcaaaatcttacaaagagggaaagttaaacttgatacaaaactgagagcacacatgcatgcccagaaaggtgagtcgaccatgagtgtgtatataatcccttttgttcgcatcaatggcgcgataggtgaaagcgaggacggttcgtgaacttccgtccgttagctttgacataacgcgtgatgccaaagcaaaaaccagaccatagtagtgacagcaccaaatggaaaacatcattacgtgctgcaaggaaatgaatcaagttagtatgacaaagcatgaagaaggatcaaattaaacttgttggagtgaatttggcctagtgacttggttatgtatttgtttccacatagtaatatgttggctgcaaacaactcgtcaagtttacaacagttgagtgcctctaatctgcataaattaacttaaatcattgccatttcggtaggatgaaatagtacctcttctcagtgacattatcaagaatatcacggcagccaaaagcagagcaaaagcaaggcggaaggactgcaaatgaaaactcaagtaagttctccactaaaatatcctaatttaaatatggaaaaatattgtaggatcgtaaagggcctttcccaccccaaaagctagccattgaggtgaggggctcccccacttatatcttaagtccctcagcctttcaccgtgtatagaccccacagaacaggcccacggtccattaggtatacgggccccgcaggcacccacggtccatcaaaccttcacatactgtgtccatcgggccagagatgttaacctagccaggctctgataccaattgtaagaccgtaaagggcctttcccaccccaaaagctagccattgaggtgaggggctcccccacttatatcttaggtccttccacaaccaatgtgggactattcaacaaatatctccactaagatatgcataacgacattcaaatgcccatgtaactctatcaacacgaaagaactaaattgagggaatacatcaggggtggaaatcttcgcaggtaattacactgctggttaccggccaggagctccaaaccagttactggtatttccggtcagaacattatgagctgtatattttttgcagcattaagtgtgataaatactaagtcattaaaaaaaagcacgcattatccatgccataagttttaatacaaaattttccatcaaaaactggttcatggtcggttacggctggtaaatggtttgtgaattaaaaaaaatggatatagtggttttccagaaagactggtattcaaaaccttggtatggatcatagcatcaccgctgtcaacttatcctagtaagtagatggaaacatcaaaattatgcatagaaattcattgtaaattgcaatccttttaagcatgagaattcagaaccaagagtaagaacaataaatgcaattcacggtatgcaacttaaggattattcatctgtaaaaaaaaatctcaagtaatagaaagaaaataaccaaccgcgtgattctctataagtcctttggttggagttggcatatcccgactaactgaggatatgtgatgtccttgaagaagatccatggcatcctatacaagacaataaacaaataatgagttatcactatgccttgatccatcattaccaacgtaagggatcttttcttcactcgtccatgatgtcttggataaaatagcaaacctaaaatagcaaaatccaactcactccagcccatcaatggtgagaccaagtaagcaacatacctgtttagtaccatctgcaaagttgttcaggtaatatctagccattgcattccacagatcatttaaaattccctgtgtagttcgctttccgtacctaataaataaataagatatagttaggttaagaacaacaaataactaattaatcattatttgtttctaaagatccaacaaccaaaagaagaaatagatcatagacagcggattaatagaggaaaaagtgaaaacatgtggcaatgccattggcagaacgatagtattattttgcaccttatgtgatcatgtagtttgtcagtaatttaattataatactgcactctcatgcattagaactgtgtcaacatcttaggtgtcagctcagtcctgatactgggaagtaagcaactaaacataatccaacaagtaatttttctgatggtgacgagaagataacttttcacagcgagcaagaaataaatcagtttaaaagttgccattataaaggtttaactattgaggagattcacaacatgaaactagagaaaatgtttagcaggctaggtgttaaaggatcttacaagttacaaaacctttgcttcataaggaaacattagcaactcagcttaaacgtgcttatggttgcaatcaaatcattacttctttttctgaaattagtaggtccaaattgtgcaaaggaaaaggggctaaataagagaattcacaaaaacttgaaaacacaaattaccgcacaaagtctcccttcaaggcaggagttccagagtactgagtgcttattgcatcgccatggttggcccacactgaaaaagaagtcagcaattgtttaggaccagcaacattgtgagacaaatgtgggggacatactaacaaacatgtttagtgaatatcatatgcaacacttacaaactttgtaatctgcatcaaatgccggataatcgctgattgtattgttgtcaccaagaacactgattttttgcagttggctttccaatatttttctcccgatcatgctctgttttgtgtattaaggagactattgtagttacatacacattaaaaaaatggagaaggccaaagaaacaaagtaattgctcgagaaagacataaggatccccacacaactacaaatactttgaatgtaatattctagcccagtagttgctacttgctagtgatgtaacccatggtgtggtttggtgagattagttccacatggagcattgttgacgcccgtaaaatgctaaaagtgatattttgtactccttaaatacttatgaataaatgaggtattgataaatgctgtatttattttggcactaaccttaatgtatccacgagttttggtgtgtcaacaagtttttggcggtaagccggtaataagtgcatcaacatattcaagcaaaatcaggaagttcaaaaaaaatgcaagaacaatgccaggcaacgtatgcaacggcccaaccagcctagccaaccaagggatgcagtccggccggtcccaaaccaagcatgcagcctggccagcccaagcttacagcccagccggtccactccgtagcccagtcgatcccacaccgacataagttggctagccccacaagatgccttagctgctactccacctccttgtatgctccatgcagtgtgggagaaatgcctcatgccacttcattcctccatgcctggtggagatgaaacccatatgcccaaggcacttctaatataaatagggggctccactctcacttcactcgcccctcttctcgagagggtggaaacagctaggaaaagatagttgacaaggaaagaaatctcagagaccagaaaaatactataggccggaatgctaacactccaaatttgtaccacttcgatgattttttctccccgatggaataaaactcctatcccttcaatccggtaaaattctgatgtgatcttattatttctttctagtttactatttgttatctgttggtacctcgtctattcacactttatgtttatattatgcatgtctagttactctatgtttagacttcaatgtggactatttaacctattgtctggacatggtgcatggctatacatttacaaggaatgtgggtgacctagtactgccaacaacccttctctcaaatggatccaaactgaagttatccaatgacaaggatgaaacaacatatcatttattttttgaatgtccaatgacaagatcaatctagaatgtggtgatctgctcgcacattcttgtgtaacgaaggtttatgctctactaccaaccaaagtccatatcgactaaactcctcacgttgtgtagaagtgttaaacgaagatactatggtcagaaatccctcagtttgtacctacctaaactctatatgtgggactaatcgcaccaaaaccacagtccgggctacaagagccactattattgggcctagtattaaattcaccccgtgaaggtttgacaccatggcagtgcataactaatgtctagaaccacccctaggtacataaccaagttttatgacctccatgagccaatgcatataaccccatcaatcccattgtttgattgaagaaattaaattggaacaggattggttaagaaaaccttctctttaggaggtgagaattatgttctattttcaactttccattctccccgcatttttcctctacttctctacatggcaaacacatcaatctcattcaaggcagccacatcgaaaaatctcatccatggcagagtgcttcttctaggatcgcctcctctctattttctgtgttggttggatgaatgatgccttgcgcccttcccccacgcggtcagaagtctatcatatcacctttaaggcagttggatgatttcgcctccccagactgctccattgttctagctgcctccacctctggcacacgcaatgacgtcggcctccttgtccaactctaggacagggcactacggcctctccccatctggcgcagcgtgcggcatcctcttcactagcttcaacgtctcctcatagaccagagtcatgcatgcaccatcgcttttctctcaccggctgatatccacgcagcgaccagacatagcaaaagctatcacgtgcgaggtgggaagagctcatctagcaaaatttctggtacaacaccgttttgcatcttggtcgaatattctatcatgttggatgaactcgtcccggctcattccacttcgtcctaccaaccaaattcagggtgagggcctcgtccaaactaaacactatctagaagaacctaggagcgattatgtgatgttctgtatcttttgaaaactgcacttagattacaatactgtactaaagtacatcccattctttcaaaaaaaaattaaagcgatagttaccacatcagcaattattttgttagtatctagaattacatttcaaaatatcatgaaaaagctgtccttggaagtatgtacctgagttacattagtacgatccagacaatcgacacaatttgttctaacggttccggtctgctcttccattttctcacctttactatttaaaaggaagtacctatgccatacaattaaaaagactatgagaacaaagaaataatatgagtttggatgaaagggattcttttgggacattccttgggttttaatccaaattcctcaccaaatttcagctaggaggttttatataacatatgtgaccaaaagtgtcagatgcagctaccattttgccatttgttttcttgttgtgtgggaaaggtagatgtgaaatgttttttttttctcgccatgtagagatggcaacataagaacatagaaaaagaagcaaaatagtttgactaatgtacgataaatttgctttccctttgacaggaacagggccaaaactaggaagcatatagcaaaatatgtgtacgcttttcaatgcatgtatgctagtccctactaccaataattataagttataatgaaagaaatattaaacgaaacaagggttattaaacgaaagcacattactgcatatatgctatagtagtttggcaaaagaaggaactgaatagtaaatcagctacattattctctacatgaaatgcactgatttttcaaatagaaaatgcagatactcacacttgcagaaatgttaaacagagaaaaattctgtagaagaaaactcatgctaacatatactctaccaaatcaaatggcattttttgaatgtgtaaaatcacccccacaatcttataataaatgcaaagatattaagattgaaaaggtaaaaggtaataaaaaaattccatttccagccaataaaattttaaataatttgaataaaaaaataattgaagaggcgaagatccaacaaggggtttaaaagccggccaaggaccaatgttaaggtaaaagggtttaatccaaaattattaattattaaaccaggaggactttgattttttagccacaaacctaaggtttctaaaaatatcctcaatttgatcatacagttgagaaaggcgttcaaagtgaatatgaccacagatttgatggaagtcaaaatgcacaaatctgcaataattaggtttaatgcaattataaacagtaaaccacaatagaataactctagagtggagcaaaacttaccttatatcttcactcaagataggctcaattgattttgcatatctttcatacaggcgaccttcgccaccatgctgaatatattaacaaggtatatgataggtgaaaaatatcacacaggagtagaacaaactagtaccaccaccgcatattactagcatgttaaaaataagaagaggcaaaactcctaaacatttaactaattctagagcaaacaattatcgttatgtaatataagctgaaatgaactagttaattctatttcaaggaacagaatatacaaaatcggagataaaaatgcaatttatggaatgaacatgggacactattcgtcaaagtgaagaactcttttttctttttcttttttttatcttggttatggacatactgaactcagttgtggcagtctgcggatcatggatatctcctggagcctcttgctgtcacgcaaacaacacaccgggtttctctgtatgcggctgatgtggtcatgttcttgtgtcctacaagtggggacctatctcttatcaagcagattttggagtttttggtcagatttctggactaagaaccaatatgatgaagagctcttgcattcctattcactgcttggaagatgatctggaagtgatttctaatgagttgtcttgtaaagtgatgagcttcccttgctcttatctcggacttcctcttagaatatgtaaaccaaccaagacagaattgttgccccttgtggacaaagtggcagataatttaccatgttggaaagcctctttaatgaatagggcgtgctggcttataacagtaatggtggtcctctcggcttttatgcaatgatggcgttggatctctaagtgggtggtcaaggctatagataaaaggcatcgcggcttcttatggaagggaagagaaaacactaatggagaaaatttgtttgatctctttggatcgtgtgtgtcggcctttgtgcctatggaggccttggtatccttaacctagaaaagatgggatgagcattatgcatgaggtggttatggcttcaaaaactgattttgatagaccttgggctagtttatgcttttaagggccttcagacggccaattttttttccaagtgggtggtcaaactattatggaatgaagaaaataccaaattttggagcgataggtagctgcaagggaaaacaatagcaaaactggcccctaatctctttgccttgatctctaagaggcaaggaagcaacgtactgcggcgcaggctttggagaacaacagatcggtggctgacatacatggggagctatctattcaggttctttacgagtacatgaccatttgggttttggtataagaggtggttctgctacaaggtgtacaagatcaacatgtttggaagctaacggctgatgggatgtattcttgcaaatctacctatgaagcttatttcctgggatcgatcaagtttgctccttggaatcacatttggaagagttgggctcctcttcgctgtaagttcttcatctggttggccgtcaataatagatgttagacagccaaccaacttgctaagcgcggattgcagtaccccgcggcatgtcccctttgtgattaaagtgaagaatccgtcaaacacattttgatttcttgtgtcttttcttgccaagtgtggacggcactattcttgaagcaagggatatctgatgcagtgcctcaaccttcaactatttgttttttgaggtagtggagccaagctacaaatgactgtgttttcaatggcgccaatcctagaattgcggcggtcttgcaggtggtagagaatgagggtaacctttggtgtttagcaggggcatttgccctccaaaagtttcttaatggagcagcaaacctaggcagctagcgcttgccagtattggctggggtgtgtgggtgtgttttttcggtgagagtactctggttctcctactttgtatttttgttctttatttttcttccccttaatgaaatgaaacacatttctcttgctttttcgaggaaaaaaatgaagaactctcattctggtcctgcaatcaagacaaccatatgacacagcctagatgatttgtaggggggtgggtttgatgttgcaactgtgtgaagtatcaagatgaggccctggaccctgtggaatggctaaggatctatgatgtggttccagatggcaagggataggtgaaactggtatttctttcttcaatcatgcggcaggactttcatagatgaagttatctaaaaccactaacatctaatgaaacaacaaaatgacttatccagagatatgcataattaagaccagttttatctaaatatgccaacaattagacttctgaagactgtgtaaagtctgacaagctgccttgaggccagtcaacttgcacaccaatggtagggaatcccaacatgactgttatacatgacaaacagaatgaagagactggtttgggtccaagaattcaatacttactgtattgacaagatcaacagccacgacagctccatatttcttttgtaaatcatgaaaatgccgttcaagtacacgaggctgcagaaatcaaatccaagaaaatttatgacaagaaaagtataagcaatggctacattgcaaatacttaagttagatcttcataatatgtacatgaactgaaggggtagaaattagtggagcaacaacgagaaattagtagagcaacaacgataaaaaggaaaaaaaatcgtatgatgagagcactcaccgcctcctctactctgacaacatcaaaactaggtttatatgtcaaatcaacaatttgttcccacaaaaaaggcatagaacctcgaacctgcaatacacatcaatgtaacaaagttatcacagaatataaaaataaactgtaagccaaaataaatatgaaaggtgctagaaaaaagttgggaaaacctgcaaacttttagtgtcatattcaccgctagtatcaagatacaaataggaagacaagaaatcttttagcgtacatgagctgtgcatgattgactcttttttccttttcgattgttgattccaaagataaattggaaacaaaatatgaaggttaacataactttatgtgtatgcaaatcattattttttcaaaaaaagaaatgggacattgcatcatgtcaattcctcaaacggggacactagctcccctatgtgtcattcaattgagtgaagaaacttacttgcacatatgatgctgtaaattctttcgattgcattatctgctctgattcaacaaaatttgcagcataaccctctggatcagctcctcgcctccacatccgggtaccttcaacaaagaacagctcgtaaattcctaaacgatcattgacattcagtttccaaaaatagtaaaatagcaaatgaatacaaatttaccttaggttctaactacggtaacatttaatgaaaagaaaatggcgaataagcttttgatggttcgtaactcttacctatcctacgtgtacaccgacgtgcaatcagggtcacatttaccttctctgacccaacttctgcatggatactctgaaaacctgatatttagttaagttgcagaagttcaaattgacatatgaccttaacagaaaggtaacctaaatataaactatcataagtcatctaacatctcaggtaataagttgagatgttacgatgaggtgaaggatacttccttgaatgactggtagtaagtattggtgcagctgttgagggacaaaagggaaatcaaaattaattgtaaatattggtcacacgatccacagttaataacaacactaatcttactttgttctcaattagaggctccaacaagtaaccgttccaaagaaatcttggttctgcctgcaaaaggtataattaattaatctggtgcaaaagtaaccagtaaagcatcaaaagacttattaacatgtccaaagtgtactcatgtagtttattaaaccatttcattttctgcagaaaattcctcctatgccactgagcgttccttcaattccttattatgctcctgcttttgcactcacttaactggttatgtatgaaaatggcacaagagaaataaaatttgcactcaaatgacgttcaagaaatgggaagtatatagtggcaaataaggtgttgaggggtttatgggattttctcgcactacatgcatagggtggaggaggcaactgtgtcttcaaagtagtagaaaaaaaatcatgctcctatcacttttaccactaccatcaaactctattagttgattaaagttgttttggattactaccctacactgttttggtagtgctgaaacctaggcaagtttcagtactaccaattatttggtagggtccataggattgtattgatttggtttggtttgatgccaattatgagccaattctttgtaggttaagacagctttcgactgctgccaatttggacatgggcattgccaaaaatatggctccaacccaaatgcatcacaactactattcaagtggccaaaatattggaaggggtcttggtatcaaaccaaaacagtccttagtattactaaaagtgtggtcaatgacttaattgtaaaaaggtaataaaaataagcggtggattgaaaaattatttgcatatgttgttacaactcaatttttcattttgtttacggaacagttttttcagtgaataccatcaaacaaagttttaaaagatattcactgtgattgctaaccatgctatgacatgtttgtctttcatttgtatgtcgtagctagcgttcatttctatttccgattgtctttatgaaaaacaagatgtcttaatcatgacatgggctccatctgtgtgttctttcctttttttgcaccacctttctcactgtccctcacagagttataacatttaataagaaagcgtaaaataagtcaatgaacatttcactgtccaggtcattatagaatacttgcaagtttggtactgagtggccaatgcggtcttgctggatggtaacgttggaagttcacaatagtcggaatcgtacacgtgcaaacca

SEQ ID NO: 10012 - DNA, 55004 bp, Oryza sativa
caagctttcaccaatgtgggagggtccgtatcgagtgatcggggtcccccggccgggttccgtaaggctggccacgggggcggcactgagctgcgaaacccgtggaacattgaacaccttcgtcgcttctacccctgagggggggggtcgggtgtcaggtttcgggctcgggctaaccacgcacccccctcgggtgtgcagggttagccgggggctaccacacatgcacaaccttacttttcttattttagcatttcaataaaagcagtttcaatttcctaaaggttgtgtctgtgccgtttttccttctaaagaatcttaacttgaaataaggtcactcgtgctcaaccttgccctcgggggctcggttcggtcagctaaaatcgccaagcggggcccagaaccgagccgtgccccggggcgtggtgaactccgggggggaatcggcaaaaacccacaatcgggtcacccataaccctcggtcaccatgttcccggcctggccagtctcgacatgtggatctccccaggcactagccccgacccgagccatttgaggatcgggacttgagcacgagcccttaaatcaagctaaaatgcaaaaggaccacggcacaaatcatcctcaactcatatgcataacaaaacaaagttaacatagaaatttttcatcatttttgattgcagattaagttgatctatacaaaaagaagaaagaaaaagaaaaaattggagattggcgggggcctgggggctcattccaatgcgcccgggtcgctggcctcgtcgccaccgtcgtcctcgccgctggcgtcgccctcctcgtcggagctgggggcgaacgcgagccgaggggccgacccctcgaagctttggacgatgtggttggcggcatcccggacccgcgcgcgcgcatcgtcctcggtcccgggagggaactcctccagcgccatccatggggagaagccggggtccctggcctggtaactcgctaacacgagttccaccgctccttgggcgaggtccctcgaggatgacttgatggtcttctcgagctcctcggggagttgttggacagcccaggccatcctcctaaggtgcggggcgaggccttccagattggtggagcgcgaaattgtctggcctttccagaggcccgcttcccgaccggcgcgatccagccgggagactgcatcccaaagcatgccgggccctatctcacccgacaagcggagggcctcggcttccccggtggatgagtccagggcgcgctgcatgtccgcgacgttgtgttcggcagctgcgaggcgggcgactaagtcgctttcgcccgtagccgccccgccgctgcgcttcctcgcatccagctccttttctcgcgtctcgaggttagcagcctgttgctccagcgcggctctctcggcgcggatgcattccagattgcggcgcgcctgctcctcctgcgctgcctcgcggagggacaggctgtccgccagccgttgtgtcgcggcctcggactcctcaagagctcgctcccgctcagcaagcgcgtcctcgcggagccggagcgcggactcctcttcggcgcaggcggcctcgtgcgccgccagcgtcgcctcccggatagcggcggcggcctcgcggtccgccaagctggtctccacggcgccggcatgatcctccagcgccatggcacgggcttcaagggcctcttcgcgccgccgggacgccgcttcagcctccgttgctcgctgctctcgggcagcggcggcgtcgaggaccccctgggcggcgtcgagctttttctttagctccgcctcccagctcccgtgttgaaggcggagggagtcctgcgcctcaatcatcgcggtggtggcgacgagggcggcctctcgctcctcctccacctctcgggcgatctccgccagcgccgccttgcgggcttcaagctccgagatgtggcggcggtgggccttacggcccacctccaccatggcgtccaccgagcgccgcccctcctcgacgcgcgcccatgcggcctcgagctccgctcgttccgctcgcaaggcctccacctgggcgctgaatccatctagcaccgcggtgtttgcggcggccaaggcttgcagaaggggctcggcactcagcggggtggcagaagacgaggagaagagccgccttggagaaaatgcgacgcggctcggcccgccagaagacgcactgagctcggggatgtcccccggacccgtttggtcctgggcgtcgcccgagggagcgggcccaggcgatgcgcccgcggccctgtcgcaagccgccccggaggttgtcgcctgagcgtcacccgagggagtgggcccgagcgacgcgccggcggtcttgtcgtaaaccgcctcggaagacgccatcgcctctgcctggcgagcccgggcggtttcctcccgggtggcttcttcagcctgacaagcccgggcggcctcctcccgagcggcttcttcagcttggcgagcccgggcggcctcctcccgagcggtatcctccgcctgccgaacccgagcggcctcccgggcggcctcttcagcttcccgaaggcgatctgcggcctctcgccggtcagattctcgcctccgttcctctgcggccgccggatcttcggcctcggattggccggacttgggatggcgggagggacgcgacgggacatcgctgaagcagaagaaaaaaccagaaggcaaacaagatgggtaaggtaaaacttgcttttgggatagaagaaaagacggtcgcaaagagagcgggacgaacctgcgagggggtcggttaaatgaccaccttggaggggaaattaggtttccctgggatggttctgtctcccccatcttgcgcagccgtttcttcttgcgctccccctcgggctgcgatgttggcgcggccccctccgggcgcctgctgctggcacgcgccgccccgccccctcggggaggagatgggggaggtattcctcccagtttcctcttcccccgggcgtcggtagggcggttgctccccgagcccccgacgcggggcccagaagcacgaccccctccgggggtagattgatccccccggcggctcccacctgcgccgccatggcccttaggagcctgctcctctgaggccccgaccgccgtcataatggtcaagatggagacgcgatctgggtcgctgcagagggggaggataccgtgagggatgagggacgcctccacggagttgagatttagcacccgttggatcagtatcttgaagtcctcgggggcccaatcccatctgaccccctggtgggtccgcatatagtcttcgggcccgatgtactcccaggcggcccgagcgcgccgctggagcggcgcaatccgacgacggaggtagtcgccgtacaccatggccccggtgagcccctgggatcgcaggcccgcgaggcggtcgaggacggcgtcatagccatcccccagatctaccggcgcccgccagctggaggcctgcaccgggggctggctcggaagtcggagatgcgcttcgtcggcgaggggggtgtagaaccagtcgctcttccagtcatcccactttttgcggaggacgcaggggatgtagcggttcaacaccggcccccgcggcaggaaatagcagccgccgaccaccgacggcggcgacaccgactgcacggtgaagaaccaccggaacagccgaagagatgggcgcaccccaatgaacatctcgcacaggtgcgcgaagatggccaaagtcatcactgcgttgggggtgaggtgcgccatctggagatcgtagaactccagaacatccataaagaaagaagaaaaaggaggaaccaacccggccattgcgaaggggagaaagaagacggaccgccccgggtagtctggcgccgggcgtccctcacccagcattactatctcacggccggtggcggattctggcatgaagcggcgcggcagcccagcctgcctctcgctcacaatgcgggaaggcggtagtacgctaccgtcgagcagagcggagccccgtgccatgtcgtcggagaaagagagggttgagaacgagtgtgtgtggcgaaggtgaggcgcagcaaagagagagttaggggcgcaaacggcgaaggaaaggggaatagtggcgaaaaggaagggagcaagtcctttcctcgatagctttatacccttgccatcgctgagcccggctcctcgtttctcgtgcccactatctcgctccctcgttactcgctatctcgctccctcgtttctcgcgcccacgcttccactaaattccattcgcccgcttgcggcgcataaggtagatatgcggttgtggcagtcgagatagatcgtatcgtgtgtgcgttaattacgctcgctgaccgaagcgacgttaccatatctccagacgaaacgaatctacacgcccagattcgagcgctgctcaagtgatgtggcagtcttgaagagaccgcccatgactgacggccaagacaccgttaccgatatgcgtggtttgagaccgttgggtttctgcccaatcacggagaccggtcccacctgtcaccaggctttatgagtggcgtcatgcccgaccgcttcccttgagaaggatgattgccctgacataacgccgggggctactgtcggtgatatgggaccgggagtattgcgcccggaggcttgaggcagatggaatcgcccacgtggcctggcaccttcggggacgtcgggcccgagggtgaggtgtccgccctcctcctgatttccccgagggggggtcgggttgctcctgccccgaccccgagggccgaggtgccccgaccccctgtggggtttgcactatgtacataggttgggtgaacacggtagggctcacctaaccgcatttattgcggtctggtcaagcgtgtcacgttgcatgcagcgcaatgcagcgcgctcttttatccggtctgtgaccagtcacagaccggtcggatcaacggttaggtggcgactggtggtctgaggcacgcctcgccccgtcccgtcaagacgagagcctttaggcacacgtctccagccggagctagcgtgttacctcttagagatggcacgttagccctggttagatgaataccaggcttcatcccaaccattacaggcaagatgctacaaaaagaagggtgatcatgcagatcgctgaactgacgcatagaggacaagaatgaccgatctgtgaccggtctgacactggtcgcgtcagcaacagacagccacgatcccacgttgcgcctgtctccgccgggagtggaggtaggtgtgggttgtcccatcgaaatgtcattcggacggcaaccataccaatctccgtccataaagagaagaaaagtccagtttggaaaggaaagggtacatgtggtatccccttaagatataaaaggaggaccatgcccacaaagagagggggctggattttcccgagagaggagagggctggttgattttttgtaacttgctcttacacagatccaccaaaaacacaggagtagggtattacgcttcccagcggcccgaacctgtatacatcgtccgtgtctcgcgtttcttcctggcacgcgatctttccacacacagcgagggcttgagatctcaccctaagcccccggccgaactggcaaaggggggcctgcgcggtctcccggtgaggagccccgagctccgtcaaatgccatttcacaattattcgaattaattcaaagttgaatctttaaactagcatagcttggatttgaatgaaacttaaacctaaatttatctaagatcaagatctatctgatggtatcacttttatcatttattttgtattatatgaatttatggtgattttatttgaattctattcgaattcaaataaaatctttcgtgtctaaatctagatccctaggaagttgatgagttgagtgaagaccagggtcagcaaggctgtgagcaaggcaagtcatctctaatctttgagcatgttaaacctattgtgaagttatgttgatttaagtaaaatttgcatgctatatatatatacacacacaccatactttgatgttgattccctgcaattatttgtatccgcaatattgtgtctcgtaaatctaataactgcttagtcaatgccacttagattcatgcacatccatgtttatcaaatgctatggtggtgtttggatccagggacttatcggatgtttagacattaatttggagtattaaacatagactacttacaaaactaattacaaaaatgagatctaattcacatgacaaattttttaagtctaattaatccataattagcacaagtttactgtcatggattaattaggctcaatagattcgtttcacgaattagtctagggttatggaataggttttgtcaataatctacatttaatacttctaattagtatccaagcatccgatatgataggaactaaatttttagtcccatccaaacagcccctaaatgcttgggcatctactttggggaagctagttgatatacggcatgtggagacatgagcgccactttgatataacatgaacaaaatggtttgtgaaaggaaatctaaactaaacaaatgtttttagactagtggctggatgacttgggtggtgtccggtaaaggctagtgccgtccttggtctgttaaggaccgtgccttgaagctaagcatgaaatgaccctagtacaaccatacttctcgtatgggtatagacctagcggagtaaatagccgagcagaggtggtacccaagtgcactggttttcatctaggtgtgtgaataggcggggagcctacggtgggtaaccatctgtgggcaaccaaattaaaacctaacttaactataacttaacgcatgtgtgagtttttccctcctcgggaacgccagaactcctctcactactagaaaccatgtatgcctagagtgcatgagggctcaagttcatggagcgggtactgccaaagtgaggttattgaaaggctttgccatgacgcatctcattcgttcggactttggctcatgtgttgggcaagtcacggcgtacaggtggagtgtatatccactacagtgtgagtaaaccaacatattcgaatagctgtgcgcgtggatattgagcaccgggacatgtgttacacttgcctagaatctaaattcttaaaatgatgggtgggatatgcatgatgattttgtactggtggatgaacttctcgaaaagcgagaaagggtagaccctagaaaaccatgatggtccagtggccggaagctatccttgggatcacaacggatggtggacagaagcgttactgtttaatgaataatggtattaaaacctgatcagtctatgctaggtcttaggcttatgaaaagaattacaaaatgagctttacacaaaaagaacctttaaccattccttgaatatcctctatgatatgcatcgttgagtgtaattaataatggataatttaatacaaattaaatccagccatgctttatatttaggaaattttattttcccacatttaacttcatttgtaaattaataaacatttaatataaattctaaaaataatttataaattctgaaacgaaaatcaggatgtgagagtgggttagcccaattcaggtagtgtctaagaaaggtggaatgacaatcgttaaaaactcaaaaaaacgagttgatcccacaacgtaccgtcacgggctggaggatgtctatcgacaatagaaaactcaaaaaggctacaaagtcagtccccgttgctctttgttgacagttattaaataccaaatttaaaccgtcaatacatgcataaatctaaaaatataaaacatccaacatagtggtagggtttaattccagcaggaaaagcagaactcgaactacacacaagctccaagtcacttccagatcttcattgcttgcatggtgtgtcactcgcattgtgttcactctaatatccttcctgggtgccaaccataacttgtttacaagatttcatttgtgacttggtttagcagcacatccacccattgcagcttgatgacttgcctcctatgatttatgtagaactaaatgacaccccgcgcgttgttgcgggcataacttgatttacatagtagatttttttaaaaaaatctactgatcctcatcatcaagcatcgaagttgagtactcctaccttgctcagaaagcgtaaaaacatttgacatcaatgatgcaagaaatcactatgagagcgaagaaaattaaatataaagaccttttgatcattacgattttcaaatgaatgaaatcacagcacatgttagtttgactccatatgcatttgcatgagcttgaggtagcacattggggaatgcacatggccacaacccacaactatgtatcaattgtatacaacaaaatgagaaaaaaaaacagcttgtaaaaatagataaaatagaagaaatgagtaaagatctgcacaagctgcaattaaatctttggataattacatatccaatattattagtttttacttcatgtgctaaaaaaagtgaactgaatgatttatcatgatcagaatatgaattttcgtcgcagattttcactgcagtgggatcaagttccatagtgaaaaattaaagcattcaaataggttcctctagcagcgaatggcttaaattcaagaattgagtaagggatgttagaataaatgggctaggcccgatttttctattaaaatctcaagggccaataataaatgttaaggataataataccagcttaggaattaaaagtggagtatctcaacttaaatagggagttattggaggctccctgttgaccggtcgaggtggggatcggaaagccacacgcgcgccgagccgagccggccgggccgaggccatgggcgaggcgtggcgtgcgttgcattgggttgggttgcgttgcgtctctctctcgatccttttgcaatggaccggaatccaaccccgcgagattgcctctgtaacgggcaggcgattcaatacgcattgatcgcgtcgttactatggcaacgggcggattcctctcttgcgctattaggaaacagagacccccgatcagatctccatgctttctctcccatttctgtttccccggttctgatcccgattagatctccacgctttccttcccatttctgtttccccggttctgatcgcttgcgcgcacgagagatcggaacgagcaaggcttttggggagtgcttccgcacgactgctcctcttcttctgttcgttgtccgttcgtctgcatcacctgactgctcctcttcttctgttcatcgtccattcgtctgcatcaccatgtcttctggagatggcgcacccggaggcaaagctggcgcacctggagctggagctggcgcaccgatcgacaacaccaacagagacagttctacctcacaatccagcgaagggactttcacagggtataacattttgtcgctatctctgtttttgttacttctgttagttgcaatgttattgcgttctctacatgatgatgatgcttattctatcttaagcatgctcctggttatgtttaattttatcactagatcacctcacattgttcatgtcatgattattgtcttaatattttggattaaaatatgccgatatatgactatatttccaacaatccaaaaacctgatatatcattttcggtagttgtctttgttgctgcactaaaaccacatacttttgatggttctaattataaaagatggaaagcacgtgcactactgtggttgacagcgatgcaatgtttctatgtttcatggggtaaccgaagtgaaccacctctctctcctgaggaggaggttaagttcgaggcttcggattgcctgttccgtggagcattgatcaatgtactcgctgacaacatagtggacatgtatatgcacaatggcttcagggaacgacatgtgggatgcacttgaggccaagttcggagtttctgacgccagcagcgagctatatgtcatggagaagttctatgactacaagatggtcgatgaccgttctgtagtggaacaagctcatgagattcagatgctggctaaggagcttgagaacaacaattgtgagttgccggacaagtttgtggcgggtggcattattgccaaattgccacctttttggtcggactttgtcacttctctaaagcacaagagacaagagttcagtgtttctgatcttattggctctttgggtgttgaggagaatgcgagggcaaaggacaacttgggcaaaaaggtcgagagaggttctagtgccaatatggtacaaaagaagaaccctcaagcatcccacaacaacaagaaagttaagcctgatgtcaaacccaaggctacaaccaattttaagaagaaaggcaagggaaaggcaaagggagactgctttgtgtctcgcaagtctgggcattgggccaaggactgtcctgaacgcaaagacaggaagtctgctaacatggtcattagcaagggcggaggaacatcggggtacggtaaaattttacctacagttctctctttttttcattcacctaattggtgggttgatattggtgctaatattcatgtatgtgctgatatttccctgttttcttcttatcaggtcgggagaggtttctccttgttgatgagaaaagggtcacttgcggctgttcatggtgttggtacggtcgatatgaagtttactttgggaaagaccgtgcagctgaagaacgtgcaacatgtcccttcaataaagaagattctagttagcggctctctactgtgtagagaaggttttagacttgtgtttgaatccaataaatgtgtcgtatctaaatatggaacttttattggaaaatgttatgacaacagaggcttgttccgcttttctttggatgacatgtgtaataataataatgttgttaaccatattagcgagaatgatgagtccaatgtgtggcattcgcgactttgtcatgtgaatttccgttgtatgacgcgcttggctaacatgagtttaattccaaaattcactttggtcataggttccaagtgccatacttgtgttcaatcgaaacaacctcgcaagcctcacaaggcatctgaggcgagggatttggcacctctagaacttgttcattccgatctgcgtgaaatgaacggcgtgttgactaaagggggaaagaaatattttatgacactgatagatgattgcactagattttgttatgtgtatctattgaaaacaaaggatgaagcattgcattactttaagacctataaagctgaggtagaaaaccaagttgaaaggaaaatcaaacggttgagttctgataggagtggcgagtatttttccaatgagtttacatccttttgtgaagagtttggaattattcatgagaggacgcctccctattcaccccaatcaaatggggtagctgaaagaaagaatcatactctaactaagctggtgaatgccatgttagacactacaggactttccaaggaatggtggggtgaggcagttttgactgctttgtcatgtcctgaataaaattccaatgaagcataaggaagtaacaccattcgaggaatgggaaatgaagaaattaaatctctcatacctacgaacctgggactgtttggccaaggtaaatgtacctatagccaaaaagcgtaaacttggaccgaatactgttgattgtgtgttccttggttatgctattcacagcgtgggttatagattcttaatagtaaactctggagtacacgacatgtgaattggtacaattattgagtccagagatgccacattctttgagaatgaatttcccatgaaaaatacgcctagcacttctagtcaagaaattgtcataccccatcagcactttgcaccgataaaacacaatgatcaaacgcctgagggaaatcctgaggaggataagattgtagatactcgtaagagtaagagacaaagggttgcaaaatcctttggagatgactacattgtatacctcgtggacaacactccaagaaacatagaagaggcatattcatctcctcacgctgactactagaaggaagcagtacgcagtgagatggactcaattatgtctaatggtacttgggaagtcgttgagtgtccatatgggtgctagcctgtaggatgcaaatgggtttttaagaaaaagcttaggcctgatggtacaattgaaaagtacaaggcaaggcttgtggccaagggttatacccaaaaagaaggcgaggaattttttgacacctactcaccagttgcccgtttgaccacgattcgagtactacttgcattggcagcctctcatggtcttctcgtccatcagatggacgttaagacagctttcctaaacagagagctggaggaggagatctatatggatcaactagacgaatatgtactagaaggtcaggagggaatagtgtgtaaactgttgaaatccttgtgtggccttaagcaagcatctaagcaatggcatgagaagtttgacaccacacttatatctgctggttttgtcgtgaatgaagctgacaaatgtgtgtactatcgctatggtgggggagaagaagtgatcttgtgtttatatgtcgatgacatattgatctttgggaccagcctcaatgtgattgaggaggtcaaggactttttatccaagagctttgaaatgaaggatttgggagaggctgatgttattcttaacattaagctactaagaggagatgagggtatgattacacttgtgaaatcctactatatggacaagattttaagtcgctttggctacagtgactgcaagccagctgctactccttatgatcctagcgtgctattaaggaaaaaccgaagaatagcaagggattaactgagatactcccaaatcattggttcattgatgtacttggctagtgcaacgaggcctgacatatcatttgctgtaagcaagctgagccggtttgtctcaaatccgggagatgatcattgacaggctctggaaagagtaatgcgctatctaaatgacactataagctatggaattcacactaccgggtacccaaaagtactggaagggtatagtgactcaaactggatatatgatgctgatgagataaaggccacaagtggatatgtgttcacacttggaggtggtgctgtttcttggaagtcttgcaagcagatcatcttaacgaggtcaacaatggaagcagaacttacagcactagatactgcgacagttgaggccgagtggcttcgtgaactcctgatggatttgccggtggttgaaaaaccagtgccagctatcctaatgaactgtgataatcaaacagtgattattaaagtgatcagttcaaaggacaacatgaagtcatctaggcatatcaaaagaagactgaaatatgtcagaaagcagaaaaactccggagtgatagcattggactatgtccagacggctaaaaatctggtagatcagtttaccaaggggctactgcgtaatgtgatagacagtgcatcgagggaaatgggcttgatacccacctaaggttgcacaatagtggaagcctgtccattgtgatcggagatcccgtgaatttggattgcgaaacaaactattgtgtggctgagagaagagactcttgaaaaggagatattgaactatatgccacttttagatgtggcaattaactatttgccactggacccacatgtcatagacacatgtggacctacatgtcattgagataggtgtggcaaatagttaattaccaaatctaaaagtggcaaatagttaaaagcccccttgaaaagggctcattttcatgatgtacttctcttctattatgcatggtaggatggcttatgccttaatgtggttcaagtggcttttctaagcagagatattgacctgcaaaacatctcagaaggaacacacctatatgagttcgactgctagtcacagtctatgagatttgggcgatctctagatactcatgaaagggcctggagtttgacttatatgctccaaacagagcggatgcaaacggcagcccagtaccagtcaagggtttgagtgaaacctgctcacacaagactgacaattcaaggcatagtccattgttcagttgtggtctgatgtaactcttttcctaggtggaagttcaacttaacagtctccaccaaaacactggtatatcaaacaggttgaactttgagaacatttcttatgagccatgaaatttgttggggattgttagaataaatgggctaggcccgatttttctattaaaatctcaagggcccataagaaatgttaaggataataataccaccctgggaattaaaagtggagtatctcaacttaaatagggagttattggaggctccctgttgaccggttgaggtagggatcggaaagccacacgcgcgtggcgtgtgttgcgttgcatctctctctcgatccttttgcaacggaccggaatccaaccccgtgagattgcctctgtaacgggcagacaattcaatacgcattgatcatgtcgttactgcggcaacgggcggattcctctcctacgctattaggaaacagagacccgcacccagaggcggagctggcgcacctggagctagagctggcgcaccgatcgacaacaccaacggaggcagttctgcctcacaatccagcaaagggaatttcatagggtataacattctatcgctatctctgtttttgttacttctgttagtcgcaatgttattgcattctctacatgatgatgatgcttattctatcttaagcatgctcctggttatgtttaattttatctctagatcacttcacattgttcatgtcatgattattgtcttaatattttggattaaaatatgccgatatatgactatatttccaacaagggaaacctaactacttaaatcatagccaaggtgacaacatcctgaaactaataagtcatgtaaatctataatcatccaaacgattaccctaaagatgtacaatagtaaaaatataattttagtgcagtggtgacttatacctttgagagattaaaaaaacagaggtcatcaggaaactatgatgccttgtgaaagctacaatttatcgagcagaatcagtggcagtagaccgccaccgttattgaaagttgagagtggttagctcgaagctgcactactgatgataattaatggccagaaacatcagagatgatgaaaaattcagtttgcagcaaagcaatgaaacaaatgttgtgtggtgctcaaatgtctaattatactcatatagcaagcaattgatctgacatctggatatatagtgacatttatgcatgtgtatacaggttgtgcacttgtgcgaaaggatacagcatagattcattaagtaaattcaaaggaagatacacatagaaaatgtcagttacagatgatgagagaatcaggctgagcaacagggcaagtacatggtacttcttgttggtgatgcgatgggatcaggggaagatttcaagtgacgcagaagaactatatattgatcggacggtctatatatattgagagtaagctggcagctagatcgacgataatgatcgtgataatttctgggttagtggaggaagatggagaggattacatggcgcaataaaaacaaaaacaatcgtggtgatgggtggaataaaatggattaaatgcgatcattcgcctgctctttcatggcgacagtttcagcattggcgaatgatttccatgggtggaaggagcgcagctttaccatttgattaggaggtgggtctacctgggctgacccagcaatttgggcacgttttcttgtaggtaaatgaagatctaatggtatatatctgatgtacatattgatcgaatggctgatatgatgttaatgacgtggcgaattggaggtagctttgggttttaactttatagaaagaagggataggcaaggaagaaacccaaaagcataaatatttaattagttccacggaatgagaaaacaatttatttctaaaacaacactaatatctaatttggcagatagaccactgaaaaaatctattgttcactgcattccaaacaaatcgagaaacttaaccacatgtgcatgcatctcctgatcaactcatcccccctttacttaatcatctaaaccttctttcagaacttttgccacggtataaagggtatgatattttcatgcccacaaagatgcagcttaatttaacatacactcacctccaccacaggcagcgcatcagtccaactccctgacttaataatctaaccttcttccgctgcctgatgcttgccctcgctgacccagccgccgccatcagctggcgcacgtggccaggagttaggcggagggggacggcgacagcggcgcataagttgatgagacctgaggtagggcaattgtaggtgagcgagccgacggcgtggaggagaggtgattctagtccaatggagacgagatggggagaagggaaatcacggccagagaaaggcgaaccgtcctgctcgatgactccgctcaccctaactgagccttctcacaatgcgcctggagccgagcggcctgaaccggatcccgactccatccacgcgtcgggcatccgactcgggattgcagggattggggtttgcagctggtatccacaacgtgcgcaggcgtgaggagacgtgcggagtggtgggtcccacgcagagtgggagagtgctaattggatgagagcaaggctaataatacagccaactacttactgtatagatctttatggcatatctatcagctcactcatatagtggttagctcttcagtataaatatatagttcatctatctatttcatagattttcttggttcctgtacctaagccagctgtaaggttacagcccgcttctcatctctctcctttcctctctcatacacctcagcatttagccttcttattgccctctattatacttgctctgatggatccaactcttggtatgaaccattggatgaatagatctaagagttagaaaatgcttgttttgatgaaactggtgtgttttatattagtagagatagagatgttgggtgactattgcaacttgattcttgtcctgaacaaaaagacacaagctcatcaattaaggtcaataagcagcagcatcgcatgtacctaccctctcaccaattaggagaccgcatcatctcggcactctcgccaggcaacaaccaccaccctacgcctagaagggtgttggttgggcgctggagtgggaagcgatgacggtgccgatggcctagggcatgtgcaggaagaggcaacggcttagtatgcgcgagacgggcagttgattgggccagtgaggcatggaaggaaaccggcgagtaaccgcatcagtgaaagccagggacaagactcgagcccccctctccctcatagcgcgaccaagatgtgccctcgtgatcgacagtgtgtgcagtggaatggagactagagagcatgcatgaggcggtgggctaggggtgagtgcagtaggcggtggcagccgggtagggcaagtgtgggaggaggcgacagcggcttagtgcgcacgatggtagcggtgggctggattcggtggagcggcgttttctggaaggagtcaggagtggagaagtgttattttttaaccgaccactattttggcggtgtgtagtggacatcgaggggagggatccctaattgcagatgttgaatccaactcgtaatatggaacaatgttagattaagagatcctatggataggaaacatctgtgtacatttttctacgagatgaaactggtatattttatattagtgtagatatagaaataagagaatagatgtatggggagtgagttcagtcaatgacaagtgggttgagatgagaccttgttaatcttaccattttgctagctagctcacattgtccaatagaaaacatacagtaactatatacgtctggttcagcactgaacccaacgaaccactgaccaacttggtgatgggtcgaccaccggtccagtttttttcactatggtgtccacgaaacactcgtccgcgtcaacaaaggtgggtgcatgtataaatagtcaaatgggccaccagacacgtcctggcccgagcatgactcgaggaccgaccaacttgtcatgacgtgccgtgcccgcccaccgactacacctacggcccaggcgcggcccaataaagcacaggttgtgccatgccagcacaaaggcacgatcagcccactgtgctcgtccttcaataaagtctattgtacctcactcatttctttggtccatgcctcatatggctggaataagtttattttacctccctcatctctttggacagtaccttatatggctggaataagtatatttttctcccttatctctttggcctgctgatcgttgggccgtgccgtgccaggccagcacgtcatgctgagaaaaaggcctaggcatggtccaacggtcaggccatacctaggcagccatacattggtgaggacctagcactatggctccgtttctcctctagtcgaatgcgtcgaaggcctcaagttactgtcttatggggctggaataagtctatttcgttttccttatctctttgggcatgttgatcgttggggcgtgccatgcttggccgacacgtcgggctgacaaagaggcctaggcagtaggcacggcccaactgttgggctgtgctgcgcatgtgccaagccaaatctccatgctgtgagtcaggctattgggctgcaaaccttctggctaactataggcgcctaggcggtgacacatcggtgaggacctagcactatgactttgtttctcctactagtctaatgcgttgaaggtctcaagctaatgatatggcttttcctcgtcattatccaattagagacaaacctactggatgcatggattgctcatcctcgttgtcctaggagtaggggaaccgaggaaatgatcttggcgaaactgcagcagatgtgaaggggggaaggggagaagaaaatcacgccttggaaagagtgattcatcattcaaagggacaaattgagtgggcccgaggaacaacgatgaaaattttgtggtaggagagaggaggacagtacatttgaaggtggcatatggacttctagatacgattatgtttccttttttgcttctcccgcgataacaaccatggacggacttcacgctatatgtgcattcccaagccagacttgtagatgacagactaaacgaaccaactgtgtgtaacgaatcatctttatttttataatagataaagataaagacataatagatagatagatagattgattgataaataatattaatatatactcgctctgattcatattataggtcatttgactattttactactttaggtcgtttaggtttaaccaagtttataaaaaaattatcaaaatctactatactaaattagtttcattaaatgtaacattgaatatttttagataatatgaattattctattcctctcttccttttcgtaaccgcagattagtggaggcgggatagctaattgcaggggtgatccaactcttgatataaaccgttggatgaatagatctaagggttaggagagacaggtgtttgatgaactcgtactttttatagtagtatatatgaaacggagggaataatagatatgtaacgtaggccgctccaaggttacaagaggagtttaatttaattattttcttttatcttttccgtcataagtaatagaaacaaatttataaaaagctcacattacaaactataatgagcgaggtaactttacaagttaaaagtatgtgcgcatacattaaagggaggggtgtattttacaattaaagaactgatgaaaatccaatagcctgtgcagatgaacaggtagacacaactgaatacaattacatatattgtagtactccactaagtaaaccgattgtcccactaaattagatgtgcacaactagatcgatcagaaatgatgaagtgacagtgataaaaatgtgctttggtgaccattagctgtttaagaacctttgcttgaaatgtgtggcaacaactacagcgaactcataattgtcaagctcttcttgtcatctttgttcaacaaaacggccatctccttcttgaacctcgccatggccaccctgggcagcagcatcgacaccaccgtcgacacctcgccggccgagttcttgcacctcgtgtggtcgcttccgagcttggaggtgagatcgcctgcgagcggtatgccgccgccggcgaactcagcccacccgaacttgagcaagttcacggtggtccacttgatgtcggagacctcgtacaccctgtccatgctcgacggcggccactcccgcagctgcgccaccgtctccaccatggcgctcatccgctcccgcgtcatcccgcgcttggtcctccgcacgagctccaccgtgtcggcgagcggccgcccgaggaggtcgccggcggcggcctcggcgacgggggagacgtgcgcgttgccgtagaagccgcgcgggagcggggtgtgcgcgttccacctcccgcgcgcgttcatggtgatcattagccggacgcggaggtcgggcccgtacccgagcgccgccgtgcggcaccgccacatgacggcggtgagcagctcgaacaccgtggtggagtccgccaggtgcgccggcagctggccacgcaggtaggacacctcccgtggcccgaacaggaagtactccaccaccatccggtccggcggggtcgacagcatcgcgtcagccggggcggcggcgcggcgagcaccgttctgtagtgccgggctcgacgccgaggccgacgccgccgccgccgatgcaaagggcgtgcgtgccaccgcgccgctacctaggcgtgctgccgtgagtaggtccctcctccatacgggcagaatggtcggggctggctcaccacgtgcgaggtcggctatggccatgatcagctgcgccatgccgaagccgtcagcgatgttgtgacagatgtggaagcccaggacgaatccgccgcatttaagttgcgtcacctaatgaaaccgccacatatagaaatcagtaacagtcaaattaattaattaattagacatggtaagtatggtacctccatcctaaacacttctatatgacattggtcagctcaatcagaaataagaaacagaggcagtatatattcttataaaacattaaaagaattcttccgtgctcgagtattgtcagtattatgtgaaaatccgaccttttatgttagtatgaatatatagtcggaccatgcaacttgatcccatatgtatatgtgtttatatatctgtacaaattcatatggatgctagtgaatttaaatgagggatggagaagctaaaacgttttataatattgaaaataatacaacacaacattaccacattcttaattcgcaatcttaatattgccggcccatatatatatcatccaactgcaacatcacactccagttggaacccctcttgatgggcccaaagccagtccaactaatcgttgtgttgaataaccatttcaatgcttttctggtccaatcccattcaccactacttcagactaaatcttagttaatgtggctgttgtatttgtattttaagtttttgttatcaaaatatgatgccacattcattgtatttctcatgtttgtggcagtgttcaaaagaaaagcagtttggcaactgaaaactataaaaccaattgcacagaaaagagatttgttaactccagaactaatttgtgcataatcaaatctgcaaatctaaagttggattatttcttgcgtaaatgaagatcagtgggttgctgtaattaatagtaggtacaatccctaccaaccatgcacgaagctaccatcactgttctcgtaacaatgtggcgtccttacgaatccttattaagatcacggtccctagtaccagtgaacctaaacccaaccaaagtaatattgttgtcgaatgaatgaatcttgatccatgcctacaaccaatccatagggtaaataagatggactgtaaattaatcatgtcactaaaacacaaataaagtatttagctacccctccaccataaaatatagcgatataatactggattagagacatcacaataaatataaatttaaatataccacagttcagatctgtaatattaaaatatgttttatttagttggttatatcttaggacggatatatagtagacaggttagttaaacattaactgagtggtggattgtaaacaaaaatgaaagaaacaaacgtacgtcgtcgtgggtgttacctgcatgaggagcaatggtttgccaacgacagccctggtgtcgccggcgtcgcagagcagctcgccgacgcacgggtacggcggcagcagcggctggccgaagtcctccagccgcacgtcggcgtcggcctccacgaacaccaccccttcggccgtgcagtccaccaccagccggttccccgcgccgccgccgtcggcgacctccctcagccggccggcgacggggtagtagtacaccagcgcctccgcgagcgccgccctgatggccttggccgggtcggccggtgcgccaacggcgccagctgcgccgccgtcgcatcggcggaagaagccgaccaccgtctcgtagtaccgcagcgtccgctggtcgtcgaggtcggagagctgcttcgtctcccgcggcgtcggcctcgccggccggagcagcaccggctcgctccggcgagatgtgaaggtcaccaccatggcgttggcacactttggtaatgcgaatgcagcgaggttgggcgatgctatctatgttcttcggtggttcatatgtgagcttgcttgatggtggcgcacggatacgtcggttttatatccatctgaaaattaacattggtttaattttctcctgtaagtaacacttggagaatattaaatgctttcaaccattaaccagaatttactctggcagtcgtttctagggctaattatacgatttttatcacttataaaggcacggccccaaaaaagtaatggacattcatgagttacagcatattcatgaaaatgtatattctatctggtcataaatatttactacttaacataagatttagataaaagacccatgtcaagttgaaccgaccaatgtacccttcgccaaaaactacttgtgtactggccatagctgtggagttattgcttgaatccgtatagcacgcccactttaacaaactcttgtccactggatgtaagcgataatgggggccctttggacaaagagatggtctgacgagcaggaactgccagtgaagtgaactaggacatacatgaaagactcagacttggaaccccatccagtcatgcaggagtccaaaacaatcagacgttgcgttaagggcatgtactgctgctgtctgattaacaatgggtatggattgactcacttgcttaaactaaatgaagtaaataggcattgcaaacaagaattgttttgtttaggctgagtacgtatgggcaactataagcaatattacctccttgttccatgcaaaagttttatgtatagacgaagttcctagaatataaaagaataaatcatttttgtaagcttatggtaatcaacacccgatttatcacgcgctcatgacttgcctgatttcacataccgtcgaaaattctaacccaaccacccaaacgaactcaaagtatactccggttcaacagtaggtaatatcgagtaaatttaatgacaaataatacctccattcaaaccttatgattttaaagttctataacaaatatacgattcatacaattcgccctggtaaggacctaccattttctatatattcggctgcgctattaattaagtcaattcgatcttcgatctatttactgtttcagtgttcgatcgcatatatggcctgttgtccaatggacatagtacaacgcagaggagggaattaactaaaactaccggtaggagagaatgccagttggaaaagatgtagatatgaatgccgatcgaacaaatcctgtacgtacaccaactgacatgtcatgtacatatgctggcttatctgcattaattgtatctctggaaactctgatccggaacgcattctatgtatactccgcgcaaaccatctactccctttgttttaaaaaagtgcagcatctagttcaaatttaaattagaggactgcgcttattttcagacagaggtaataacaaatttcaacaaaaaaaactttagagagaaaagtatgcatgtactgtcaatagtattaattatacctatatataaagtctcatcttcaattcattatatgttagcaaaaaaaaaaaacaaacttctatcagtgatatactcataaaattatcatatttcctttttgttatggctagaatataatgaatttaaagttaatattttatagatatatacaacactattgaaaatacatgcacaattttcttctagaactttttattggtattagttggtgtgcacggagtacgggttgtaagcttgtgctctcatacttgtccatgcatatatagctagctctaactcatcagagatcaatggccgccggccaggacatcagatcgatggagccagccaggaaatcaaatcaatggatggcaattggcatgcatgaacactacaaccaccacgttatgtttgcaggttgtgtgcatttgatgtcattgaatgtttcatttcttttccttttgttaacttgttccattgctttgtaaaagtgggagatcccgcgtgggtgtttttgcattcatggttccaaatctaggtagttaattacatgtccatagcatgaaacctattaacgacaaactggcaagaagagtttaaaattaaaattttaagttttgtcaaattgtataaaaaatcacttgatattaatcggacatcaaaatcatgagttgaatttaccaaccgtcgatccatgcgcgagattgagctgtggccgttctatttgttgccagtgtcttctccgatgacgaagatagtgataatgccaccggattagggttcgaggtggctagttgaggtggtaagaggagattaatcgtgggatggtaggcgcatgagagaaaggggctgggccggtgtcggcagcaaggattaatgatcatcgtaggagtggctagcccgtggtgcgtcgtgaggaagagagttgaatggaggggaaagtggaggaatggaggttggctggatccatggaggggaggaaaggagaagagaaaaaggagggggaggagagaaaaaggtggggggtcggggaaaaaagagaggagctcatgaggcgctctcttcgcgcgaccgatgcagggactcaggcggaggatagtaagcaccacatgtgaaaatcgattctcacaggtgagttttgaccggacaccctttatataattttgcacatggaaacttttttagccttgtaaaaataaattaaacggtggctgcgaaaattatttgtgtggtagtgcatcatcaggatgagattttgggcagagtaggaggataagttagggttataaagtttgcatgtaaacctgaccgttagaaaggtgagtgccatttagcatagaatcacttgatccgttttttgaatcatttgactagaagaatagcgacaaacttccgtgagtgatttaaaattttcgcaacaagcccgcattgcatccttttccaatgatgcaaatttatcctctgcaactaattaatttgcatttcgtgatgaggtggttacaaatttccattggatgccaggaacctgttgtggtgtactccctccgttttttaatagatgacgccattgactttttctcacatgtttgaccattcatcttattcaaaaaaattatgtaattataatttattttgttatgagttgttttatcacttatagtacttttaagtgtgatttatatcttatgcatttgcataaattttttaaataagacgaatggtcaaacatgtaagaaaaagtcaacgacgtcatctgttaaatggaggtagtatataattaagatctccaagcccatgctataacagatcctgttcctacgttatatatatatatattttgagcactgttcctacgttatatatgtccaactaacgcatcctactacattctatcgtccaattaaagccaacaaatttatcggctcctatgttcctcgttaatttgtacatatactactgtagctatagtccatgcgtgcacaaacagctggtagttagcagttacaagttgatcagctgcatgcactgtgtgtgcatggcaatgtggggttcgcacacaactagataggtagatctagtatgggttcatcggtttcatggatgcatgtacgtagtaccaagtggaaattaagaattagtctaggcataatggtataaacagtagtgtacagcacgcctcaatatataatgttatttactgttgaaaagctgttattattaggggcttatatatagatacacccccatgaccccatagatgaagacttcacgctccttgaagcaaagacgagcttaaagttaacagccactatgtcaagctcatatatatctcgtatactccctcggtccctccaagcttcaaattacgctttaagcttatattaagtcaaacattttaaattttaacaaaaattttcatatagtttaacatcagaagattatatttactatgagaaatacttttgtaagatataatttatatgtcaaaaatactgcatatgtttgacttaggacatacctcgaataacaatataatttgaaatggatggagtatgtagcaaaacgtatagagttcaaatcaacaacaaaatcagcaagattaaccttgcagtgcgattttgaccttgttcgcacgcaccaaataagttcgtgcaccaaaataagcattttacaagttcatgtactatattgcacctacctgacaagttcgtgtaccgccgatgcaatttactcttaatactaatacaaataccttatcttttttccattttttcatctttgagttgagtcggaccatacaagaatacgaaaataaaattatcaacaatctccaaatagaaacccccggccaaacctatgctactcatcctagatctagaggaaatgctagtcaaacacagtagtgtcagtttgccacatcagtatcctctttgatatcctctttgatttcaaacaagctaactactgatcaactagttacttttaacactacataaaaaaaacagtgtggttgctccctaacctagataagaaaaatctccaataagtaatattagtatcaattcgttacgataaccggcactaacaacattatttttctgtgtaaaattttcaaatttgggttaggttatgaactgacactgatgacccttatcatatatatttatacaaatttggatatgaacggaactttttcatctggaccagatcatttgagacaaacttttgtgaaaattatagctctcgatgagatgtccaattttctattggacaacttttaagtttgatgccatttaagggctcaaatatgtgtgttgtcgaaatgacaaccgcatacatcgaaagacgtggttactcaacagtggtaggaagaaaacgaagtgtattaaattttgagtttcccttctttccttttttcccattacatggccctagaggactatttatagccccattataggttcttactagtaggctctaggttatacaggggaatttacatgattacccttatgaaagggacatttatagaggtacatgatgatataggggctcatgggcccctgatgggccgtctggcgatcgccggccctattgcccctaggcttgataggccgaaaaggcttcttcggcccttgcgggggtgaacttgccaacgcgaagtcatcttccttcggcagatagtcttcgccttgcactcttcgcctgagacgcctctggcctggcaaggcactcgtacgactcttcgccttccgccgttcttgccccatagccttcgccatgggtttcggcagatttggtcgaagggcctcatgccatccgccaacaagcccctcacgggcaagggtgagattggagcttcggccgagaccgtgcaaaccatgtggtatggtatgcggcgccccctttcgaccgatgctcctgccgaaacctacattattcctgtgagtgaagtttgttatttgtgcggctggtgttattttgccgcgcttcgcctcctgcgtttggtggcatattcatatatatatatatatatattatatacattttttatatattttcttttcccggaccgaaaggaacagtattgggctttcccttcgtgggcttttcactgtgccgctcggacggtgggaagttaccgtttcgcctacccttgcgacacgtggcactttattactggtgggtaggcgaacgctcgcccgggcgagctatatattctcaccgacctttccttttcaccgccacacttgccattttaccgcgtgcgctctcttcctccgtttctttcttccaaagcatctcttgacccctcaagcgtttcgcccattctctttcttcgccaccgcaaacgcaccattcgccatggcccctcgcaagccaaaccctgcttcggcgaaagggctggatcccggccgagtcgatgacgacagcaccgtctttttgggggtctctcttgtggacgacgtcgagctggcgaagctggtcagctctggggcgttggtcgaggggcaggctttcgccccagtgaaggccgtggtgccgaaacctatcaacaatcggacggtggtattcgccgtcttttttgaagcagggctacggtttccctgcaacgtgttgttgccggagatccttcgcctcttccaggtggaacttccatagctgagcccgttggcgcttgttcggatcgctatcttctactgggcgtgccggacttccgggtttgagcctaacgccgagctcttcggcgccatatttttcgccaccgtgaactcgaagacggtgattaccccggctagaacgaagaagacagtgttcgggagcatgaactttaacgttcgtcccgagtggtccgatctctggccggtgaacgctgccatgtcaaagtgggaccaccattggatggctaggtggttctatcacaccatccccttcgaggctggcacttactcggcgaaagccctccgttgccggcatagggcgatcgcgcctaactggaaacccaagatcgccgtggacggcgctatggaggcgcggttcgttctactgcggaaggtttgctcccgccttagctgccgtgacttggtggaggaattctgtatgcttcgcatctttcccctctcccagtcatggcaagttacagttgatcaaggcgaagaggttgacggtttgccgaacctgattcttcctgaagggacagacagtaagactgttctcttgccatacactgctgtgctttgttatcttgccttgtctaactgttaacatagctacacactttacttttgcagcgttgaccctcgaccaggctgaaaacgaggcccgcaggatgatcggcgacgtgtcggtcgtcgagtatagccagttgctaacacgacaagcggctgggcgggcgaaccgggtttacaacggcgaattgcctcctcgggcaaacccccacaaagctgacgacgatgcagggccttcgcgaatgtgaatgtgcggacaagtgaagcttgcccctaggaagtgaagcttgcccctaggagaggaggaagaggaggaggccgtggctgataaggccgcgaacgaggcgatcgaagaccgcgtcgacaccctcggctacactcctaccccaagtcctggtcacaacgagaccggggtggagtttaacagctcccaccttcgacggaaggatttggaaggggccaaggccctagttgcgttctcctcgggcaaggcggcgaagggaggtccggtgcagaagatctctaaaaagaaaggactcgtcgacatcgcccgcgttttcagcgacgacgaatcttctgacgggactccaacttcgcccgctggccgcagtttagacctttcgactgctcccctcgctccgctcggcgttgctggggcaggcggtaatgccgccggggcttcagcctccaccgaacggattgtgtcggctgtggcgagggttttcgggagccctctgcgtgagccagctatttcgccgctagtcaaggcgatggggaagtgtgcggccaccgaagcatcttccaccggagtattcccttgcggcgccccacttcgcccctggtgatttcgagactcgggtggaccttattccctttatggagggggtgagcaaccttgtcttgcccgccggcaccccgagcttattcaccgaacttaatgagttcgacgaggggtgttccgccattaaaagcctggcggttcgggtatgccttttcttccttcttcgttttcctcttcgtcccttttttttttacgtctgacaattaaccttttgttcttttcacccgctcctatctttcatctagattcttgtggctcactgttcgacggagcgaaccgtacgggcccgttttgacggttttaagagccgtcttcgggccaaggacgacgaaataagccgcaagaacctggaggtggaggccctggccaataccctcaaggaagcgaaaactgaagtcaaacgccttcagtctaaggccagggccgaggttgatcacctcaaggccgaactggagaaggagaaggaccattcagcagtgctgattgactactacaaccttactgagccgaagatggaggttctttgcctgaaggctagtagggccgaagcgagcgccgcggaggagtcgcagcggttcacaggagatggcgaagaccaccgaatccgcgagaacggcttgccaaacgctccgcctcgcccttactgacatgggcgcgaaagtgcggggggtctctgctgaggatcggtttcggactgcgccaccgcgtacggcgattgctgtgagcatgtatcggcggccttcaccttaggacttttgcaacagttcggctgcgagcacgtcgccgagttccctacctatgcgaagggggactgggagattagtgcgcagaacatttcgcccgctcttcgcgcgtggcgaaaacagttctggcagaaagatggccggtccgctgccaaagtgcgccttctagagcaactagcgaaggcggaggcggcagatcagggtgaaggaaagggcacgacaggcgaagaggttggaggcgatgcccaggatcacccagaggttttcctccctcttctgcgtttgcctggagaggcgaatgatgtacattcggcaggctgccgccaaaccttaaaaaaggcttttttgtacaattggaatatatgacacaatcttaattactttttgatgatcgaagtctttggcatattattatttcgctcatctcgcattatgccatacctcccccttcttcctcctattcttactatgtaagctgtgttttgctttttctgcactgtccatcagggggttcgccaaaagtcatgcatccggccccctttcgggagctggcgaagtcaaaacaagaaatttgtggcagtgaagggtctgccgaaggtgcgatgtccatttcggcctatttatcgcgaaatggagataaacggtcgcagctataaggttttcatggttgccgactggctgcgggcgcaccccgggcgaaccttagaagattacgatcttgttcattcaagacgtttggaggatatggctcgctttcggcgaaaccatcagaagactaaacgtcaggaaacgatctttcaacgtcgttacagtttagtctgtgtttcgccccctactcctcttaaggttgtgtattatattagtagtgatgatgaacctagttcgcctgatcattccttagggagtgatagtgattatggggacgaagatgtaatttacatgtaaggtgaattgtatcgtgttgtgaaacttctattcttcgattattttttttcgaagttaataaagacgtgttttatttccttttcgctattgtttgcatcgtcacattttgtgcttttgttaggtcggaacatgccggcccctttgcatatattagcgaaataggtgtactgactttttagcttttcgtcgttcgttttcgatctgtagcattctgtgttgaaagaaacgcttttgcttttatgctgatcgaacgtaacatcgttcggctatttattttccgagacaagctgttgcggtttcaacgttcggcgagcgatgcttcggccgattcgtttcgcccccctggcctttttcgctgatcaggcgtttgccttggggtttttccacaaattatcaatcacacgaaaaaaataaaaagaaggcggaggacacatagattttatactggttcgggcctccatggtggataatagccctacatccagttttttttcttttttctctctttcttctttttttttcttgctgaaaggctttcatagtgccaaagggcttacatagtgccgaagggcttacataacagtatgtacatttttacaagttggcgatttgggtgccacccattctagacatagaagcgctttagagaggtggcgttccaggaatggtcgaactcctcgccttcgagtgtcgctaggcgaaaagatcccgtcctggacttgtgtttgatgaggtatgatccttcccactttgattcaagcttgccaaccgctactgggttcgccttcttccttaggacgagatgaccaggcatcagctccgtgggtcgaactttttgttgtaagttgccgaagtgcttgtggtgtacttgtgcatgtgctcgagtgcttcgactcttactccttccaagagttcgagcgatacttcgcatccctcttcgcccccagagaacatcacccttggtgagttagcccctagctttactggggtcattgcctcatcgccataaaaaagcataaacgggctaaacttggttggtcttgtgggggtcgttcgaagggcccagagaactgatagcaattcctctggccatttgcctttcgctgccccctcgagtcttttctttagtgcttctaggatcttgccatttgtacgttcggccgccccatttgactgcgggtgtgcgaccgacgagaacctgatttccaggttaagcccttcgcacatttctctgaacttatcatagtcaaactgcttgccgttgtcagtaataaactcttttggcactccgaaacggtaaacaatgtttttccatacaaacttctgtactgctgccgaagtgattgccccaaggggttcggcttcaatccatcgagagaaatattccacagctacaattgcgaatttatacccgtttcgcgccaccgggaatggcccaatgatgtccagtctccatctggcgaagggccatactggtgcaatgggctgcagatcatactggggcgcggcttggcttcggccatgacgctggcaactttcgcacttcttgatttgctcaacacagactttcaacacagtgggccaataaactccttgtctaaatactttggaggccattgttcttgcagcctagtgcacgccacatagaccctggtgtatctcctttgccatttcttcgccttcggcaaaagagatgcaacgaagtaaaggttgaagtaccccaaagcggtaaagctgacccgagaccatcttatacttcgtggctctgagttgcaaatgcttcgcttctgcttcgtctaccggaagccagccagtttcaaggtgtttcacaaatgaggttcgccagtcatatgggtcttcgcccagtttctcctggtcgattgccatgacttccaagctgtccatgggcacacttggagcatgtaggactttgaaaaagatgccaggcgaatgtgggccaccacaagcagcagatttcgccaaggcgtctgcttcctcgttctggtctctaggcaagtgttcgaccgttatgccggtgaagcatttttccatggaccgaacagcctccagatacctcttcattccctctttttttacctcgaaggatttgtcaacatggcctgctaccaacttggagtcagttcgaattagcaggcgccggactcccagtgctttcgcctttcttaggcccaggagaacggcttcgtattctgctgcattgttggttgtgtcgaactgcagtcttgctacgtaccgaatcggcacaccattcggcaaaaataggactgccgcaatgcctgctcccctgtgcgaccacgagccgtctgagcacatcacccagaattgttcggcgggctcggggtcgggggcaagtaccggtgtccattcagctacgaagtcggctagcatttaagacttgatagcagagcgtgcaacaaaatttaagtcgaacggggatagctctgtcgcccacttgctgagccggccagtgacttccttgcctcggagtatttcgcccaagggatactgtgatggcactatgactttgtgggcctggaagtagtgcttaagcttgcgcgatgccatcactagggcgtcagtgagcttttccatttcaatgtaccttgtcttcgctccttgcagtgcttcggagacgaagtacaccggtttttgtccgaactctgtttcttggacgagggcagcactgactgccaccggcgaagctgctaagtataatagcagttcgcttcctgggggtgggcttatcagaactggcgggctttgcaagtattgctttagcacgtcgaatgctgcttggcactctggtatccaattaaactttcctgcgcctcggagggtcttgaagaagggcaaacctctttcggctgcctttgagaggaatcgactgagtgccacaattcggcctgcaagcttttgtacttcatgtacgcttgacggaggcttcatttgctggatggcatcgattttctcgggatttgcctcgatgcctctttcggaaacaaggaaacccaacaacttgcctgcgcggacgccgaaaacgcacttctccggattcaaccttgtgcctgctgtgcgcaagctgtcgaatgtctcctgcaggtcgatcgcatggtcgaaagccttgcggctttttacgatgatgtcgtcgacataagcttccacattctgccccaactgcttgccaaggaccttgtacaccagcctggcaaaagttgctcctgcgttcgttaagccgaaaggcatcctgaggtgacaaaatgtgccgaatggagtgatgaaggatgttttggggatgtcgagcgggttcatgtggatctggtggtaaccggaatatgcatccaggaaactcatgagctcgcatccagctgttgaatccacgagctggtcgattcgcggcaaggggaagtcgtcatttgccgttcaggtctgtgaaatcgacacacatgcgccatttgccgtttgacttccgcaccagcactggattcaccaaccactccggatggtcaatctcttggataacccccgccctgagcaatttttgtacttcggctttcgccgcttcttggcgatcggcagacatcttgcgcaacttttgttttcttggcttaatgtccggcttgactgctaggtgatgcatgataagatccaccgggacaccccccacctcgttagggctccaggcgaagatatcgatgttctttttgagcacctctaggatactctcaacttcttcttcgcccatgtcgcccccaagtgatacgagctttgtggggtcggcatcatcaatctacacttttgttatcttgccgtgaggggtgggctttggtgtgtgcttcggccgttcatgcggttcggtctcaacactgtgcactgctctgttgattatggctagatcgcctttcgaagcggccgaaggctgaagccccttgactactatcacccctgtcgggccgggcatcttgagcttgagataattgtggtgggaaatggcttcgaacttgttcagggttgcacggccgaagatggcgttgtagttgtacgggatgtcgacgacgtcgaacagtatttgctcttcgcgtctattctcccccgagccaaaggctatcagcaaaagtgtttggccgagaacttgaactgcttctctgctgaaaccgcggagcgatgctggtgctggggtaagggcttgggtaggcaaccccatcttggcatatgcttcagcgaagataacatcggccgaactccctccgtcgaccaggattcgtcggacttcgaaaccagctatctcagctgagattaccaggggatcttgatgcgggaaaataactccttctgcgtcttccggcccaaaagaaattagctggttcagatactgcggcgccccttcacccgccgaagtgatgctgtggaccatacggatctgcatcatcttctgccgtttggacaactggcttggcgggtcagcccttgtaatcacttggattacccttcgctgtacatcttggcgttgttcggttgggggtgtttgctcctgaactgcttcgcggggtgcttcgacaattgttccctgctgcggccttaggtcttgcgcattgccacattgcctaatgtttcgacattgctccgtggtgtgcgaagagcatccgtgaaaggcgtagtagaggtcttttcggaccttcttgtgggctggctgctgatggttgctcgcttgctgggcatcgaactccttgcggagggcttgcacttcttcgaccgccatcacagctttgctcgcatggtctgttctgaactttctccaagttatgggggcttggctttgccttggcggctgtccttggatcgccggctgagactggcgaacgaagaggggaggtggttcgacaacttgaacttgtgcttgagcttgagcagcggcgatggaggctttgtcatactcagcttgtatagcttgctgtcgcttggaattctcctcgccccttgcgaacccgtcaatgatgcgaagtaggtgctcgagcgtctgaggctccttgttggtgatttttcttgtgagttcgtcctcgagcagaccggccgaagtggcatttataaccgacgcctcggttatgtcttgaacttggcaccgggcttgcaagaagcgacgcatgtactcccttatcgactccccctgcctttggcgaatgccaagtagatgttgttgcgtcttcggctcctcgttggtgcctcgaaagttaaggacaaaaacatcgtgcaattgctcccatgagtaaatgctattggctggtaaattgaaataccaagaacgggcgatgccgtctagagcgagatgtattaccttcgctttggtatttttgtcaccatgagctgcttcgatcgctgactcgtagatggagaggaactccttcgggtcagtttcgcctgaatagcgcgggacgggtgggaacttaaactggggtgggattggacgagtcttgattcccccacacagcggtagccctttttcgcctcccgccctgtttaccgcaccctactgcgggtacggtgtggcgaagggcgaaatcgcagcttgtgcgtgtggttgggccatggcattcggctgcccggctccaactggaggtacttgctgagccgccatggatgggtcaaaaattggctgtgaccacatcatggcagcttggattggtgcttggtttgttccgaagcctggagttggagcttgctgccgaacggttggcgcctgagcagcgttgatgaagtcgaactgcggtccctgattccacagcgaaactctcaggcccggctgaatcggtggcaaccaattaggcgcaccttgacttgtatttgtcgcgaccgagaaaaatacattttcccgaacgctagtgtattaatccccatcccagtaaaagccagggtacaccacacaaacatgatataaaagacacatctttattatatcgataatatttacattattacaaaggcacttaaggcctgacaatcaaaaataaacagcagcggactagcgggcctacggctccatcttcacaggcgctcaactggggtataagccaggactccacctaagaattcttctccaaagcttctcttactgaagggggggggagattgagcaagaatgagtacaaccacagtactcagcaagccacaccggcagatgcatgattaatgcaagggggtacaaggggtaataatataggggttaagttttgcagaaaacagcatttaaaagtcacttagttgcccaaagacattttataaagacgatcctagagttacacagtgttattaatcaaggccgtgaaccctcacgaacctaccttaactcaaggcctacgatgattcagaccgaactggcaacccgaccctaggtcccagctcgtcccaagccaacccaggccaaccattccacattttagttgttaagcaaattttaagaattaaaacactaacttgggtacattgctaggcttgcccataaccgagggcgcggctattcgaataggttatactctgatcagaggtgtacatctttacccacaagacacatcttcctcacgtgtaaccacgtgccacataccaccacggtatacggacggaagacgtgacatagttcccaacccatcctagccataaacaagagtaccgacccaaccccacctacggccggaacctccgggacaggcaggcaggattgagcccctagcagcaggacaccagccctgtgccatgacatctcgactaccgggccgcagctcgtgtagcctttatttgtcctagagatgtccatcgacccccgacttcgtcaatctccatccgtgtacttttgtttataaccagactgagccacaaactaagccttacccactagacatgtggaagtacggtagtgctttgcaacagaggcccgagcttaatccttatagtacccgaggtacgactaacaaaacccaaccacgcacctcgagcccagcctaaaaccattttgggggttttgaatagagggggaggtgtgtgtccaattccaacataagccaaccattccatagtgtccaaatgatatgagaattcccaaagtctaaagttataaaaccacctaatgttgcctaattaatcagcgaagcatctacctaaattcatactggtggaaccatgaatagagtacccactagttggggttttgtttatcctagggtgaacaaggtgataataacaatagcaataataataaggtcataacaaaggtaaataggcatggctaaataaaatagtgataatgcaggaatttaaataaagcgataatgcattaatttaaatcaaaataattttataaactgggattcaatatgctcaaggatgatgtgacttgcctttctcagagacaacgaccttccaaaccttcggcgacgaccacgaaccacgcttcgggaacctccggaacgatagaagctacgcgaagcacacaagcaaagctacaagcctataaagaagcaataacaatacataaaaagaaagcacacggttctttaggttataacaaacattaggagacttgaacggatcgattcggagctcgtatgaccaagacatggtcatccgaagtttaatgctgttacatggagatttgcggattattataattaggttttgcaactataaaacaagtgtaagcgctagcctggaaaagacaggaaggctgcgccgttgacatacggaccccacatgtcaacctaaaggaccgcggtagaccgagtacacagagacggtccacgggtcgacggaagcagatcccgtgtgtcaaccgaggcgagtggccgacaaacggactccactagacaccacacaggctgcacacgtggaaaccacgcggctaccgagcgggcacactaacacggtcaccacacgcacaagcgaacgactaccgacaccggtacacgggtaccggggtcgacaaccgcacaacgggcacgggcgacaccgaaaggacgaggacggggcagcgaaggagagatccttaccaccacgcgatggggcgagggaacgacaacaacgaacgggcgcggcggagacggccgggaatgacggagacgaaaggcgaggggacgacttcggcggcgatccttggacgaaggcgagacgcggccggcacgaggcttgacgacgcggagccgatgacgaagacaacgacggggctgcagcggctggcttgacgaacgtggacgacggacgagaacggcttgacggaggaacgaacgccacgacgaccgggaacgacgagaggacgacgaccggaaccagcgaggaggcgacaagggcagccggcagcggctgcatggagacgaggacggcatggaacgcgccgctgcgatgacgacgagggtggcggcgcagcgagaccacgtgccaggcaaccgacgggacgtcgacgtcgaggacgaacggagacgacgacgacggacagcggaggggttcggatggaggggaggcgaggccgagggtgaccttgccgctacgaggccggaggagacgacgacgcgatcgaccggggaaattccggcgaggaggatggagaggccggtgcggcacgacagttttcctgcaaaatacgggcgacgccgtggcctggccagggaagaggacggcgttccggtgccgggagaggcagcgacgacgaaagccgacgctccggcaaagcggcacaggcggctggaggtggtacagtggcggcaacgccattgtacaccagcgaggacgtgtctccgatggtccccgtgcgaaacggagggcaggccggcgtagagggacacctgcgaggccgaggaaggtggtggcgacgtcaaccgccgcacgggcgaggcggcacaggcggctggagggtggccggcgccgaggaaagagaaggaggaggcggggagaggtggtgcggccatgggggagctcgggaaggggctaaaacgagataacgcatggcgggggttccattttataggtgaggggagggagccaggcatgggagagggcggaacggcgacgggaaacacggccggcggcattggaaggcggacgggaatggcgcggccgttccgggcgattgggggcgccattcaagggggaaaacgggggaaattgaagaggaaggaaaggggattaattccccctaatcaattttggaattcccggtttgaatcgcgtggatttaggggaggaatcgacgctaggtttcacgggagagaagagagagagaggatgccgggcgggaggaaggagacgaccgggcaggtgggacccaccggtcaggcacgcgtcgtcagcgcacgcacgtgcgcggcacgggcgggagggcgccgctcggcttgggcaggggcgcggcttgggccgggcggccggcccaggaggagaggagggggaggcggcctgggggagagagggaggaggagggagtgggagagaaagagagggaggaagagaggactttggccgcgggccgagagagagagaggactttgggccagacttggcccaaagggaggagggggattatttttaggttttctttttaataaactttgttaattgttgttgttgtttaataaatatttccggtgctctgaaaattcaagtaaaatttgagggctccttttagacctaggagaatttaacaaaaattctccggaccacattcgaatttttcttgtacgtattttagtgtttgccaatttcttttcgaattttaattaattctattattccttttagaaaatgatttttattttcggatgaatttatcaggacgtgacagtattcccctccgggtgggccgatggggttgtacttgaaatgcagtggggttggttgagttgctgaaggaaagcttggagttgcgcctgcagagccaaagccccttccgccactgtttgtggcgcttggccgggtggttgatggtgtactcgggcagcgactgcggctgattcctgcccggcgaagtacattggcgcttgtgcgacttgaggcggaaagggctgggtcgtcacttgcggatggacttgaggtgggacataacctgttcaatactgaaggattggagccgacgtgaccttggtccgccttgccgcctcgtatgcttgttgttgttcttgtatttggcgaagcatgtcttggagccgtgtcatgttctgtcgcatggcttccatgtcggcttcggcttgtgttttggggtcagggctgacttgggcctgcacagcggcgagcgcagtcggggccgctgtcggctgcgatggtgcggcttggggcaccaccagttggcttgtcgaaaggatctccgccctagtctggagtgcccttgccaccgcagccgccttcgccacgtcggccgcgttcggcacttgcacagaggtggcgagggccgaaggcggttgtgatggcgcagatgtggaagcgaatggtcctcctccatcttcggccacgggcgccgaaggctctgctccctcctcggcggccatgtccggtccggcgttgctttccttccaccttgcaaccttctccttcacgaccttcttcggtggcattcgctctcagtggtttcgctcggaggtccccacggtcggcgccagctgttgtcgaaatgactaccgcatacgtcgaaagacgtggttactcaacggtggtaggaagaaaacgaagtgtattaaattttgagtttcccttctttcctttttttcccattacatggccctaggggactatttatagccctattacaggttcttactactagggtttaggttatacaagggaatttacatgattacccttatgaaagggacatttacaggggtacataatgatataggggctcatgggcccctgatgggccgtctggcgatcgccggccctattgcccctaggcttgatgggccggaaaggcttcttcggccctcgcaggggcgaacttgccaaggcgaagtcgtcttccttcggcagatagtcttcgccttgcacccttcgcctgagacgcctctggcctggcaaggcacttgtacgactcttcgcctcacgccgttcttgctccatagccttcgccatgggtttcggcagatttggtcgaagggcctcatgccatccgcctacaatgtgatgattgtttaaccattcaaaataattactaacaatcacagattgcaaaaaaaatgtacataattattatttattttattgtgaccttttatcattaaaaatacttttaggcatgactcattaatttgtgtaaatttgcaaaaattatttaaataagacgaatgatgaaaacttatgtctaaattaaagttgatggtgttatatatttaaaaaaatggagggagtaaaatgtaagacccacatagcgataattgcataatctaagtccatctttgaatattaattcctatgtccacaactactatcagaaagatctgagaacacattaatatctcatttaactagctaggtgtactagctgcaacatttttagttgcagaagagttttttagcattgctaatcatatattagcataaccacaatcaccaaccaaacttgtcgattattttacaatctattccaaggatgataagttgggatgtaatccaacatactgtgggatctaataataatgatcatacatcctaactaatttgacaaaaatgtaatagctttaacacaaaatgattacaaaagggtgatgttacatgtactaaaaaccaatttctctagcccttttatctttatctctactattacttcgaatgctcctgaagtcctgatctatggacgtctacagtacacgaatgaaaattcaggaaaaaaatgaacactgacaaaatctgtttggatatagcttcatgcatttcatggaaaagattgctgacacctccctcgccacctcttgtcgaaacaagatttcggcaatactaaaaggaggtggctatcaagctggaaaagtggatgggtttagagggaaagaattttatacaggttcaggcctttttaatcaagaagtaatacgctactcttgtccggcgattgatccgccgagtgtattattgatcgtatgatctgggagaaaaatcgtgttcctagagggacccggacccctccttatataggggaaggggtccgtattacaaaatacagtccatatccctaacggaatatataattacagataaaatataatcataaccgactaggatctcaggtatttccttgacatacaagtttaaaacttaacccgagtcctcttaaagatattctatctatacatggtaccctgtacctagtcggactatacgtgccgtgtagatatagggtatccataatctccacagtagcccccctgagacctttacagtcgacgaaatagccttctcttggaacataaagtaataatccgagtgctttaatttcttctgtatagatctccgagtaccaaaatcaaagactgtgaaggtctaaaatagaaaaaaccgggtgcatcgactagatgcacctaattaggtgtagccccccgactatgtggttagttaaaaaactaaacatatagtcaagaaccgagtggttttacaaccgaatatcatatagcaaagcatatgcggcattcaacaaaacatccagtcgactgcttttagctttaatataccaaaaatgaaacatggaaaggtccgagtgataaacactctaaaggtccatgaattcacatatttgacaagaatccgaataaaaactctcaaaaagatccatgaaatgtggtataaatgtgataacataattagtgataagtctaaatagcctaggctatgacccacaccagaagaataagcatataacatgccaagtaaataactattcaaaaaccaattatttcaacaaacccgaacagcttttgcagcctaaagagacttacaaaatcaatataacacttttctgttgggtacctttttgtccgcatcgtagtaattccaaagaatcatctaactgcattaaaaaggattttaacagcatcgggctatactgttgtgagaaaaaattgccaaagcaacaatgcctaagtccctaaggatcacaactaaccacactgataatagaattgggctgaagtactgtataggctcaggcccattagcactcccgataccctggcgaaataaacgctgaagtcaaagcgtcgctttcttccccgccgagactctcgccactttccccatttcacgctacagtacaaaagcactcccgcggaactagggttctccaattcgctcaaattcaccttccaaaactccacagaaatcattcacgcacccaccgcatcaatccctcatacattctcagccatttccaaagcaaatcgcatcacctaactcgcatccatggtagaggagagagagagcttcgagagccaatgggcgccctccgatgtaacggaggaaaacctgaaggagatggtggcgcatggtgttcttccggcgaaggagatcattggatggcgtctggcattcggcgaagcattcccgacccccaacactcatgaagtcgtggtattttctcatttcttctatggcggattttctcttccaacctcaaggttcttccggggaattctggatttctacggaatcagtttacatcacctaaacccaaactccatagttcatattgccaacttcatacacacctgtgaagcttttttgggcattagaccacattttgccctattccgtcgcatcttcttcctcaagccccaaccgaacaaaagcaagccatccgtagttgggggagctggattccaactgaggggaactctgagccaaaagtacttctccatgccgtttaaaacttcaaacaaaggctggcacgcaaattggttttatgtacaaaaccccgagcctgcactccccgagtactcctatctccctccagtttatcaggacacctggaattcactaccaatgggagaggaagccgtccaagcggtcaccctgatggatcgcatgctgaagctaaaggagcaaggtctgcagggagaacaaatcacccggcacttcatcaagagccggctggccccgatcaaagaaagatctcgcacagcctttgaattcgacggcaaacatgatcctaaccgcgaagatcccaaatcccttgaattcaaggtcatgaaggagagaatgtataaaatcttctcaaatgcaattgttgtcagctattctcacttgctgcctgtggtgccatataatgccttcaatccccctccaccggtatgtatttaaaatcccagctcgtttctaagcatgcttttatcatttgcaaggttgataaaaaagcttgaatcatcatacccaggaattcgccttgatgaaatcagaccctccaattacccaacgccgatcacctcgccagtagacaggtcaggcaagcggaggaccaaaaattcggtctgaaactcaatcaaacatctcaagatcaaccatccagtcagactcgcgcaagaggaaattggtcctgagcgacaatgaaggcgatgatgctggaaaaaccggcaataaagaggtgaccggaaaactgccaaggcaaaccaaccctaagaagaaaacatccagtcatccaatgctaaagatcaggaaatcttccagatatgaatcgtttgaccatctccctcgtagcgctgctcactcactattgcaataataataatggcatgactcaaacttgtaggaagccatctgacatagatcctactggaaaagactctgaaccaactgacatggagacgggtccttcaaaagaaaccgggccgactgcagaagatcacccgagtgacaatcagccggcaaccgacaatgtaaaacccagcaacgaaccctggaaaccagtcggccgaagttggaatcggggttaatcaggaacccccaactggaaaccagtcaggcgtagaaccaaaccgagatgtccctaaagttgaaacccaaacggacagccctcctaaaaaggatactagtaatgacccagtgtccagctctcctattaaggtacaagtgccttctcgtccccgaccggaaatcatcacaggtaaacatatcctccaaaaccattttgatttaaccgacttcattcgattgtttcacctttattcatggatacacaagggccaatgactagtgatgaagaagaggtcctctggatatgagcagctgaagattctcgacctcccattctagtaaagtggtgggatgacgatatgcaacctcagggaatcgtaataaacaagcaaaaagaagatgaggaagtatgtctgctgaaaaaggcactcagccaggctactcgtatcgtaaacgtaagtttcctcatgcacggcctcaaccatcctatttgccacttagctcaaatgccaataaaattgttttgcagagaatccatctcaggaatgaagcaaaaactgcgactcttgagaggttagttccccaccttggaacccttgaggccaccagaaaccagctgcacgaagctagggaacttgccaggaaaactgaacatgatttgagagatcggatcgccgaacttcaagactccaacttcgaactgagtggctcatcaaaaggtacacacaaactctgtccaacttacttatgctgccatccttgtaatctcaattaaccagaagcaatacagtgcaagccgccaagatatctgaactagaaaagtgaatccaaactctggaaaatgacaaggtcggattggcaagacataggaactcggctttgaaagatgttgaaggtattagcaattaatacttcaaaaaccattctcttctttatgcctactcatcgatatgaatttgtttatgcagaccgcaaaatcaagtctcaagctcaattcgatgtcttagtcaacaaaatcaagaggcttgaaggggccagggatgaagtcgccaacgctactaccccactcgtccaagccatgttctttaataacaatggtccgagtacatttgatgcttccaaaatcttcgacaagctgagagttgctccggatacatattttaagaatatcaaagaggctggaagtatgggggcaagcctggtgttggcaatgaccaagtctttatacccaaagatcgatattgacgccattgatggctttgcagatgggacgagcgaagaagttgctcttgacctcatcaacgaagcgtagaaagccgccgataagatagcagttgataactccgatgatgaaaaaactgataccgattgatgttatatcataacaatgattctgatgatgatgatgatgatgatggaggcacaatttgtacaatactgatgtatttatgctgtgctcaatatttcaaacttagcttctgatttcttaaaagcttttgtcaaaccttattgagcctaaaacccgcaaaagctattaaaaagctttcagtcctcattgactaagccaaaaaatcaagcaaggcaatgataaatcaagtaagcaaattgaattgataaaaatcatactccattattattataatagcccccgactgataactcaagggaaaacttgatgttagcagtcaaaatagggaaatacaaaagtaatgcttaagcataaaaacaacgaagatgttcaatattccaagaattgtcgataggagtaccgtcttcgcgcttgagtcggtaggaacctggtcgagtgactttggagattatgaatggtccttcccataaggggataacttgtgccgatctcgtgtagtttgaatttttctcaataccaggtcgccgactaagaaggctagtgatcgaacgttatgattatgataacggcgcaacccttgcaagtatcgagccgactgaattaaggctgcttcgagggcctcttccagtcagttcaaatcatctactcggtcttctccgtagcgctcctcgttaaagttgcgaaaacgtaaagattcaaattccacctcactgggccacattgcttccgctccataaactaagaaaaacggcgactggcccatggcccgactgggagtggtgcgcaaggaccaaagtacagacggcagctgttctacccacttgctggcatagggattcagtcggtcgaaaactcgtgcctttattccttggagcaccatgccattagcgcgttcgacttgtccattgctcatagggtgcgctacggaggcataacaaattttaatgccgaagtcttcacaaaagtctttaaatactccgccagcgaattgagtgccattatccgtgatgatccgattaggtaccccaaaccggtgcacaatgttgatgaaaaaatctctagccttgtctgtcatgtttgtgatgaccggtttagcttcaatccacttggagaatttgtcaatagccacaaagaggtgagtataaccgccgactgccattttaaacgggtcgaccatgtcaagcccccaaaccgcaaacagccaagacaacgggatagtctgcaactcttgagctggtagatgagtttgtctggcgaaaaattgacaaccttcacatgtctgcacaatcttgtcagcatcggacacaactgtgggccagaaaaaccttgccgataagcgttgccaacaatggtccgtgcggcagcatgattgccgcagatgccagaatctatatcctttaacaactgtctcccctcctccaaagacacacagcgttgcaggattcctgatggacttttcttgtacggctcggtctcatgaataatatagagcctgctgcgcctggagatccgctctgcttcatctttatcttctgggaattcttgtttggtcagaaatcttataaggggctctctccagtcggcttcaatcatacctacgtcttgagcgtccgtggcctcgattgtttctttccttggtacggttggttcgtaaagatgttcaacaaacacgtcagaaggagctgcttcgcgttttgaaccaaaattagctagcctgtcagctgcttcgttattgtgccgaagaacatgggtgagttcgagtccaacgaacttatcctccaacttgcgtacctcttgccgataagcggtcatgttgtcatcaaggcaggaccactgtttcataacttgattaacgactaattaagaatctccacgaactatcagacgccgaatttccaaagagattgctatcctcagtccgtgaagaagcgcctcgtattccgccacgttgtgagatgcagaaaaatgtatccacaacatgtagctcaatctttctccagtcggggaaattaaaacaaccccggccccagtgcccgaaagcctcttcgacccgtcgaagtgcatggtccaatacaccatcttctcttcgggcataccttcttggcactcggtccactcggcgacaaagtcagctaaggcttgggacttggtcgaagtttgcggcttgaacgatatatccaaggacatcaattctagggcccattttgcgatccgcccatttgcttcgcgattatgaagtatatcgccgagtgggaacgacgtgaccactgtaaccgagtgaccttggaagtaatgagatagcttcctgatggtaattaaaacgccatacaatagcttttgaatctgaggatatcttgtcttggagtcggccaggacctcgctaacgaagtagattggtcattgcactttttgaatatggccttcttcctcacgctcaacgaccaggactgtgcttacgacctgggaagtcaccgacacatatagcagcagcggctcttgcggatgcggtgaagctaagaccggtggggtagtgaggagttttttgaagtcttcaaaggctttttgggcttcgggtccccactggaaactgtctgttttcttcaacagcttgaaaaagggcatcccctgctcgccgagtcgtgaaacgaaccggctgagcgccgccatgcaaccaatcagcttttgaacatctttctgagaacttggcggttccatgttgaggatggcattgattttctgtgggttggcttgtatgcctctatgagacaccataaatccaagtagtttccctaatggtactccgaagatgcacttttcagggtttaatttcatcctgaaagcgcggatgcttgcaaaggtttcttctaggtccgtgatcaaatcatctttctgcttggtcttgacgactacatcatccaaataagcttcaacgttgcgaccaatctgagttgaaaaacatctctggatcatgcgttgataagttgctcctgcattctttaatccgaaaggcatggtgatgtagcagtatgccccgaagggcgtgatgaataaagtctttaagcagtcggattcctttagtcggatctgatggtaacctgagtagcaatccaaaaagctgagaagctcgcagccggctattgagtcaactacctggtcaatgcgaggcaacccaaaaggatctttgggacaggacttgctgaagttagtgtagtcaacacacatgcgccattgtcccgttttcttctgaaccaggattgagttggccagccagtcgggatgaaggacttccttgatgaagcctgctgctaacagcttagggagttcttccttgatcgtatccttcctatcctgtgcaaagcggcggagtcattgcttgattggcttagcgtcttccttaacatgtaaagagtgctcaatcacctctctaggaataccaggcatatcggatggtttccacgcaaagatatctttattattttgaagaaaggtgatgagcgcgctttcctatttacaatctaactcaacgcctattacagcagtcttagtaggattagagggatctagaggaattttcttggtcttggcttcgctttctccactctttgggatcttggttgcaggcacttctccttcacttgccgtggttgcagccaatcggatatcttctcgggcgatcatgatctcgcgggtttgggctatctcacagctttcctagtcgcatgtgacggcttgtttgatgttgctctgcagggatatgactcctcgaggaccaggtatctttatcattatgtaggtatagtgcgggacagccataaatttggctaacgccgggcgcccgagtatgtcatgatacgctgtatcgaaatcagcaactttgaagcagacgttttctgtgcggaagttctcccgagtaccgaaggtaacccgaagagtgatctggccgagtggtgtagcggatagccctggaatgactccgtgaaagggcgcattactcggtttcaattctgtgcgagggatctgcatgtcgtccagggttttggcgaagaggatgttgagtgcactgccgccatcgatgagggatctgcgaagcttgacgttgcgaaccactgggtctagtaccagggggtaccgccccgggtggaccactcggtctggatgatccgagcggtaaaacttgattgttgtctccgaccaccgaagatattggggcgtatcgggctgaacagcgttaatctcccgttcagtcagcttttgttttcttttagattcataagccagaggtccgccaaagatgtggttgagctccttacgacggtctcgaaaacctatcggggcatcgtcgtcatcgtccttcttttttgacatgctttgatctccgtcggaggcctttcgtgcattcttggtgttttgttctgcaaactgtttgtagacgaagcaatctttggccgcatgattggaatttggatgatgcggacattgggagttcatgatcttgtcaaaagtattgacgcgcgaacgttgtcgggaggaatgtgtagtagttgcaacaagttcctcgggcttacgcttacggtccttgtgattggtacttccactccctcacgtagtcggcgtatctttcttcggcttctaagtggtgcccaactgcttggacgcgataatggcatcttcggctttggcatactcgttggctttttcgaacatccgcttgactgtcttgggaggcttgcgcccaaacttgccgactaaatcttcgtgacgaatccccttggtgaaagcagcaatgatgacgtcatcggtgatgtcggagatctggttgcgttgctcagaaaagcgtcagatataatctcgaagggattctccagacctctgagtgacgttgtagggatcaaactgtgtgccagggcattcaaaggtgccctggaatttggcgatgaagtggtcgcgaagttccgcccatgatccgatcgtgccacggggtaacccatgaagtcaggaccaggcagaatccgtgtcacgcccggaatttctatccaaaattccaaacgcttacatgtgtgtgaaccctcgtccaggaatcagccgaggcacacaataacaaattgataatagagtacaaatattactctaattaataagcgaataaaatgtcattacagaggtagatagttcctctcaatcaataaagatctaagcagcggaaaataaataaacggcgcagacggctccactccacaggcagcttgaccaaggctacacctaatcctccacaccatcagcctcattgtagaactcttcctctgatgaatgattgcaaggtgagtatatgacatactcagcaagccacgcagcaaatatgcaagtgcacaggataacaaaggatggcataatagggttgcatttgcaaaagcagcatttagcaaacatttgagaatttgataaaacagttaagtaattaaacaatattaatccaacgctatacaacataccctgttgtataggcccaaccattctgaacaaccaccccggctgcacagttctatctccaaaccaggaatataccattccaaaccaggagctaatcaaattattaccagtttaagcatcttttactatgatgagaggtgtgagactaatcacgaaagacattgttagagccgcccataaccgcgggcacggctattcgaatagttttactctgatcagaggtgtaccactgtacccacaagacacaaccccacatcatgtcaccatgtgcctcaataccaccacggtatctcggaaaggagttgtgacaatacccctcgcataacacaatccactgcagcgcaccttcctggatcataatcacccccttataaacaaggcatggactccccagcgacccccgtgggcttatctccgccacttctcagtctggtgccccgcaatgaaccatgctatacaaaagataaagccgttgcccatgctggcttgtggttggcacggttaatgtttcacaaccgaaactcgtgaaccggtccttaattgtcatgagcacgaccaacaaaaccatgtgctcacaacccaccattaccaggttttagttggcacattaattacttaactaatcacgattgaccatcgtgaactatcatgaaaccatcattaaataatagtgagtcattagttatcccgaatgtgtactaatgtttctaagcagggctaagcaattatatctaatatctagttgaaccaatataaataaagctcaactagtcaaattgtaataacccaaggtatcaaggaataaggtaatcaagtacgaaagggccataacaaagaataggtcaattccacccaatgacattcgaaaatagatgcaatagttgaatagaaacaatagctttaaataggatcaacatgctcaaagggttgtttgggatatgtgtga

SEQ ID NO: 10013 - DNA, 95904 bp, Oryza sativa
cgcaccgcccgcaggacggccggaatcgtgcatgccccgaagaagaaagagaacggggaagaaaaaaaaaatgaaacgaaaaagaagggagagaaggccgtcgatggcaacgccggctgccgtgttgccgccgaccgtgccgacgcccggcctctgcgccaccgaatagaagggcaggaggcagcaccggccgccgccgtcgcacctgcgccgcccggccgcacgccttcgtagccgccgcgctgcctgcactgcccggccgcacgccgccgtggccgccgcatcgccgccgcacggtgctcgcctggccgcaccgccacgcgcccctccgctgcgccgtcgtgtgccgctccggctggccaccacgcgccgtaccgccggccggcgcgcctaccgcctcacggccgtggccacttggccgcctcgccgccggccgccaggccgccgtgccggtgccgcccgcgccctcccctgctgcgcctgccgcctcacggccacgccgcttggccgcctcgccgccggccgccgggccgccgtgccggcgccgcccggcagccgcatatggcaggcggcgccatcggcggaggaagggggaaagaaagtaaggaaagagaagaaaagcaaagaggaggagaaaaggaaagaaaaagaaaaagaaaaggaaagattcccctgtgattttgcaaaaatgcccttgttgttttcggaaattaactgcatgttcccctgcattggaatctttgccttttaaaccctgaactttccagaaaacaagaaaataaccctctgcatttgggatatttgtttgaatggcattagaaatttgcaaatatcaccaaaatcatattctcgcgtaaaagagccacgggacattgaatttcgaccccgactttgcatttaaagtacctttattgctgatgtttatgattatgaaatttaattatcgcatttacgattattaattatttgtgatgtttttattacttttaattaatatcgctgcgataaaatgtatagaattgcatagaatatactggaattatttgcgggaattttgtgtaccattatattgcaacaattgtgcatttttgcctgaatctaattttgcgcatatatagaaaaatgacgtgcatcgcgaattagaaaatttgccgaatcttgaatacctctgacatatttattcaatgtcgaaattacaatagagcaagaagctctatggtaccattaatccaatcacgctgtaggcattgactcgatgagtttgatctagcatttcaaactctcgccagtgcctccaaactactctcatgaatgagtacgctaaacgaatgagcgcattagcatttagagtattatggtatatacattacctttcgtagagcaagaactataagcaagaacatgtatttttcgactatgattcaccaagcaaatgacccagagagagtatggtattacgatgcatcgcatttgcattgaataccgctgaaactcttaatgttctacccgaacatgacgaaagtcgcatgcaagtatcactagtacacatacaagaagtatgcataactagtcgataatagaatcgcgaaacgttcaggatagtgttcactagaaaagcattatcttccaaaaaaaccaactagcacagttgataacgaattcaacatgagcagctagcctggtgcagttaccttaacggaagaagaggaaaagggggagtagaacataggtcaaggtgaacaatctagaactatgaacatgaaaaaaagaggacaatcctaatagcacactcatcatgacttgagggggagaactcctagcctatttgcatggccatggacgtagaatctcctatgctagattggattggtcctaaaatttatgtcagaatgccatagctgttgagcaaggagctcgctatgaagttaattgaatccgatgtaccagaatactttgttaaatcaatatacttcgtcatcaattgttgcaattcttgaatagagcattgcatcaaagaaatggttcttgcccaagtagagcacacattttccctgcaataaagaattatttccagtataaaatagcatatttaaagcatttactattttgttgctcttttctagcacatagttattatgctttgaattttgtgtagcgcccaaacataagagaaaaagaatgaattgtggtccgcataaccacaaataacattttaagagaaagaggtatttccagacccatagaactggaaacattatgactattgctagcaccaacaactgaatttgtcggcctagaatgcgccacaatcatattacctatggaacaattgtgcactttatagaagcatctattgtccgtcaatcccattgaactctctaaaaagtgtgatgatttgggctacacccttttagcaatggattttcagccattttcggtcttagaattataagaataaatattacaactcgtatgatcatagcacatatatgcataattttcctaaatcatgaagatttgtgtgccagtatgcaccgacaggagatcaatgcataaaccgcatattgttctagcatccctgaattggattacgaagaatatatgtggcttccatttggtactgtatgcataaatgcgcttccgaagcagcaaacatccagtgtctcttagacaccatgtctttgccaagactgatccagcaagatcatgtgaactccaatagaactcactaaatcatcttcagaagtctgcgaggacaatgctagcattgtatttgatgattggtgaattggccgcacgaagtaccaaatatccgcatatgctataagtcttagaaaacttcttatttcagatactgatgttggtaccttccattccatcacatctttaatcttctctggatatacgacaactccattcttggtaattatatgtcccaagactgcaacttgatctagctaaaattcacacttacagaatttggcataaagttggcgttgctttaacttctccagtaccaatcggagatgttgtttatgttcttcctcattttaggaatatataagaatgttgttaataaacacgacaacaaattggttcaaatactccacaatatcttgttcatgagattcataaaataagtcagagcatttgttagtccaaatgctataactgtaaactcctataatccataccttgtcacaaaggcagtctttgatatatcttcttgtctgatctacaattgatgataccccgatcgaagatctattttagaaaatacactagctccttttaattgatcaaatagatcgtcgttcgttggcaagggatatttgttcttaatagttacttcatttaaagctcggtagtcaacacatattcttaagcttccatctttctttttgacaaatagcacgggagctccccaaggtgaagaacttagtcgaataaaaccttttgtttctaacttggctatttgtttctttaattcttctaattcattaattggcatcctataaggtctttttgatataggtgtcgttccaggaagtaactctatgatgaattctatttcccgatctgggggtaattcacttagttcttcaggaaatacatccaaatactcttgtaccactgacacttcttcctttggtatatatatatatatatatatatatatatatatatatatatataggtaaacactgaatccaactagcttttgtggataaaaaggaatgagaagcatcggaatcgaataggacagtaactggtttagagtttatggtaagcatacccattaagatgttagggtcctgctgagcttcttctgctttgatatggtgtacctaaccatgttcaaaatttggtccgcctttaatgattggaggatttttctttataaagcctgagataggtggtttttgattggaagtctgggcactgtgttttggcgattggggcattgcctagcgaaatgtccagtcttcccacaaacatagcatggggaatcttccatactaatacatggtatttggattattggtggcatacccggccttgtattaagtagagatggcttaaaaggatagggcttccgaatctgttgcggatttttagttggtgattgtcgttgaagattcattcctcgcttacgaggtcctttcattatcttgcggtcattctctagcctgaccactttattgactaagctttgaaaaatttcatgattttagccgatcatcagtcctcgtagctcatagcataatccttctataaacctttcaatcttttctgtttcatcttaaatgtccgaggcagcatatcgagcatgttgtgtaaatttgtttagatattcttgtattgacataaaaccttgtctcagtcttcgaaattcattcttcttcattctaattactgcagtgggtatgaaggtttttctaaaggctgtagtaaattctgcccatgtaataatatgggtagggtcttctataaagacttgatatgcttcccaccatatattggctggtccttctagctgatgggttgcaaaagttattttctcttgctcatttattctgactaaggctaatttcttttcgatagcccttagccagtcctcggcgtccataggttcttctgttttggaaaagattggtgttttaactctcatgaattcagaatgggcactgtagcctttattttcttgattttgaactatagcctgtaatagttgggtttgtcttccattaattctactaaggtggcaggatttggtagagggatatctcctgtctcaccttaacctgaactgccattgactgaattcctctagaaaaggatagttgctgtcttttcaaaggggagttaacatccttaattaaccatagattttatttctggacagtgtatcgtaaatgatgcataccacaaaagtaataaccaaaagcaaaagaagaaacaagagagaaagcaaaagaaaccaaggaagggataatttcacataggggttagagaggagtatggtcatttgctaaactatactagcaagtttatttatttatatgacctctaactattaacactctatctacaactcctaatcatcaaattactcaccactaccttcagcggggttagtgaataatgatgtaggtgcgaaatgtaaaaattcagcatgaggtgtagaagttgatgcagcagtattaggggcagagcatgagtaaggatcttcatcatctccttgatcatcagcatacatagaaatatgttcttgcatctcaaacactcgttcttctggatcctcctcttcttctggagtttcaatccaaattgggggaacatttaggtcattaatatgaaacatccgggttccccttgctacttcaagctcctgacttggctcactgatgtccatagctgagggcgtttcttcagcttcatcctcggaatggataggatataatggtggtggcgatggtggtaaaccttgtagaactccctcaccatcattttgaggatttggcccttatggctcatccccacttcatcatcatcatcatcactatctatcccagggacttggtgaagacagaatgacgcgcccacaacacaaatattaagtatagagttttgtttatcatcatataattcttgtagcacatgatatatgtgcttaagaacagcttctcatcgctcagcttcttccaaacgtttggactacatatccatgtgttctaggacttcctcatacatgtcatcagcagctttcatccatatagacatggttgccttcactggttgttgatgacgatctatattctggagggtgcaatagtcttcgcctggttcttgcataggatgaaataaatagcgagaatgcagaaacttgtcttgataaatatggttgaggcgtaggaaagcctccctacatgcatcatataaagcagcttatagtgtatctcgcctatgacgcgtccggaaatagtatatatcatcttctcctttaggtgggttgatctttatggtcatatcatattcccaataatctcccttctgataagcatgggaatagaattctgtttattcacttatctttagcttcgtcattaacctgattagctgatcagtgcaatcattattatggatagaaattgccatctcaatatgttctcgctcatgcctttatgccattaacctgaaatacataaatggaatatatattgtgtgctcgcaagtcaaatctaccccccttaaagcattaagttcgaagtaaactcaaacttaaattggttagtaatccttagggtttgtcctatagtccaaacatattctctgataccagtcctgtcgggtcccaaaactaataacttggatccgactgagattaatgtatcaatccctggatcagtaaatattgatacatgtaatacaactggttcttcattgcatacgttaaagtttacaatactagggtttttacaagggtaggtactcacctaattaaacataggtgctaataatacacagcggctgttctagtacattctgactaggaaggtataacctctagggattttctaagttatcaaagtcatcataataataatcataggggtcctcttgacccaaatctgaaaaagggttaataagagcagggtgagtattcacaatactcagcaagttaccatggaaatatgttatgcgttggcatggagtggagttctttgcagaaagcaataatagacaatctggaaatattaaagcaagagtttgtaaaaatatatactttaggtttctaaccagggtaccatatgagtcccggtactcaaatccgtgagcacggctattcgaatagtttcaatgatattctactgcagcagatgtacgctttacccgcagtccacgacttgctgataatcatcagctttagccatggcccagtattaggttattaacaattgtggcacctgttccatgaacttatatcctcatatgctctgaacgtaatgttaacagcagcaagaggatttctggcgttcccgaggtatttaaggggaactgatcgtatgacaccacgtcatatcgatcagggtttagaaatataccatataatttatactcgagtatcacaaaccatttacctgtacatggtaacggttaaaagttgcccttcgcagctatagttgcctcctacgcgaggacttaaaaataagaaccactatacagaggtaccacattgctaattaacataataactaggtctgtccccattctagagactgcggtcgtacccgttcgttcgacataagtacctggtaaaaactatatcgatcgagacagtactagccacccggaaatcatccaattctaacgtactgtcccaatctaagtataaaatattttaaccagattgtaagcaagataagcaatactaaattatctgggtttctatggttgaattatgcatataaaatagagtattgaatagaaggctataaataaataatttgtaaaatataggcttaaatgatcaaaaggtagatagtaacttgccttgcttgatgtcctgagattgattgagattatctaataggttaggagactcctaaagacctagggttaagcatgtaaaattcaaattcaaaaggaattcgaataaaatccaaaaataggaaaaatagagaaaataaaataaaatgcaaaaatagcaaaaaggggctcaaaagatagagaaagattttagaagaattttggtccaagtttcactggaattgggtttatattttaaaagatatgggcttctaaagtttggattttgaattaaatggagaaattagaaaggttattacggaacaggggcccacccgtcagtattttatctttttcttcttttctccttcttccttccttcctttcttctgtttctttttcccgtgtcaacacaaagagagagggagagagggcgacggctttccggcgaccggaaggtggtgacgccggcggtgggtggtgttcccgagcaccacgcacctggggagggcggtttcttgcggagagggagagggaggagaccggaacgccggcggcaagagcttggctcagccgattgggagctggcggtggtagcttaactcaaggtggaagggatgggggaatggggtgaaatgggttctcctcgtcgaggcatacgtgatggagcaagggcttggccgacggggcaacggtgagggagatcggccggtgacttggtggtagccggccatggtggagagagagaaaagctcgaagagcttagttgtggggagggatggcgagcatgccgactatttataggcggaggaggtcggttcgcaaaggagggagaagggaaacacggcgccggtggagtggagcggaagaaagcggcgccggcttcattcggtgattggctaggcatgtcggtttggaggagagagaaggggagcacggtggcagtggcgtggagaggaggattacggcgccggctctcctttcttagcggcgacggaagcgagttggcggcggcgtgcagaagaacacggcacgacaaaagtggcggcgcaagccgtgggtggtgcgctcctgtggcgcacggcaacgacggctgggccgcgtgtgtgacgtcacacgcgcccacaaagaagagaaaagaggcggctgcctcttgggccggctgggccaagggaaggggctaagttgaagattttcggcccaaaggaattttgaatattttgcctaaggagaaagaatttatctagagatctttggaagagttttgcaaagattatgcactataacaatgtctcactaatagaagggtaatctagagaaagtttctaagttttggaacttgaagaaaatttgctaaattcactaaggtttaggatagggtaacaatttatggtttattggtaaactaggttaagggaattctaggggtaatacttgaaccaaaatcaagaataaaaagagaacttttaaaaagaaattttgattttactaatctaagattaaaaccagcatgatgcagtcaaattttagtttaaaatttgaggatgttactagaactcaacctaaatattgataagcattgaagatagaatcaatgaatgtatttcaggagcttggatcgaacacttgcataatagtacatgaagaagtactaggttccgaaccaacatagaaagaataaagcagaaaagaatcgaagaagcaaactcgttcgttttgaatttgagtttaattttgaaatatttggctgaacccaaatcatgctcacacttgcagctaaaagcaagcgatagatggaagtctactacatcagtccaaccgcacttagaaatgttcatggtgcatagctttggttagtcaattatcgccaaaatgggacggaattcccaaacacaagtgtgccatagcagcacacaaaaacttggctaattgaactaaaccgaactaaacatcgttgaactattcagagcctcggcatggttttgagatatggttacccgcgacagcaatcgcgatttggaaactatctcaaccccaccatttatgaaacttaagcaacatatgtcgcacatatgcaaatgagttacgtgagaagcatactcactaagcacatgaaccccaagcttttctatgtgcatgaattacataggagctacgaactaagtcatatggaagtcttgcagatttgtccactaactcattattgacatcttctcttgaataggtctgtccgagaaatcggaataatgagacttagataaatgcaaaattcagggggagaatttcgctgactcattctataatcttgatataaaaaatcaagtacccaaaatcaatctagaaagattgaacagagaattgggtggattgtactctttttcccttggataagttttcctagcagtttcttatcaaggtttttaacgaggcaattcatgcgacattgcaagcgtatgctatgtactctttctccaaatttttcccactgggtttttatggagttttgatgaggcataggcatcacgcagtgagagcccaagggggagtgttaagaaaccgccagcccacgaaggcccggcccggttacccactaattgggcccatcactaaacatggaaggtggaaaagggaatggctataaatagaggagtatagaggaggattgtacacttgagaatgcaatggatgaatgagaaaggatgccacaccctcatatcttgtgtctccactttttgtagaattacgggaccctcttggactacttcgtgtagcaggagggttgcgtaatagtaacgtacacgtcatgtcttacttttttaatccgtttgcatcatggcgttcgtaaaaaaagttctaaacgaaactagaaccatcataactattttttaacgtcgttactgcggaaagcagttgtggtactatacactggctgtcacgttactacgctgtttcagtaagacgaggactaaaaagaggtaaatctcaatctttagagagcaatatctctcacatcataccttgtatttccaatacgtttgcaccatgttcataaaaaaacgcttaacgaaacaagatccatcatggctactttttgacgttgttactgcgataatgttgtcttggtactgcacgatgaccgtcctgttactgcacgattcctgcaagacgagagcagcaaagtagtggacgggggagggagtggtgggcgggtttgaccggcgggaggacactttgaccgaggtgggaggggggttttgggccctagggagggtgggggaggtgggtttgacccatgggaggagggtgtagaatagattcactatatctataactaatataaatatttggatttttccggtcgtcacctcgtgcatgcggtgatttttcgtcccgtcacaccccgccccccaaatcctagtcggaattccatatcacacaaatagaatcccacattctctccaaaatctcaaaccatcacaatccaaatcaaaaacaaaaacaaaaacagaagggcggataccaagttcaacacgaaagacatagcggattcgatttggactcaagaacggatgaaatcaaccccataaatacaactaggattccacaagattgctacggagcaattggtgagatgagatgagatccaacctgatttcgggggatggctttgacttgcggtgtcaagctccaagtggcagtgcacggcctcggcaagcggcggaagcttggcggcggccctcaccggcaaggcgcttgggtgtccgggtgttgagggagccaggaaatcgacgaaggcgacaaaccatgaggcaattcctcgcagcggcggctcccacgagcggcgatgtcgaggaagtaggcgacggcggtaacttcgggaggcgggatgaagtatgcttggaagtcggctagaactaagacgccggatacacgcccttgagcctccctcaccaccagatccgccgcccaccagcctcgccaccgcccgcccacctcccccgccgcccaccatcctcgccacagcctgcgcgcctcccaacaccgaatccactgcccaccagccccaccgtcgccctcgagcctccccaccgccggatccgccgcccacacgcctaccactgctcaccagtatcgtggccgcctgcacgccttggccgtcgcagctgtcgcggggctgtcaccgccatggccaccttcgccaacgccatcgcggccactgccgccttggccattgcctccatggccgccgtaagaaggctgaggttgagttggcggcgacgctgatggaggatgcagtcgactcagggaggtggcccagggcggaggccaaggtggagttgggggcagcacgtcggacgtcgtggttgaggcagggaggtggcacgagtggagggtgaggttgagggggaggcgccggtgaggttgagggggaggcgccgatggccgagagggagaaggctacgatgagaagggaggggtggagggtgaggttgagggggaggcgccgatggccgagagggagaaggctacgatgagaaaggagaggaaacgaggacaggaaagaggagaggaaaggggatcgacctgatcccgatctaaacgggatgggatctcgatcgggttgactaggaaaaaaacatatcattattgatttttttactaggaaaaaaactgaccggtatttttaaaaaacatggaaacagaatacagtgtgtgttttactgggaaaagaaaattcgactggtaatttttaaaaaacatggaaactgaatatgtgcatggtgtgaaacttcacacaatatctccgttccttttatctcgatttttgtcaccacgcttttcaaactttctatagaaaatttgttttgaaatatctaataaatctatttttaagtttactagcaaaatgctcgtgcttcgctacggtgtattaagactaaaattatttgtttttaaccaaagttattttcacactgctttggtacttttgctcgctagaaaaaagtctcaaatgatagagagaaatatagtagctcataataaattatactctctactaggctactactataaaaattgaagatgtttttaccggtattttggtacatcatccgtgtatgagtcggttttatattcgttcgctttggaaatatatatccgtatttgaatcggtttttaagtttgttcgattttggaaatacatatccgtataagaaacacatttagcgaatcagcgagcaacctcaggccaatcgacggatgattgatgactgtccgctgcctctcttcttcctccggcggcggtggcagcgtcagcggcgggcgcggatggatccggcagcggtggtgacggccgagggcggatccggcggcaggggagtcaagtgttgtgaattatgtatgttgttgtttcattgatgtagacatcgttctttgattttgatctagtttttttgctcaacttttttttctggaaccgagttggacacaacaaacaaatcgcataatagaaatcggctgcggtgggaaaaacggaaaaacatggagtgaaaaggatgcgatgacggaaaaaaaagaggttacggacgaaaaaacacgtggggtgaaaagatgtgacgattagaaaaatacgaatcttttagttagttaagataataattaaaagttaactaattatgcgctaaagacttatactcagagaggttttctagaaaagaaaaaaaaaaggaacggttaggtccggtggcactatttagatttagtcggtcagggcattacattgcgaatataaaaatataatttaaaataattaatgtcctcataatatttcatcatcgtcttctatgcaaaggtgtgttattcaagccatccatttctccaatgctacaatcatcgtcaccattggtcaggacaatcattcatatcctacatgtgtagaatagactaaatgtccaaacacaaatatttctttgtgataactgtgcgcatcgctggttcttatgatcatacatgtactttgataaaatcattgagataaaaccttatccatctcgcaatctgatcatacttacattctttgatgtattattgaggtcaaactttatccaccttgtcattaacctgtgcaatgcacgggcattttgctagtgtgtatgtctctctctatatatatatatatatataacaaacaaacaaaagtaatgtcatggtcgggataacgtatcaacgcagaagctgcacagggcagcaggatgcagcgtcaggagatgcagcgcagcgcgcgtaatccgccgtgccggacgacaacagtattgcgataggataggttctgttagccagttttcttatcagtttgttagcttgtttttagtaatttggttaatcagttgtaagcctatttagaggcacaattcggagaagttaatcaagcagattcaatttctaattctctcatctcctattctctatttgttcatcccttgctgttcatcacgggtcgccgttcctccaaactccctcgtccacgtccgccaatcacacattcatatcccatacgttcttatgccggagctcgtgacaacttggtatcagagctcatggcaacggacgaatcctccaccaacgtagccaccgccacagccgcagctacggccgcagctccggtctccaatgccgacatcgccaagctccgtgagtccatggccgacatactccatggcatgtcgctcctcgcatccaaaagtgacttggcggatctcagccattcggttgccgtcgcctcatctcgccttacatcgttggagcagcagggcgccacgtcgacctcaactctgccacgactcggtggcgacggaatgttctggcgaccaccaccaccaccaccgccaccacctccgccgcctccgccgccgccgccgccgcagcatcgcacgtccttgtcctcggacaccaatgcaggcacgggtgttcctcgcttttataagctggaatttcctaaatatgatagcaaggaagatcccctcaattggttcaaccattgtgaacaattttttcggggacagaagacgctagatggtgatcgcgtatggttggccacctaccatctaaccggcgacgctcaagagtggtattttcactacgagcaacatcacggacctcgattggtccgctttcaaggacctgtgccatgctcagttcgggccaccaattcaccgtaattctctgggtgagttgaagcggctgtcccagacatcttcggtggcagcatatcagacgaagtttctggcattggctagccggacgacggagccactcatggattcgcagcaaatacaactcttcacagctggcctacgcgaggaattggccatcgacgtcgagttgcatcagccggatgacctgcaggaagccatggggcttgccagggcctacgaacggaaggcgtcacggctggccagcggcacgcgtccggcactccgcgcaccgttccggagcggaccggctgctgccaatctgccaacagcgccagccgcgaccaccgagggctcacaggagcaagcgccccgacaatttcgtcgcctctcaccggcggaactcgcggaacgtcggtgccaagggctgtgctacaactgtgacgagaaatttgtgcgcgggcacaaatgcgctcgtctgttctacatcgaatatgacgacaacgtcgaaggggacatggagccggcccccgacgagccgcgtgtgtcgctcaacgttctcgccgggttggacggggccaacacgatgcgcctgcccgttgagattgccggcgagcgcgtggtcgcactcgtggactctgggtcgacacacaacttcatccataccgagctggcgcgtcacctgtgcctccatctgtctccagtgcgccatgatctctatgtcgtcgtggcgaacggcgatcgtctggtcagtccaggccggtgcgccaacctccgtcttcgcattgaagggaagctgttcacagtcgattgcttcgcactcgacatctccaccgtcgacatcatcctcggcaccgagtggctcagcacgttggggccaattttgtgggacttccggaatatgcgcatgtcaatttggcgcagtacgcgcgaggtcacccttcacggcctcgccaaccgccggccgccccattgtgagatgctggaaacagaggacctcctaccccgcctacttgacgacttcgccgacatcttcgcggagccgcagggactgcctcccgcgcggccgatcgatcaccgcatccacttgaagccggatgcatcgccggtggcggtccggccgtaccgctacccgcagctgcagaaggacgagctggagaaatagtgcgtggcaatgttacgccaggggatcatccgtcctagtacctcgccattctcctcgccggtactgttggtccgcaagcaggacgcctcctagagattttgcgtcgactaccgtgctctaaacgccgccaccgccaaggacaagttcccaatacccatcgtcgacgaactcctcgacgaactccgtggtgctcgattcttcaccaagctggaccttcgctcgggctatcaccaggtccgcatgcacgacgccgacatccacaagacggcgttccgcactcatcaaggccacttcgaattcttggttatgccgttcggactcacgaacacgccggcgacattccaggccctgatgaactcggtgctcgctcccttcttgcgtcgattcgtcctcgtattttttgacgacattttgatctacagtgcgacatgggccgaacatctgcaacacgtgcaagctgtccttcgcgccatccacaacaacaagctggtgctcaaacactccaagtgccgtttcggcgagcgccaagtctaatacttggggcacaccgtctccgccgaaggagtagccatggatgaactcaaggtccaggccattggtgcgtggccgacgccgcgctccgtccgagccgtccgcagctttctggggcacaccggctactaccgcaagttcatcaagaattacggcaccatcgccgccccactgacggcccttctcaagcgggaggccttccggtggtcgctagaagcggacgcagctttcgcggcgctcaaggcggcgctctcctctgccccggtcttgcaacttccagacttcgccaggacattcaccgtggagtgcgacgcctctggctcgggcatcggtgcagtgctccaccaaggcgccggcgcactgaccttcttcacccggccactcgcgccgcgacacgccagcctcactgcctacgaacgggaactcattgggttggttcaagccgtgcgccactggcgtgcgtacctgtagggacgacagttcgtcgttcgtacggatcattatagcctcaagtacctcctcgaccagcgcctgtccactattcctcagcaccgttgggttagcaagttgatgggcttcgacttcaccgtcgaattccgcccgggccggaacaacgtggtggctgacgccttgtcgcgccgcgacgaggacatggcacccacactcatggcactcacaggaccggcgttctctgtgttcgacgatttgcgtcgcgaggtcgcgaccgactcatccctcgtcgcgcttcgggacaaaattgccgccggcgagctgggcgcgccctgggcattcacggacggcctcctcaccaaacagggccgcgtgttcgttgccgcgagatcgccatccttgccggcactgctggacgtggctcacacagggcacgagggcgtggaacgcactctgcaccgcctgtgtgccgacttcaccgtgcccaacaccaagcaagtcgtccaggaccacgtgcatgcatgcacgatctgtcaaagaaataaggtcgaacaccttcatctggccggtctgcttcaacctctaccggtgccgacgcgggtgtgggaagatatctccatggattttgaggaggggctgccgcgcgtcaacggcaagtcggtgatcctcaccgtcgtcgaccgccagtccaagtacgcgcacttccttccgttgggccacccgtatacggcaacgtccgtcgctcacgtcttcttcaacgaggtggttcgcctccacggcataccgctctccatcgtcagcgacagagaccccgtcttcaccagcgcgttctggacggaactgtttcgccttgccggggtcaagctcaccatgagctcggcgtttcaccctcagagggacggccaatcggaggcggccaaccgggtgatcggcatgtacctgcgctgcctgacgggcgatcgccctcgctaatggctgcgatggctaccgtgggaggaatattgcttcaacacggcgtttcaatcatccctccgcacgacgccgtttcaggtggtttatggctggccgccgcccgccttgcgcgcttatgatcgtgggacagcacgggtgcacgccgttgagcaagcactcacggaacgcgacacgttcctgaacgaggttcgcgaacgattgctgcaagcataggactacgccaaactcttttatgatgacaaacaccgggatgtggcgtatggtgttggtgactgggtctgggttcgactgttgcaacgccaagcagcatcacttccaggcttctccaaaggcaagctgtcgccccgttactatgggccatacaaggtgatggaacgaattggagaagtagcgtgcaggctgcaattgccagcaggaacacgcatccacgatgtgttccatgttggtgttctcaagaaattccatggagagccgccggagattgtgccagcgttgccggcaatggcctatgggcgcgtcctgcctgttcctgtgaaggcagtccgtggcagaatcgcgcgtggcgtctgggaagtgctcatacattgggaagggaaggcagcatcggaagcgtcgtgggagaatgaggcggagttccggcgacggtatccggcatttcagctcgaggacgagctgtttccgaaggacgggagagatgtcatggtcgggataacgtatcaacgcagaagctgcacagggcagcaggatgcggcgtcaggagatgcagcgcagcgcgcgtaatccgccgtgccggacggcaacagtattgtgataggataggttctgttagctagtttccttatcagtttgttagcttgtttttagtaatttagttaattagttgtaagcctatttagaggcacaattcggaggagttaatcaagcagattcaatttctaattctctcatctcctattctctatttgctcatcccttgctgttcatcacgggtcgctgttcctccaaactccctcgtccacgtccgccaatcacacattcatatcccatacgttcttacgccggagctcgtgacaagtaaacttgttcaaaacaagtaaaataaaagtttaggatgtttgaagttacaaattttcttcaccataatgctcataacctgaatactgcgtacatcatatgctcaataatttagtttgtaatttacaattggatacccatctatcagtaagtcatagaacaatataggagtacactaaagactacttgaatagtgtttgaaacaaattcaatataccatgtccggtgccagatcaattctcaccgttattattgacatgtgtagaaacaaaaaaaaagtttataacaagcaaagacatagattgtctaaaagttctctaatgtttccatgctgcggtatagtacgtagtatataccacctaatatccagatcctgtgctactaaaaaattaccgtcagtcttaggtagcacaaatttgaactatcattctctaagagccaactgcgtatttcatgatattttgcaatttctctagcatcccttctctaagtaagtctgctatgataaaaaatagaaagatgaggtaatcaacattgcacaacttgaggagcaccaaccccctgcttcttaggctattccacatggcattcaggtaatcagcatttgtacccaatccttttttttttcaaatttgtattcttcatagttgcaaagtagatggtcctgcatgcaacaaaattatttgtcagaatcattggttcagaaatttgaaaaacataatttttgtatatgcatgtgcataagttgaactctaataagcatggacgaataatggtttatataatttttttttagaaactgagatgatacatttgagattctttgcgagcagaattcatgccaagaaaaaaaatcccaactatgctcacctaatttagtgtgatgataaatcataaattgatggatcaaccataactttctgttaataatattcaagatttcatcatcaaatggttctcattattcacattatcgactgagatgaaatgcagtaatatctgacaaaactggaaaaagaatacatgattaacacaaatttggtcacattttgcacattaacttaacttaccttgtgagtacctctataaatgatgaaacatcaaaagacttggccatttgctttgttgttaccatcatccatcctaagccattgattttagtaccatcgatggggtgaaattgtttagcaatcacatatgcttctctctttcctatgtttcctgaaacaagcaccagcttgattggtgagcaggaagcatgcctgagaacaaataaaattttttacactactgtagcttaaacaaaatgataggggaaatgtgcaactcagtgactacaaaatctcacacattcagggaaaatagtaagaaagtacatgttgcagagtcataatcacattggaaattaatatgttgatggcgtagtccctgcttgacaccattggtcatgccaaaaaccctgaaaatgtagaagcaaatggtatgaaaggaaaatatattcctaacaggtagtaaaagagctgtgcacaaagagcaacagcttgaatctttctaaagtgcatcatctagcataaccatgcattgatcgatggcataagtcaaaatattcatttcacaaacagaaacatatatcagtttctcttcttccacgtctccatccaaagcatcatctgtagcatccccatgacatcactcatcatctccatctctaaattttggtgctcaaagtccatcataatcgaattaatgcatagcttgtgttgaaattaaataagtcagggatttcagcccattgcatcgcatatctagcagctacagcatcttaagtaaaagattgatcccaacctgaccatgttgctactactgcttagtacaacttaatgaagtcaaaatcatgtactgacggcaaaaaacttagactttcacgtttttccttataatgcacagtagattcatagaccatgtaaaacacatcgcttggtcagcatggaagacactgctagttgacgaggcatgcacacattgtataaatagcaataattagcatttagcaagaaagcggcagaacaaatgcacagttatctcaacactcttagaaaagctccttgaagctgagatttaagttggtagatctttgtggtatgatgttgtgtacaaataagatctttggctatcattttcacagctacctgagtgcgtcatgagaaaaaccggcatatcgttgttgaaattgcatggaacacaagaaactacaaataatgggctctaatttgtctccacggttttggatgatgtcaacaaccaacttgtgggatgctccctgagagatgaaaagaagtgaattagcattagctggacaaaaacaagtaaattagcattacctcaaaccataagcttgtaaccaaaatctctatcgcatttgcttcttaatattccagcgcacttaaattagagatgtcaaaacgcagtccttcccctaatacattttgcagccagtaaatacccacaatatccgtacaatgaatcatacaatggtcatatatgctttaaataaaaaaatgacagcctgccaacagcaaacgggtttgtcatgcatacgcattacaatgattgtgtcaaaagttctattatagtactacaaaagtagatcagttgccttatcactgcaaaataaaaccaatgttctactgatctgtatgagcactatataaacttgtattagcaagtcaggcgaaagttggtgactaattacctatcattataaagacttgcggtgtagatatgcaattattcttgtatattgtccagtccattgaagtaaacccatgtggaatggaggacgaagacaccgacagggcaagatattgctagacgcgagtgattcccctatgcaatcagctcactatcaataagttcaaatcagcatctttaaaaaagcaaaattctgttaattttcaacagaataagatattctctgtagtggtgatgatcaataattaactttcatcaagctgtacaatggatcgagaatgaaaagaggagaaattttcatataggggattaatgagcttaaaaggggaatcacagagtaattttcagatgaatcaatctaacctgcacaagagaggaccagcgtccagggaggaccggcgccctggaagcatcggagctgcttgatatgggcagactctaccccttaactgtcgcggccacaagaggcgtggcagggagccagtggaaggcaggatcacaaggacgtgacggggcgactgcgccggtggaaaggaagctccaccaggacgttgattgatgcggaagaacttatggcagcgcgagcgaacaagaaggcccccgggggcgggaggatggggagggggggcagcgatgggaggaggcggacggcgatgcagaagggaccgaagtcggctccggtggcggatccgagtgggagaagcacgatctggccgcgtctccggcgaggacgcggcgtagcgccggcagcggggcgtggcggtggggaagaaggaggacggccgcggcgtagcggtggcagcggggagtaggaggagcgagcgaggaggacggccacggtggctccggcgaggacgcggaggagcggcggcagcggggagtcgctcctgcgaggacgcggggaggagtgaacgaggaagagaagcgcgcggtctccgcggccgcgggtggaggaggagcgatgtcttcgcgcgtggaatcctcagctgtgaaatcttggggtggagaaaacttgcgtgcggatggacggtccagattagttcggataatttggcctgtagcattggagaggacaactcctttatgtaagtaaataccatctctttaaacaggtaatagttatttttattttaattctctcgtacagtgtgttctgtttaaattttgtaaatcaacagtgtaaattttcaaattacaatggaagttttgtaatttacattgtgcaaaagtctaatctaagtgttttataaaaatatggcgctaatctaactgttttataaaaatatgacgatataaatatagcttatgactaatctaaaacaaccaaagtacctcggaataatctagcacacgaatgatgaggaaaaaaaataaggataatggcatgataaattgggaaaagatatatccagaatcatgaaatgccaagtactttttggaaataggttcaagcgtataagttactcgaaaactgaaggagcaataatcattctaccgttccattcttttatctttggttaggatgtagaatttttatgttataccctcatagaagtttaaaaccatttcattattaaaaaaaagttttaaatttaattttgtttctcaaagtctacaggagaagtgtgtacatgcatgcatcaaccaatcgatgttaagaggtttggtggtaagttcggtgacaattggatgccccattgataaacattgcgatcatttgtgttcttcaggattaatgattaatttcacaaggtgcaatgcccatctgaaaagccgtggtacgtgcaatctaatctacctatgagctgcttccttttagaaagcgaatgattggattcagcatcattacaccaaggatttttcaaacaggagggtagcttagctaaaagagcagataattaacgagatagcacatgattctgtcaaaaagggaaaagggagtcctaccacactctttgctcaaaaggtagacgtgacaagtgacatacgtcgtcctttaaagaccaaaaggtgttggtctgcctgctgaatggataagaatctctacaagtatttccacagagctaattaccgagggattgagatccgagagcgtctccgacgtttaggcgatagcagtgcagatgtatcgcaattttttcttttttttgagggaacaaatgtacagcattttttgggatccccctacaaatcaggtgcccgatggtaggtgggaaaaaatcggacgctaacgtcagcatgacgtcgcgcccgatttacgtacaaaactattttaaactgatttttctcttaaattacttattcaaatcatgatccgattgcaccattaaattcattataattaaattttcaaaacaagaccgcacatggatgtattccgacgaaaaaaaattagcttattattgaattatttttaaattttgcacgatgttccaccaggtatattagaattgtttcactaggttgatcaaaaatgtttcacttgtttaaattgggtgttgtttcatcttatataaaaacaatggttcagtaaatagcaaaaaattatttcagttcattgcaatatttaatccatacatagtgaaacattataagtacactaggtgaaacattttttggtggcacaaaaaataaaacgaattcccttaataggggtttccaaaatatgtgggttttttgttgcactagaatatttcgtttactgcaacactagatctatacatagtaaaacattgtgagtatactagaacaaaaaataaaccaaatttccttaatagagaatttccaaaatatgtgggatttttgttgcaaatgagtattttaattcactgtaacattagatctataaatagcgaaacattatagatagattaggtgaaacatcttttgtgaaaaaaagggagagagaaatgggtgggtccacgtggaaggaggggcgtgcggggggagcgcccgatctggctccccccgcgccggttgcacgaccgagagcatttttgcattttttgagtcttaggttacgctagagtagacccaagcccctgaaactgtgcatgcttgacagtgcaggttacttctggtatatcccacctcttttactttcaatctctctcctgtctctccccctctctctctctctcatgtctgcgactctatatctttcctcaccggccgagcgagccaaggcgtcgtgtggagaaatcgagggggtgacggtgccagctttggcctagggcaaaagtgtcccaagcgacgacagcgatggtgatgagtggcgtggtggcgaggcatcccaagcggcgacggcaacgacgccaggcggagcagcggcggggtggcgaaagcggagtatcaggcgacggcggcggggtggccagatctagcctgctgctcgctagcgcaccacccctcctctcctcccctgatcggcaacccttcgtccttggcgagcacgccgacaatctcgacaccacctcctccgtaccaaccactatcgtcgagatcctgtcctcgccgctggatgggacggcgagcttggggcggatctggtggcgtcggcgcccctactcctctcccctctttggcaagcttctacggtgtggatcgaagctggcaggagcttgacggtgtggattaggaggtatgggacggcgagggcactatcgttagggtctggcttgccgccgcttcaccacctccgcacccctctctagcaagcttctcctctcgatctgatgctgatggcggcaagctccagtcggacaccattctcccccttctctttctcctactttcctccccttttctgataaactgctgcaaggccaccatgatcaactttggtcacgtgaacccggtgaaggcatggcccctaggcccccagtccactctctcccctctacgcaagcgatttctctatgtggaccaacaatgtcacacgtcatgtatgtgcattgtggatggccttttagtcatgtggtcacatacatatgttggccctatgttacgaaaaagtttatgtaagagtatttgcttcactgtttccatctcggagattctactctagtacgagatgtcctggtatttttttttctaacatactccctccatctacttttgatagtcatatttccaaatctaaaaaatttatttatgataggcatatttcaatccaacaacttatcatcttaatgactttcttggatttaatgcgtgactctccattcttccacacaagattggctacatggacatcgagaaatgtaaatattaatgaatcgcttgtttacgaggaatgactagtagcatgtttaaatggatgataagtagaatcacttatcattgatctgtgtgccaagataaaatatgactatcaaaagtagatggagggagtagtatggatggagatactcaggtatacgtgcaacgttcatcatcttgtaaacacacacagttacactaagtacttttgaagactgtgccaacatatcttaggattgatgaagtcatcatcgatgcctttgtcgatggatacatcatcttctattgaaacattttagcgcgcttataagttaaacacatgcctaatacaacaaaatgaaacaatttacggtaggatttttgcacttttactctcaattctagtgataagggagatgttaaaatagacacttcaatcttggattgcccgttacctaagtggaaagaggacaaaaatcagttagcggagtcaatattgatcaaattataggtaaatacctttttagtagacaaacatataaatgattttgtaggatcgaaacacaataattaagccaaccaaaggaggggtgaatagttggtatacccaaaaaccaaaatttttagcggaaataaaagttaccctcaaattcgatggatcgcggtctgaccgaagtgtacaagccggtttgaccacctgaagatcgtcggtctgaccgagattaaacttcggttgaaccgtcgagattgcctgctgtcgactgtcgccgccgccggtctgaccgccgcgatgctgccggttagaccgccgaaacccggtgaaacataaatcgaagaactcttaaagtggatgacgactttattgattctctctgtgcttacaaagtgcacaaacaacactccttacaaaaatctcgactaaactcgaaaccctaactcaactatcaattcaattgctctcaaaagcgataccaggaagccccactctccctctctatttatacccgaggtaggcaacctaaagccatgaaccaaactcatactagaagtcctaatcaccctaggaaaccttctcgtacaagaaacaaactttacataaccactcataacaaatttggactccttccaatttcgactccgcatcccatacgcacacaatacctccatcgtatgccatatggaaacttcaccaaccacgtgcattgaactctagccttagtatcccgcatgatctctgaccaccctggacgtcgtcttatccccaagccaactcccgatccatcaccgcaaatactctcccggcatctcaagtcacctatacatagaacaaacaaagaaaccatattccgagaccaagctatccccaacttgactcattagtagcaaacgacagtattacatacgcatagtatccatctaaaagccataatcatgaaacaatcacatatatccaaataaacaacccaaaaccgaaaccgacacagagtcggccggtcagaccgcgggctgcactggtctgaccgtgcaatacacgccggtctgaccggcagccactacccggtctgaccggcagccactacccggtctgaccggacccaatccagcacagtacctttagatcacctgtgaaatccaatcatctccaaaaccactttgcaaaaataaattccaaatatcaaaaccaataatctccaatgccaattattcatcacagaataacaatcaaaaacacctttaattttacagatttcacgatctcgcagcgaaattggacggctgatctaacagcttctagcacaaaatggcaaaagtctattaaactagggatacaagttaagtgcacaactagaataaaaagtaaaagattgtttcttgtgtatggtactgtgttccttcaattgaaccacccatacccggtgtaaaagggtgatctttaaataaacataaagtcggatgaattagcactcaaaaaatctctgattcaaacaagaaaatatctcacaacttcaaagaaattagagagaagatagcatgtttcatacttgaagaaatcatatcttccaaaggaagctttagattaatgtcattgctcgtctccatttatgtctgtcggtgacatgggatcaggagtatcatgactagaggtttgaggcagacacaatcgcacacgtggcctggtacccctgagggatgtcgggcccgagggtgatgcgttcgccctcctcttagtccccccgagggggtcgggccgcaccccctcggccccgagggccgaggcgccccgacccctcgtgggtttttgctccgcgtgtatgggttaggtgagcacagtggggctcacctaaccacatttattgcggtttggctgagcgtgtcacgccgcatgtaacgcagtgcagtgcactcgtttatccggtctgtgaccagtcacagaccggtcagatcgtgggttaggtggcgacaggcgatctgacgcacgccttgccccatcccgtcaggacgagggcttctaggcgctcgtccccagctggagctagcgtgttacctcccagagatggcacgttagtcctggtcagatatatgccaggcttcatcctaaccattacaggcaagatgttgtgtgaagaagggcgagcatgtagattgctaagctgacacgtggtggacaagaatgaccgacgtgactggtctgataccggtcatgtcgtcagcagacagccacgattccacgtcgcacctgctcccggcgaaagtggaggtagttgtgggccgtctcatcagaaggtgactcggacggcaactatacaaatctccgtccatttatgaaaaggggggggggggtaagtccccacaaaaaagagagaaatggtgcatgtggtatccccttaagatataaaaggaggaccttgcccactgagaggggggactggacttttccagattagaaacccagaacaagggagaggctggctgatactttgtagctccttcatacacagatgtcccaaaacacaggagtagggtattacgcttctcagcggcccgaacctgtatacatcgcccgtgtcttgtgtgtttcctgtctcgcgagccttccacatacagagagcttagaatctctccctgagtccccggccgaaccggcaaaggggggcctgcgcggtctcccggtgaggagccccacgctccgtcatctggcgcgccaggtagggggctctgcgagggattttctgagctctcgcactctttcgtgtgcgccaagcttttcctgttcagcccaatggccgagccagcaaaggcgcacgacctctccccgagtatgagcggtgacgacggggagccaaacccacgccgtcgagctcgtactccaccgccccctccacgccaaagtcctaggcgggagaaggcgctcgagagggccgaaggatccgcgacttcgacacccacaggaggtggagaagggcggtgagatggggagcgtcgcctcctcgtctacggcgacggcagcacgcccagggcgcgctccaagctgcgggcgcgctcctacgtcacccgcccgtcgcccatgacccggagtctccagcccaacgttggctggacgatgtggccaaattggtcatgactgcacggcagcgcctagatgctggtgggcggtcctccgccaccaaggcctctggtgctgctaccaccggctccgcatcgtcaagacggagggcgcggcgagcggcagccgctgttcgccattcggccgccactccttcgtcaacgcctccgacccgggaagatctgcgtggggaaccggatgctcgcatcagtatcgagcgccggcgtaatggccgacgtgctccccacgcaacggagggcgcctcctcgtccggagtgtcacctcaccacggacgcggggatcagccctccgtgcccccggttggtggtgtcggctgtagagcctttgtggcgagccttcggaatgtccgttggcccccaaggttccggcccaccatcgccgaaaaatatgacgggagcgtcaaccccgccgagtttctccaggtctacacgaccgggatcgaggccgccgggggtgacgacagggtcatggcgaatttctttcccatggccctgaaaggacaagcgcggggttggctaatgaacttgccacccgcgtctgtccactcttgggaggatttgtgccaacagttcaccatgaacttccaaggcacatatccgcgcccaggtgaggaagcggacttgcacgcagtacagcgaagggatgatgagtcacttcgctcgtacattcagcggttctgtcaagtccgcaacaccataccatgcatccctgcgcacgcggtgatttacgcgttcagggggggtgtgcggcacaaccgcatgcttgaaaagatcgcctccaaggagccccagactaccgcggagctttttcagctcgcggaccgagtggctcgtaaggaggaggcatggacctggaacccctccggttccggtgtggcagcttcggccgcccccggatccgccgctcagatagggcggcgtgacaggaggaggaagaagaggtcagcccataccgacgacgagggtcatgtcctcgccgtcgagggcgcttcgcgggccacccgaaaggggaggcctgcgggaggcaaaaagaacgaggccggcgctcccaacagggagcgcccaaccggcaagtggtgcaccgtccacaacacttcccttcacgacctcgcggactgccgtgcagtcaaaagtttggctgagcggacgaggaagtgggaggaggagacgaggcaggagcgccgagagggcaaatccccggcggttccttccggtaatcggcgaagtgaggccaagcagaaggcccccgccgaggacatcgatgacggcgatgatgacctaggtttccaagagcctggggccaccattgccaccgtcgatgggggagcgtgtgctcacgtttctcgccggagcttcaaggccatgaagcgagagcttctggccgcggcctctactcatgaggcgacgtgtcgggcgcggtggtcggaggttgccctcaccttcgaccagaccgaccacccaccgtgcgttgcccggggagggcagattgcgatggtggtttctcccaccgtttgcaacgtgaagttggggcgtgtcctcattgatgggggagcggccctcaacatcctttcccctgcggcctttgacgccatcaaggccccggggatgatgctccggccgtcccagccaattatcggtgtgacgccggggcacacgtggccgttaggtcacatcgacctaccggtcaccttcggtggatccgccaacttccgcacggagcgggtgaacttcgatgtggcggacctcagtctgccctacaacgcggtcctggggaggcccgcgttggtgaagttcatggcggcggtccactacgcctacctacagatgaagatgccgggccccggtggccccatctctgtccatggcgacctcaaagtcgcgctcgcttgtctggagcagcgcgcggaccacctcgccgctgcatccaagcccaagggtggcgacgagaggcttggcgcttccgcccccgccaccccgaggcaacggatgatcacaggcgacgaggtcccggtcaaggaggttgccctgggcgacggcccgtccaagaccacacggatcggtggtcttctggacggcaaataggaagacgcgctcgtctccttcctgcgggcaaacgctgacgtcttcgcatggagaccggcggatatgcccggggtccccagggaggtgattgagcaccgtctcgccgtgcggccgggcgcaaggccggtccggcagaaagtgcggcggcaggccccggaacgtcaagccttcatccgcgaggaggtggcgcgacttctggaagccggattcatccgtgaggtcatccatccggagtggctggcgaacgcggtggtcgttcccaaggcgaacggcaagcttcggatgtgcatcgactacaccgaccttaacaaggcatgtcctaaggatccttaccccctgcctcgcatagatcagattgtcgactccactgcggggtgcgaccttttgtgttttctagatgcatactctggttaccatcagattcgcatggctagggaggatgaggaaaaaactgcgttcattacccccataggaacctattgttatacgacaatgcccttcgggttaaagaatgcaggtcctacttttcaacgtactactcgaatttctttgggtaaccaattaggacgtaatgttgaggcttatgtcgatgacttggttgtaaagacgcgcaaccaggaaatgttactctcagatctagcggaaacttttgagagtctccgctccgcccgcataaaactaaaccccgataagtgtgtgttcggtgtacctgcgggcaagcttctagggttcttggtctctgcccgaggcattgaggccaaccctgagaagatacgggctatagagcggatgcgcccccccagcaaacttagggatgtgcaatgcgtcaccggttgcatggccgccctaagtcggttcatatcgaggctgggagagaaggcgttacccttatttaagcttctcaaacgctccggaccgtttacctggacggaggaagccgaaaatgccctcacccagttgaaggcgtatctaagctctcccccagttctggtcgccccggagccagacgagcccttgttactctacttagcggcgaccccgcaagtagttagtgcggcattggttgtggagcgcgatgagaacaattctcatttcacgcttccccaccctgtgccgacttggcccgggggagagcagggaggagaggctcccgagccgaacggtggcccaaggcccccgacgaccggagttggccctctgcccgcttgtcagacggtgctaggagcccccgacccccaggaaggccctgaggccactgtgggaaggccgcacctatcgcccttcgaccccgaggctaaccctgtgctgacccgacccgggaaagagcagggagaagaggcccccgagccgaacggaggcctaaggcccctgacgaccggagttggccctttgcccgcttttccgacgacgccaggagcccccgacccccaggacggccccgaagccactgtgggaaggccgcccctgttatcctccgaccccgaggtcatcagcacagaagataagtgcgccccgcgaggctgcttggacgaagagtgccccagggatgcggcccctagcgaagaggatcggccccaccgaaaggtgcagcggcccgtctactttgttagtgaggccctccgggacgccaaaacccgataccctcaggcccagaagatgctttacgctattctgatggcctcgaggaaactgcgccattatttccaggcgcatcgggtcacagtagttacgtcttaccccctcggtcaaatcttgcataatcgagagggtacaggacgggtggtgaaatgggcaatcgaactttctgagttcgatttgcactttgaaccacgccacgctatcaagagccaggccctcgccgattttgtggcagagtggaccccggctcccgagcccgtctcgatccccgaggccagcacggacccctcgcagctgcctcacaccgcccactgggtgatgcagttcgacggctccctgtctcttcagggcgccggtgcgggggtcacgttgacctctccgagcggagacgtcctcagatacttggtccgcctcgactttcgagcgaccaataatatggcagaatacgagggactccttgccggactaagagtggcagctggactggggatccgccgcctcctggtgttaggcgactcccagctggtcgttaaccaagtctgtaaggagtaccggtgctctgacccgcagatggacgcctacgtgcgccaagtacggcgtatggagcgccattttgacgggattgagcttcggcatgtgcccagacgggataacatgattgccgacgaactctcacggctcgcgtcctcgcgagcccagaccccaccgggcgcctttgaagaaaggcttgcccagccgtcggcgcgacccgaccccttaggggagatggatgcgcctgaccggcccccgaggcctgtcggagtccaggcctcgggacccgaggggagtgctcccaactcccttagattgattgcttggatcgccgagatccaagcatacctcacagataagactctacccgaggaccgcgaagggagtgaacgcgtccatcgcatctccaaacgctacgtgctggtagaagggaccctctatcggcgcgcggctaatggaatcctcctgaagtgcattcctcgagaacaaggcgttgtgcttcttgccgatatccatgaaggcgaatgcggagcccactccgcctcgcgcaccttggttggtaaagcttttcgccagggtttctattggccgacagctcttaatgatgcagtcgacctggtccggcgatgtagagcgtgtcaattccacaccaagcaaatccatcagccggcccaggccctgcagaccataccactttcgtggccatttgctgtctggggactcgatatcctgggaccatttaggcgggccccgggcgggtttgagtatctgtatgtcgcgatcgacaggttcactaagtggcccgaggcttatccggtcgtcaagatcgataagcactccgcacttaaattcattaagggcatcacggcccggtttggagtgcctaaccgtattattacggataatggcacccaattcactagtgaactcttcggcgactactgcgaagacatgggcatcaagctctgcttcgcctcacctgcccaccccagaagcaatggccaagtggagcgcgccaatgcggaaatcctcaaaggccttaaaaccaagaccttcaacatactcaagaagcacggcgattcatggatcgaggagttgccagcggtgctctgggcaaaccgaactacaccaagccgagcaaccggggaaacgcctttcttcctcgtctacggcgcggaagcggttctcccatccgagctcaccctgaggtctcctcgggctaccatgtattgcgaggctgatcaaaatcagcttcgcagagatgacctcgactacttggaagagcgaaggcggcgcgcggccctccgagccgcgcgctaccagcagagcctgcggtgctaccatcagcgccacgtccgggcccgatcactctgcgtcgacgacctcgtcctacgccgcgtccaaacgcgtgctggattgagcaagctttcaccaatgtgggagggtccgtatcgagtggtcggcgtcccccggccgggctccatacggctggccacgggcgacggcactgagctgcctaacccgtggaacatcgaacaccttcgtcgcttctacccctgagggggggtcgggtgtcaggtttcgggctcgggccaaccccgcacccccctcgggcgtgcagggttggccgggggctacaacatatgcatattcttatttctcttatatctgaatttctataaaagcagtttcaatttcctaaaggctgtatctgtgctgttttttccttttgaagaatcttgacttgaaataggtcactcgtgctcaatcctgccctcgggggctcgggtcggctaaaatcgccaaacggggcccagaaccgagccgtgccccgaggcgtggtgaactccgggggggaatcggcaaaaacccacaatcgggtcacccataaccctcggtcaccacgttcccggcctggccagtctcgacatgtggatctccccaggcactagccccgacccgcgccttttgaggaccagaacctgggcacaaacccttattcaagctaagacacaaaaggaccacggcacagatcatcctcatctcatactcacagcaagatgaaattaacacaaaaatttcttcatttttgattacagattaagttgatatatacaaaaaagaggcccgaaggccttagaagaaagaaaagaagaaaaaactaaagaatggcgggggtctgggggctcaatccgatgcgcccggatcgccggcctcgacgtcactgtcgtctgcaccaccggcattgccctcctcgtcggagttgggggcgaacgcaagccgaggggccgagccctcgaagctgtcaacgatatggtcggcggcatcccggacctacgcgcgcgcgcggtcctcggtcccaggagggaactcatccagcgccatccatggagagaaattggggtccctggcctggtaactcgccaggacgagctccaccgctccttgggcgaggtccctcgaggatgacttaattgtcttctcgagctcctcggggagccgttggagagccccggccatcttcgagaggcgctgggcgaggcctccctggttggcggcgtactttacggtccgccctctccagaggcccacttgccgaccggcgcaatctaggcgggagatggcgtcccaaagcatgccaggccctacctcgcctgccaagcggagggcttcgacctccccggcggacgagtccagcgcgccctgcagatcggcgatggtgcgttcggtagctgtgaggcgggcggctaagtcgctttcgcccgtggccgccccgccgctgcgcgccctcgcgtccagctccttcgcccgtgcctcgagctcagcggcccgttggttcagtacggccctctcggcgcgggcaccttccagattgcggcgcgcctgctcctcctgcgctgcctcgcggagtgacaggttgaccgccagctgttgcgccgcggcctcggccccctcgagagctcgctcccgttcggtgagcgcgtcctcgcggaggcggagcgtgaactcttcttcggcgcaggcagcctcgtgcgccaccagcgttgcttcccggatggtgacggcggcctcgcggtccgccagatccctctccacgacgcaggcgcgctcttccagcgccatggcgcgcgcctcaagggcctcttcgcgccgccgggacgccgcttcggtctccgccgcccgctgttctcgggcagcggcagcgtcaagcaccccctgggcggcgtcgagcttcttccctagctccgcctcccagctcccgtattgaaggcggagggtgtcctgcgcctcgttcatcacggtggtggcaatgagggcagccccccgctcctcctccacttccttggcgatctccgccagcaccttcttacgagtttcaagctccgagacgtgccggcggtgagccttacggcccacctccaccatggcctccaccgagcgtcgcccctcttcgacacgcgcccacgcggcgtcgagctccgcccgctctgcctgcaggacctccacctgggcacttaacccatccaacaccgtggtgtttgcggcggccaaggcctgcagaaggggctctgcgttcagtagggcgatagaaggcgtggggaagagccgccttggagaggatgccacgcggctcgggccgccgatggaagtgccggactcggggatgtcccccggacccggttggtcctgagcgtcgcccgagggagtaggcccaagcgacgcgcccgcggcctcgtcgccagctgccccggaagttgtcgcctgagtgtcgcctgagggagtgggcccaagcgacgcgcccgcggcctcgtcgcgagctgcctcggaagtcgccatcgcctcgtcctggcgaaatccggcctcctcccgagcggtttcctcggcctggcgagcccgggcggcctcctgggcggcctcctcggcttcccgtaggcgatccgcggcctctcgccggtcagattcccgcctgagggcctctgcggccgccggatcctcggcctcagactggccggacttggaatggcgggagggacgcgacgggatctcgctgaaacaaaagaaaaaaccagaagacgaacaagatgggtgagtgaaaactcgcgttgagagaatgaatacagccacgatgggtgagagacgaacctgtgagggggtcggttaaacgaccactttggaggggaaatgaggtttccccgagatggttctgtctcccccatcttacggggccgcttcttcttgcgctccccctcgggctgcgatgttggcgcggccccctccgggcgcctgttactggcacgcgccgccccgccccctcggggaggagatgggggaggtgttcctccctgcttcctcttcacccgggcgtcggcagggcggctgctccccgggcccctgtcgcgggacccagaagcacgaccccctctcggggtagattgttcccccctgcggctcccgcctgcgccgtcgtggccctttggagctcgctcctctgaggccccgaccgccatcataatggtcaggatggaggcgcggtctggatcgctgcagagggggaggattccttggggaatgagggccgcctctacggagttgagattcagcacccgttggaccaatatcttgaagtcctcaggagcccagtcccatctcactccctggtgggtcctcgtgaagtcttcggacccggtgtactcccaggcgccccgagcgcgtcgctggagcggcgcaatccgacgacggaggtagtcgccgtacaccatggcccctgtgagcccctgggatcgcaggcccgccaggcggtcgaggacggcgtcatagccatcccccagatctaccggcgcccgccagctggaggcctgcgccgggggctgctcggaagtcggaggcgcgcttcgtcggcgaggggagtgtagaaccagtcgctcttccagtcgtcccacttcttgcggagggcgcaggggatgtagcggttcagcaccggcccccgtggctggaagtagcagccaccgactaccgatggcggcgacaccgactgcacggtgaagaaccaccggaacagccgaagagatgggcgcaccccaatgaacatctcgcacagatgcgcgaagatggccaatgtcatcaccgcgttgggggtgaggtgcgccatctggagatcgtagaactccagaacatccatgaagaaagaagaaaatggtggaaccagccctgccattgcaaaggggagaaagaagacggaccgccccgggtagtctggcgccgggcgtccctcgcccagcgtgactatctcccggccggtggcagattccggcatgaagcggcgcgacagcccagcctgcctctcgctcacgatccgggaaggcggcagcacgctaccatcgagcagagcggaaccccgtgccatggcgccggaggaagagaaaattaagagcgagcgcgtgtggcgaaggtagggcacaggaaagaaggagttagggcgcaagcggcgaagacaaggggaataatggcgaaaggaaggaaacagatcccttcctcagtgcctttatacttttgccaacgctgtgcccggctcctcgcttctcgcgcccactatttcgccccctcatttctcgcgcccacgcttccactaatcccattcgcccgcttgcggcgcatgaggtggatatgcggttgtggcagtcgagatagatcatatcgtgcgcgcgttaattacgctcgccgaccgaagcgacgttaccatatcttcagacgaaacgaatcgccatgtccagattcgtgtgctactcaagtaatgtggcagtcttgaagagaccgctcattgttgacagccgagttaccattgccgatgtgcgtggtttgtgaccgttgggtttctgcccaattgtggagaccggtcccacctgtcaccaggtcttaggagtggcgtcacgcccgaccgtttcccttaaagagggcgatctccctggcataacgccgggggctactgtcggtgacatgggatcaggagtatcatgactagaggtttgaggcagacacaatcgcacacgtggcctggtacccccgagggacgtcgggcccgagggtgatgcgttcgccctcctcttagtccccccgagggggtcgggccgcacccccctcggccccgagggccgaggcgccccgacccctcgtgggtttttgctccgcgtgtatgggttaggtgagcacagtggggctcacctaaccacatttattgcggtttggctgagcgtgtcacgccgcatgtaacgcagtgcagtgcactcgtttatccggtctgtgaccagtcacagaccggtcagatcgtgggttaggtggcgacaggcgatctgacgcacgccttgccccatcccgtcaggacgagggcttctaggcgctcgtccccagctggagctagcgtgttacctcccagagatggcacgttagtcctggtcagatatatgccaggcttcatcctaaccattacaggcaagatgttgtgtgaagaagggcgagcatgtagattgctaagctgacacgtggtggacaagaatgaccgacgtgactggtctgataccggtcatgtcgtcagcagacagccacgattccacgtcgcacctgctcccggcgaaagtggaggtagttgtgggccgtctcatcagaaggtgactcggacggcaactatacaaatctccgtccatttatgaaaaggggggggggggtaagtccccacaaaaaagagagaaatggtgcatgtggtatccccttaagatataaaaggaggaccttgcccactgagaggggggactggacttttccagattagaaacccagaacaagggagaggctggctgatactttgtagctccttcatacacagatctcccaaaacacaggagtagggtattacgcttctcagcggcccgaacctgtatacatcgcccgtgtcttgtgtgtttcctgtctcgcgagccttccacatacagagagcttagaatctctccctgagtccccggccgaaccggcaaaggggggcctgcgcggtctcccggtgaggagccccacgctccgtcaatgtcaatgcttgtcaacatgagattatgtaacattatgtattatatgtaatactatgtgatgtgatgtctctgtatacatttgcaatgctaattacatataaatttgttcaaatttataactcggttttgtaggttttgatgcttagctcttgaagacgctgatacaaatgaatttgacgttgtgaatgtacatatatgctgttgtgaatgtatggctttatagatggcatgtgatggatttgtgaaaaatgttgggatgtgggtttgctgggatgaaggaaatatataaacatgtgtttctttcttattttgcagtgaacatagctagtaaaggactgaggctagcgaaaaaaacaatatttatttttttggtaaattactcattggtgacgggttataaaaaaacccgatactaattaataccaaaggcaacgagtgtaccttagaatccgttaccgatcagtcatccgtgatggtcaccatactatactgacaaaggtgacataatcatctttgccggtttcaagtgcgcgcacgtcacggatgactcatcaatgacgggccctagtttgactcctctgctaggtcgaactcatcggtgacggggtttaacattggcctgataaagataactgtaatccgtgacagcaaggggcccgatacagatgacctttcacatcagtgaccttttgttcgtgacggtaccctatcccgacacagatgtggcttcccgcccgttacagatgagccatcccgtgctagtgtaaactcgaacactagttgatatgaataaaaaaccaccagacatggcatggatcaagtggtagctgacaacgaggacccccttgcaatgaaatgtaacacaccaggtgtcaagtgaaaaattggatctagcctcttatctgttgttggataacttcgttctatatgtatattctcatattggaacacactcttttggttatttgtttcaataaaaaaaatgccgtttttcttcttccttgtcgcagtatgcctatgttggtttattaaatgagttaataaaatttaataaatttataacaatacttttcatgattaatctaccttttttatgttttcaaactaagtatttataaagatctattaatattcactagtgcggatctgtatcaggcgtgaatcctcatctgtggtggcggacggtctggtcacggatgcggacggtctggtcacggattagtgatcagttatgtgaaaactcatctttatcgggagagctaccgtcaccgataaggcttgatcacctttctcggggtaccgtcacagataactaatcggtgacggtttcttgtttagaaacgacaaagttgttcgccgtcgtgactcgtgacatgattttttttctaacctgacaccgatgagtttatttataaaaaaaaatagatccattttattggctagtgttaggcatttgctagccatgcttgctgcaattaacagaaacatagatatatactagaaaggagagcgcggcgcacgccgcgcgatagcaaatagttctgcataaaatggttagatagtagataatattttgataaatacggtctacatttgtttaataaacagagtacaataaagtataagtagtccttgtgaatccattaggtggcttaatagaagacaacacaccaacaaagatgaacaataaaaaagtgaattgggctataattttcatcaacaaaaaggacaaacactttcaaatgggtcatttagtggatgctatgattggcattcttctccaccataaaggactacaagtggaaagagctcattacaaaccacaattctgtctgcaaacatcttcaaaccagttcagcgcagctgcaagatgcaaatggttcgctattcaagcgtgtaaacatgttttatctttcagaaggtcactgaaacatagggcatacgtgagttagaacaaaacagatgattgcttaataccttaggaggcataatatatccatttcaacttttctttcgattacctgcatgctcagtattcaacatgtcttcccaagcacttttacattttgtctgcaggattatccaagaatatgaattagaaatgaagattgctttataatcgatgaacagtttcagataacaatggtcgatagcatttgttctgaaatcacaacattgtaccaagaaatcaccagtttcggctgaccatttctgccaccagtagttgtgacaattatgtggccggtttctgctcccttgccgttaatattagtcacttgaacttcctgtatttaccatttagcttaacatgttacaatgaagtcaaattcacatggcacatagaagaaattgcacttctcgtcataataaaacttacattgtcatcccttatcttcagatcatgcatctgatcaggcaacttctcagcacccattgtggtgaagctgctgttctttaacccagatagcgcagcccctattgaagccatctgttataaaagctaaacaatgttgagtcagctttgcatccacacagaattccgcaatgcatctatcagtcgacctgcgagatcgtcaacaacaaaacatcagttaaaagtgaaaccgcaaggtttacaatgcaagcagcaaacgagaaggattactccttcacactgctagcaactcggtgcatctaacacgcattgttaatacgagtatatgaccaccagcatgaaacactcatgggagagctatatgtgcattggctacagagaccatactgcttgcagcagtcaactgacttggtgtttgtaagtttcatgagcagaagagttggatcagagactcggagtattattcctgcatggttcaggaaatgatcaaatggaatctttttattatgtcaaaatggcaatacatatacaacacaacaatttgctaagtacatataattaatgaatagaacgaaataatcggaaagattaactttttttccctaaggagaaaaacagagagcaagtgacatgaacgatccccactacctatttaccttatcttgtactcctatttggttgtcattatgatgctggcagctccattcatgaagatccacgagctgagtatagtgggttgcccctcccaacattaacatgagtaatgaagggaatctattccttgaatattgagctaggatcttcggcctaacaagaacgactaagacgacattagccacaaatcataagcatctcagatgaaagaactttttttttgctaactcctcttcaggggaaaactaaatatttaccgttaaaacataaacagctacttgcacagagcctgtaaaactgcaattgccttaaattgtgccatatttgttattcatgtatacaaagagaagaacacagggagactatagtagcagttcgtaatggcattgcatatatacactcacgtgtcatataaatttaatacatatagaattatagacagcatcacagaatgaacacatctaaaattcctcatgattctgtgttgacaaaacagaacgaaactaacctgctgtagatatatatgttgtaccgatccatgaatacctcttgttataggtaatttgggaatgctaggattgattttgatagatcaactatctagtaaaccatagaacaatacatcaactccatagaacatagaaatagaaagaaagataattcttgtacgcaacatgccatgttaattctggaaggcaacaatggtgagaaagcctaattttgtagggaattttttttacatgataagatagaagcaaggaaatattaactattatgcaattactggattgagtagctgatgtatacacatgtcaattacaaacaatggcaatatatagcggaccgtttgcaaggttacacaaaaatatagttgaatttcagaaccatctgtagccatcagacatgcaaagaaccttagggaaaatggcagatcctagaaaatgcaaatagtcgaagccaaatgcttaatggtggggtaaaaagagaaattcctgcagcttacctttttccgttgactttgcctggatgtcttattctgaatggctacataagagcatgaatcagagattgagggaagtagctcaagaagctcctgcgatggccgatggaggcctagtcgacagcgttgacctctagcagctacaggagtggctgttgatgaaggccagacagctagaagccggaggggccagagacgctgagggtctgacatgctggagtggacgcaagcgggatggtggggggactcacctagcatgctgagtcgaggaggtgtcagatccggcaggaggaggctgcagtggaggttgatctggtgaggagaaatcgctaggcgcatccgcacctatccgagcacggatgtcatccgttggtcatggcgtggaggtgggggttgtgaagaagtagaacgaagggacggggaggaaggaggcggcgtgagacgaagagaggaagctggggctggcggccgagcgtaccggccggcttagaggaggaggtatggcgccgtcggtgaggaggagggagcgggctagggggtggagcgagcctgctatggcggcggcggcggtggggggacgacgatccgcgtcagatctggaagggagggccgccgccgcatccaccctccgcgccgcctccacccttcacctccgcctccaccggatctgggaggaaggaggggagccgccgctggctccacccctcgcgcagccaccgcctgaagccgccgccgccaccgccagtaactgccgccgccatggcagctcgagccggaatctgagctgagagaggagagatgggagagaaggggaggggaggagaggagagggagagaatgaggggagggtttcaggattggggtgttagtctaggacgttttgcggaaaaccccctatagttttcatgtttacagcgttacccctagaaggggaattttctcttcttcgttcgtattgtattttcctggaatacgagagattatacattaaaaaatacaatgggacgtaaggcatatatgatattccgtgcaaacacgaggacttttttgcaaaatagcctactaatgcaaccggctctaacccgccgtcaagaccggcgcgtgcacacgccccacagcgccaaaaaaaacgttggaccggtgaccgcttacgagcagtcacgcaggcacgcgcgaggagccgggaggaggaggaacgacgtgtaaagtaacgagatagcccaaaaataattcaaaaatcggagaaaaacggtggggttaggggagttattgattgatgattcccagcatccccataatcccagatcccatacatttcacaacaacatatacataaatacattcatatgcattttacaatcacgtttccattcacatccatttcacagttacatttccattcacatccatttcacattgttgtagtaatttaaaatttgtcaaaaaattcagagaacttacacaaaaccatcgatgcatcttgaagagttaaccatcaaacctatcaccgagttacaatttgcaagaaataatgtacttagcaatacaaacatatacacaagcatcgaagattgtactacatatagcatgtataacaagcttcgttggggctcgatggaggccggcggtggagaggacggcagcctcgtcagtgcttggaggaggctagcagtggagaggacggtggcctcaacggggctcgatggaggccgacaagggagcaaaggacacccatagtagatctgaactggttgaagagtgaagagtgtacagtgaatttaaaccctagaccgtgatcttaactagaccattaggcgcgctttgcagcgccctatcatgagtaaaggtgttattatttagtcatatgaagtaagcattgaaatataaagcaatagaatgataggaaaagcacattatcactatgctatgaacagttcaaacgaacagaacaaatcattacgcatagagatatgtaactaatctagcacatttgcaaagcttatcataagtagtgtagcgattaatacattaagtgatgctccaaagcagtagttagatagcatagcatggtacataggaagccattgtccagattcgtagtcctagaatgggtctaatcccatcctaggttgtaatatattgggatggagggagtaacacatatcgaaaataatcgaggcaatgagaatctattatgtttatttaaatggcgttgtattgcagtttacctttatcctcctttaacaagttcacggtcagttcccttagaatcaatggttccttgtacccattgaaagtccatggtcagttacctcgaaatcaatggttggcttgtacccattgaaagcttttgatggtcggctttcttggcactacaataagtacaataagtatataggaaacgaaacatgtaacaatatcatggcatcgaaaatagtatatcagtgagcaccatgtgtagctaaaccaacaaaaatacctacatgaaaatcaaacaaattgaaataagttttaggagcacatataaggcaaaaatattcctttccatttcctctttagaatcaatcttcatagtcagcagaactgcatccctttgatcatcgtctatcacctgagacagttttaaagtaagaattttatataaattacaacacatttagctaaatgagttgcctgtgactacgggagttaccacagtagataatccactgaaatgagtctctggagatttaaatgaattcttactttgactttagatttttcagcatgtgcttggataaggacaatctgcaataacaacacataaatcagttagaagaaattctatagcacatcagcacctcactatttagaattgtaggtgtttcggttcatggcaagaggattttatgccactattttagctgacatgggacagtctcaatgggatgtgaacatggaggaggatatagctgctagcaaccatgagatacaataaatggacagtccctaaagcttgcatgtctgctctcgttgtaacaataagtcatttacagtgagcgtctaaacatatggtccttttaccagtgtagaaccctttatggtagagatgtattttaataatcgtcataaacaaaatcagtatgtcaggaaacacaaagaacatacaaatcgacatatttcacattttctcaaataaaaaaaatgctaagatgcaaatgtcacgtcaaagacatcttatccaatagttcggcgtgaggcatagctaattccaaaccaaaccaaatctagaacctcgggtactgtcacaaacaaattcagtatgtaattgctagggaatctaccttgatgctgagggaaaaaacaaaacatacacacaaacaagaaggaatgaaaataatctctctttttacagaacagcacaaggcatatatcacattgtcagggattacatcttataccgtcataaatacaacaatctttagttaacaaaaaaatcagtactccttgtaatgatacagaaataaagggaaagaactcacatgtctgtgattgtgactcggtgtggcattgtcctgctcgttgagcaatcagtgcctgttgtatacattgaggtgtgagcagttcggggcagcacggttgggcagcggctgcaaccatggcctgaggcccgagcgatggattcaagggagatcatattgtaaggaggaggcaaagcatgcagatagctgcaccacagcgctgtcacaaatagacttcaataccagcaggatgaatgagctacttgtacttccggtcgcaaaataaggtcaattgggtctgcatctaagtgctcgattaatcactgcagtgactcgttcctccaggttgcaacatcgattccttccagtgtgctcgtatcagttgaaccaccaaattattattatgaatcgaagccatcaaacctggatacgcaaaccagggagaggagtgcgtaccggcagtggcttaggcctggagtagtctacatcagggtagtcaatctccgccgtagcaacaagatcccacccagcgcatcagaggaggccggcgagtgagcgggtgaagccggtggagcgatgcggagcgcgtgccagaggacggagtcgaagacgccatcggaaaggagtgggccgagggcgtcgtcgccgcccacacaaggttcgacgcgtgggcgcgatctagcctcgccccgagccgcgtgttgccgtcgtcgagcgccgtgtggtccctcaacagggacgccgccgcggcgtccgtggcgtcaagcgcagcctagaggcggttcaccacggcatcgaacgatcgtagcagcgcctgggcgaaggaggacgcgcaaaggagtttgtggggaggagggcgaaggacggctggcggcgtcgctgaggaggaggaggaggcggcttcggtgcggctagggtttttggaacgcagagcgcaatggacggcggaaaacgcccgacgggtctaatgaacgagcgagcagtgaaacggcgaacctgctagcttgctgtcccttggttgggccccaccctaacagcccatttagagatacccaagcccgcagcagcttcatcacaagcgccggaggcgcggccgcgcgggaagaggcgctccccgagcgcgggaaacggcaggaaccgggcccatagccgcaccagccttgcgcgtgcggagggagcgggatgacgtggatatcagcggaagcgagcacgtcgccccgaaaaggtccggagcgctgtggggaggcgaactcaccctcatctttaatttacaccgatttggtcaacccatacccgtaaagggcaatataattaacgtcgccacagatgatagctatcagtgataggctagaaagggacaccgtcatggagagtcatccttgacggattggaaagaagcattgttgcagatggcatccgtgatggctattcataaaggcccattagagatgtcatctcaaatggttattactaaaagctcgtcatagatgactttttattttttttaaaaaagtaacatgttagtttttttggttccttttggttccttgaggatagaccactgttgacttatttttcttttctaacttagagatgtcacatatttaataaggtacgccgaagatgagatgactaagatgaacaaaatgttttattgaaactccagattacatggcaatagtagaaactgatgatggcatacaatgtttctattataaggataggccttcggcatgatctcaacatacatgcaccacctcctcttcggtgccattgtctaggtctatgtgcagactgacatgaaggttttggttctaatcgtcctcatcgacgacattgtcaaccctaacaattcttctgccatccctaacgacgtgcaacttcttgtttgtcgggtaatgtatgtagaaaattttcataacctattttgcaagtacaaatggttcatccatgtatccaaccttgcttagatctatagttgtgaaaccttccttatctacttttactccagtgcgtaaattgacccaatggcaacgaaacaacagtactttgaatttggtactgttcagttcccaggtctgctctatacgactgtagtatgagctagacccaagttgatcaataaaagcatctatatggacctcgctgttttgtactgtactcttgtcatcttgtttgacggtataaaacaatcccatgattgtcattcccacgatctaaaacaactatggcatttcagatccatgctgaatagaccgaaagaacttttatatctttcaagcaggataacatttggattttctcattcttcgataaggtgtggcaagttgaagggaggtacactcttcctgtgtccggattagttgctggtgcgaattcacttcgaatatttatctcctgtaaatctagacacatgtttaatccgtccttttgtctttctaggaatattcagcagtagcccgatcaaactcttactcacattcttttctacgtgcattagatcaatgcaatgacggaactcaatgtccttcaagtatggtagtcactagaatatatactttttcttccgcatactgttgatggtcgttaagtgcaaactttaaccgtaaactcatgcataaaagatatcaaatatactaccaaaacttagaagtaggagtttacctctaaccacttgcattgttttggtaaatatatatatgtaggtcactaaaggagaaaatacacccgacatgcaacgaaaataagcctccgaccaatcatgcgcgagtagagagcccacaagtcagttgaaacatacttaaaatggggccaaactgtaacaccccaggtagccacgtacctagaatgccacaccaaaatacactcaaaaaccactaactccaaaaattattagaaatttcggcagagtctcccctaaaaatacggatatccacgacaggcaattataagataactcaataacaatataatccacgcaatccaaaccatcctagctccacaaattctacgtgaaagtaaggaccataactttaaatgacagttacaagttctacggaaaacttatgctaagcaaaaacatagtctaaaactaaatttcaatagtgtgcaataatagtgtgtagttcaagggtgctactcccgtcccatgccgatcaataccattaggtacctaaaaaccaaattaaatacaagaatgagtaaagaatactaagcaagtacaatattgaactagtaaaacatacataggtttaatgcaataagaaaccaatatgaaacatttgactttctttaatttaaaacgaaggaggcaaaaagtagtagttccctcccgggcagatgtgaatatcctcttagcattaccgataagccgagcaagcgtgatcagcgcttctcaaggattatgaataaagatccaaattgcactcccatgactacacatggtacttgaataatgtaaacaaaaacttccagaagaatgaaacatgaataacgttgtgaacttgaacatgaagtgaaatatgaatatgtagcataataccaaaaccacacaattgataataggaagcttcgaataataattgggtaaatgaaaccaacaaagcaatacagtttatccatcacacaagtccatcttgtacttgccttaacttcttcgatactccgactcaactccaacgttggaaccctccacacctgtggagcaaaactatgcataaaccactatatccaaccaatgatagttacaagggataattactaaaatcgataacctagaacatataaactttttaccgatttgtattaaataacctatagcggttccattactgttttatacgtaacttgcaaaccgtctaccagaatctagcaaataatacaacttcggacatctatacaaaattgtctacaactttcatgttgggcacaaaatcagattatgcctatgaaaatcccagattaaggaaaacgaattgctgtcctgatttccggacccggtcagcagtactgtttttgttgtttctcccaaactgtttatcagaatcgaacgaaactagcagtgttagaaagatatcgacgataactacaaactttatttaggacaactaacctgaatcccgatggtttaataccagaattgaaaatacggtttcagcctagcgttctataaaaataaattcaagctaccagaaacggaacgtcttatatataaattagaaacaactagggaataaaacggattacctagaagtactaattttgtaagaaaaacaaagaatttggaaatatccaccaaactccccaaatttcccttcttctaactttttttcccttctcttcctccttcctgttcttctgcagcaacaagcagtagcagccaatagcagcagtagcagcagcaacgcacaagcagcagcaacggcagatcggcagcagccgcagcagcacatgcagcaatcctagcggcagcagcagcaacacgagacaaaaatcagatcgacagcagcaactcaccaaggagacgatggctgtggtaaccggcgtcgtacgcacagcggcggcggcgccgaggtgaagaggcggacgtcggcggctagggctagctgctagcgatgccttcttttttttccccttctattggttaaaaagggagaggctaatgaagatcaaacagcccacattaaatcgataaccggaaataactcgggactccgattaccacaaacttatagtctatttcgccctactcgacgagctctacgcatccacggttcctgatcgcctattcaaacaatagtttaaaagttaaacttttgcacgttcgctctaatattccccgaaatatattaattcaaaacccggggcattacattcttccccccttcaatcgaattcgccctcgaattcgtccagccatactataggcctaaccgccataacggcccaccagtcagtctcctagccaaaggagaggccaggaggtggagcccagggttcggccaaaccgcctctggcgcctcccatcctggccttccacgtgaatgtcccagattactccctaatgatgtttaaggggtgttaccgatatttccaactgtcaacaactgtcattactcactataaaaggaggagcttatacacacttcaacacacaaaacgtagagctcaagtagagtacatctcacttgtacattcatatttcttcatgctatattcacgaatgccttgtttgatgttgttattattgtttaaatgggttctatcctagtggtttgattattattttttcattatacacaattgctcatatgtggtgttctgctgtatggtttgatgtttgatgcaccatcatgttctttttatctgtattggagtggttttgttttagatatattttagatcctaatgtggtccttaggatgacaaaagttaggagcctctagagtgagcaccgactagtgatgcagatgggctaaatgaagggctgtcacaatttttttttcttcattgctgagtgacgctgcccaagtgttaggttgatgactcaagtgtccttatttgaagcaaatagtgtgtgatagatcaattggccacaatgttgtgcatctctcgatgcaaagaaagggtggattattgtgtgtttctccacataggttggggcgttaactttcaccatgaccctagaaaatcttagtatagaacaggtttttttttcccaaaaggattgggccaatattatcgccactagtgagttatgatggcatagaacctatgtagaatcttgtgaggtccccatggctggatgcatctttgttgttggggacatttttggcatgttgctttgggacctagtgtctaagttggattgttgctttttccacattgtttttggttgctgaaagctttccttggatgttgagacgctctgttacttttgtgaacatgtggaatgtttgtgtggcccaaaggcatgtttttatctacattggttatttgttatcctggttaagtgtttgatacgctcttgaagttgtgttaaatcgacgtagtcggtgggttcatagtagggtttcttgtgattgcttggctagttgtcctctctagcatgccatcaagttttaaaaatagtatttttctcgatctagctctccattgtgtttgttgattatgcagacctcaagttgtggcccatggtgtcttgtttgtgtgtgtgattgtttgtgtattggttgtcgagcctattggtttagtcctttgagtgaatcctatggtagaaaaaacgtcacggttattctacctaggtggctaatggtgtttctcatatgaatgttcacctttgagtaaaatgttagcttgtgatgttgcaatatgttgtgtgtttgagcatgttttgccttaggttttgttgcatcagccaaacgaaatattttcgtgtagtttcggtgtcacaataggtgtttattccagcagtacatgcatgcatgagtgtacaaagggataatgccccatgtttggctatgtcttattttagaagagccatatagttttctctggtctttgcctcttttgggaagtgggaaggaggttggatggcctagcaatgttcttttggtagtaagaaaaatagttttgacaagggacccaagaagttcaattgtaatagaaagtggagtgttttgtggggctttgatggttatgggtgtgggtacgagaaaagtttgaccttcctaaaatagaattagttgtcgaagggagtgggagctagagcttcatacaaccttattgaagtttaggagaactagagtttgggatcgagcatcaaccaaatgggacagagcaggacctcgaagttgattgtgcctaaggcataacttcggtttctaaatgtgtctctttctaaagaatttctctaatgtatttctttatatgtgaatcattggcataagtagcaagtgttttttttccttgatgggattttttttccctttcatcacctagaggtaagtgtgtgtgatgcttaaggtgtctatctctttggactgttttgttttgaaggtagaattcggggacgaattccttaaaggaggggagaatgtaatgccctagaaaaaatagaatactgtagaggatatattggaagtccgtaaggttttggtgtttgaaattagaagaaaaacaataggtatatgctagctgggctagcttttggccagcccaaggcctagctgtcccctccacatcccaaaaccctaggaggtcccccccacctccccctagccgtcatttggtaccctgggggcgcccacctccccctctagtcgacctcccccatgcctgccctactgcagacctgggaagaagggaagaagaagaaagggaaagaaggaagcggagggaattgaggtgaagaaggaaatgaggggttttggttgccgctgcccatggaggcctaggtatctaatacatgatcttttccccctgttttggttttctattagggtttagatcaagtgttggaagcgagtaagtttgggatcaaccgatttattcctcagccaggtttttgctgatctgtcccctgcacagttctggtttggatgccttttcggccatcataatgggatttcctgcgaaacgtctctatacaaaagttgtagataacgtgtagatctatcttctgaccaaatggcatgagtttatatcaagtggtttaggagatatcaatttctgaagttgactgtctgaatatcgatgcattttttctgtagtcgaggttcagagggattttagaggatcttaatgatggaatcagagaatcttgtttttacagaagttgtagcatatgttgtgatctacctcctacataaaaattgttagcttttatcttgtagtttgttgtcagtgctctcttgaatggttgttgcacagttttctgggcagatgcacttctctgttttgtgccatgttttaggccagctaaatggaagaattcaattttgttatctaaatgaaagttgtaattcttgttctgtagatgtcagaaatgacatatttttctgtgttatgtgatgtagaattggaggtatcaaattgttaatctatgctgcttttataggaagattatcagtgatttgctttatgttgtttggggtgggatcccagcgtaggaagcgtatgtgtgattcttgaatgattatgcatgttgtttgagtctgagccggtgtttatttaggtgatgccacttcggaatgcaactagagttcatctcatcatcggtgaaggcaagtaaacgtagcggtggtttgctacagccttgacttgttatttgattctacctccacgttgaaattatatatcatcaaccaagattattatatattacaccgaggatttacctatctgaatcatacttattgattttacactgtttatggttatactttatgctcttggttataataaccttatactgatctccatcgaaggaatgtggttccgatgttatactctggaattcatactgcatttgcatcacttgcattgcatttgaagttatgtcgtgaacctatggttgcgaccgtaccggtacagcatcgtatattgccgtaatacgatgcagcttcacaccttgttgggtgtgaaggcaggagtacatatcattgcattgtatatgcacatattgcaggacgttatgaaaattattgatcgaagatgtctttgagaagtgttttcttctctaggatttgtgagtatatggatttgattggtgacgctatgatgttttagttccttggattttgaacttgtctttatgtgaatcataacttggtatttaaattagttatataataaacatgtggtttaaatagcttgttaaagccatttgcttgctgagatttattctcacccccttatagtcttttcaggtacttgctgtgacatgtttgcatgaagggataggattagctacacagtcgcacgacatgatctcacttagtcatgattattgtaatatcttgataagaatacttgtgtttagacataatgggttaattaaatactagagttgttgaccattgattagccactttttcaagcctatccctacatgtcagtcaattgttgtatcataaccttaatctatatgttgatgcttccgcgatgttttcttgtctaagatagttgttgccgaaatttgcttgttttggcacttatgtgtggttgtttagtggcatcccaggcttatgtggttttctggggtgttacattctctctggtcagcaacaaatttaaggtattttttattaatatttctccattaaaatgaatctgcagggttcttaagcataccattaacccttcgatccgtggcatgctgttcatgtgaaaacacggcggcctaggggatcttcttaactccagtgcaagtccaaggctagcctcaagtgtatcaagggcgtgccaactgatttgatcctgcaatcagcaagaaagagaaaagcagagttagtcagccgatagccgatcggccgatagcgtatcgttggtggtctctaccgatggagttagaccaaatcggctatagactggatatattaaagaatattaaaccctaaatatgcctcattggttgtaacattgtctatcaagattgataaagaagcttaagataatattattaaaatagccgatgtaacaatatttagtgtaagaaagataatatactggctaatactctagtacagatctatataggcaaatcaatctatagtaatataccaaatagaggtcaatagtcaatgttgatagcccagccgatatgacctctacttgatatattactataaagtgatctgtctatatagatggcaaatatacatgaaacagataaagaagcatgtatattaggtaagagcggctgaaaccctgatgttatccctgttagaaatcaagaagcagggtagagatcaacacgacttagtaggtcgaatgtactaatgcaacactaagtatgaaaagaaacacaatgtctagacaatcaagccgttgattgattttcaaggtggtatatgtctaagctaatctaatctagcaagacgatttagccgataacggcagaaaccctaaagcgagaagcagccgatagagctaaatcgatttgttaaaactagattaacatagacatatgatatcgatggtcatgatacaaggactaagatatctaaaacgacataatagccccaatagcataggccatcgagatgagttacctcttgcgaagcgaactcgtcgaaaagtaaaaacgaaagggtcgcgatgcgccgaagttgtattggattgtccctcgtattacaatgctaagggattcatatttataccccgaatacagacttagtccattatggacacgactcaaacctttctaaatataagatacaaacaagaccatatatgacggtctcttgccaaatctaacacaaaccgacgtaaccaaactatttaatagatacaattgccttacctgagctctatctctaattggcaatgacgattatcccaatacaggcccatgcgagcccaagtcataccatatcggctgtatcggccatcggctccatcaaccttgatcaactcacactttatttccagctgatatggtatccagccgatacgcagtccgactccaaattcaactagattccacactaaatctgcttcgatcttcttccttcttcgaatctgatgcaaaattccgttgttaacacatgccaacgtaataactctgttgcctagggattggcaaagattctcctaagatgataggcaagtactacacaaccttcgtcacaatttctctttggtttgtatcaagaagccttacacacaggacaagactctaagtcggtgtattccttttagtacaatatgcagtcatttggacaatcatgaattctacgaaccactaaccccacacaaaaaatgtttgcttcatgtgtcgctttgggctgtgtgttctctcttctagaagcagatccttcaatatatccaacagttctgtaaaactcttgtttgtccatccacgacatgcttttagcttcattagatctagggtagcaactaactttgtatgttttgccttgcatccatcgtatagaggtgtctctgaatcactaaccaacctggtgaactcatggtatcttgcattgtaagttgtctcctcaacatcatgcaacattgcttgcaatcttgcattgtaagttgtctcctcaacatcatgcaacattgcttgcagaagattgtgattgacatcaaccatttcactgcccaacggataagaaacaaacatgtcaacttcattttcttcctaattttatctaccactcccttcatctataatatcgattgattcattttctccatgctttgtccaacatgtatagcccttcatgaatcctcgatatatcaaatgagagtgtatatctactcttctggtaaacatcttttcatttttacaatcaacacatggacaagttatataatcattgttccttcttttcctctccttcctcgctatgtttataaaatttgaaatgccacttttatactctttgctatgtcgatcatgaaagttcaagtaccattaatttggttttggtaattaattataaatccaattatgtgagactaatgtttttataaccatttctttgcctagtctcatgtggatatgaaagtgtagtgtgtgagaggtgattcctgaacttcatattagttgagatagaaacattcattgatggtggacctaaatcacaatgataaaatgcatggagatcaatctatatatatcactatttctcaccatgtacatattgacatgttcatatataatatttccacgtgaataacaatatacatgtgagactaatgttttgtttgagccttttcttttgtttagtctctttacattaagaacatgaagatgatgaaggtatacatttattttaatgcctatatttgataaatgccttctattcttgtataggataagttcctaatgtttcattcattttatgcatactcttgcttcacacaaatattttgtatgcatgcatttagggggagcaaatcctataccttatttatgcatgtaattgatgcaagttgttcactttcatttaattgggatcttaacatttaagcatatatttgagtatatgacacttgtactgttgattaatacttatcatttattcatatctttttatacatgcgattggttggtcaacaagtaaaggttgacaaccagattattgaggctaataattttattgtgttgaatgagagaaataggtcccaaggattgcaaaggtgttgatgctcaagtgatattattacacctaaagatatcaaggatggcagaatgaatatattgtagatgtggaatacaaagtggctactatggcaagacagtgaagggcaagcaatgctaggccgcgatggaccatgtggtggtgaagggcaagcaaggggcttggtgctgaagaaccaaatccaatggtgaaggacgagtgacgactttgtcatgatggaccatgcggagccatttgaagctacaagtaaccacatcaatcatttcaagaatatatggtgaaacggtttcgacgttggcattccttaagacaaagaaaagatggaaagaaggcattcctattggtataattctcttcctatttacatttgagtataggaatgctgtactattaagagggatgcaacgtcgatatgtttgcgtatgtctcggtgctcagagtgacctatcatagtgctaccataggagaaacccaagctttaacctatcctttgagtagttttagactttgtttttggttaagttggtgctaacaatggaattttacaccaaactcagagaaaaaggaagcagatcgaagcggatttgatgcaagatcgagttagatttgaagtcggactgcgcatcggctggacatcgtgtcagctggaatgaagcttgatttagccgatatggcaagtggcctatatgatatggcttcggctcggtatgagcctagattgagataaccgccattgccaattagacatagagctcgattaaggcaattatatctattaattaggatatttatgttggtttttgttagagatatggtaagagacctccgtatggtcttgtttgtattttatctttaggaaagtttgagtcatgtttataatggactaagtttgtacttgaggtataaatataaaccccagatcatctatactaatataaaaaggaggagttgtgcctatccaatcctatggtgaaatcattagaggaaactaggcccacatgcgaatgcaccaaatcctcgtccccaccaccataaattcctccacgcgctaacctagcgtagcaaattcctcaccccactcctttcgtcaccgcatcgtagttttcccctcatcggtcatcatgccgccgatagcgtcctcctctccttagctctccctccacaaaatcgctcagcctagacatgattcgccatccacaaaatcgctcaatctcttcctccacttgacttgctggtcatctccttcaccacaactgcacacagcctcgccggagatctgcctgacggtggggtttgaggcggcgcgacggagatccgccgtgagcgaagaccagtccctgctcccgcaagcacggcctcaacatcacttcctccttcccacctgaccccgactgtgctcccgtgggcgacgagagagtgggggcgttgttcgccctcgcttagattggcactgttgccagccactcactcgccgtcaccaagatcagtgcacccactgccaccatcatcgttattgtccaccccaagttgctaccgatgcctgcggacatcaagccgctgccctccacccctctcctttcatggccgtgactagaccaccgctagacgtgcaccctaggtcaccgactaccgcgcgactccagcggccccgcttgcgcgtccccttggctgccggtgcttgctgttagagtatatggtagttagagtcatattaggataggattgatttatgtggactacttccatatctgtaatccttccttatctcctccccatgtactcctatatataccggcccccgaggctcaatataatgtgtccaatattcgcagtatcctctctcctcctatactatccaacacttgcgcccactccgccgacacccgacctccaagacaaccgccattcccatgggtgcagaagcagtagaagaagcagcgcaagcaggaggagaagaagaagcagcggggaaggaggcacctgatcaggctgaaccggccaccaccgaggagtaagtgcgagtaggccttttcccttgatcttgttcatgtactatttcttcatttagttcagcaagcaaatatgtgattcatggatgacttatgttgctgtgtcttagaaaatatacgtattgaattaattgtgaatttatggtttgcaaatcttatatatagataattgatttatgtttgtgatctaaattgatgttagatgcttctttgttgggaatggtccgctctcccgcaggcgtggctgctccgcctccatcacactttgcttggggttgccctccagccgtgcccacgcgtgtcgtgctgtccctgatggacaaaaccctcctaacccacgaccggctctccactccatctcgcagtcttcgagatcatttccaccccgcccatgcctccagcctccctggggcagactgtgcttgtctcatgcccaaacaactgaggcagggatggatcagagaatcggagatggaggccaaactggtgatggcaacccgggacgaactaccatctctgagctctatccagaccccatttgtggctcacctgcttcaattttgatcatgtactgggtggatatatcattttgatatgcagttctgaaccggtagagacctttgatatgtcagtttggttctaaatattgaataagcagtgtttaggtggcaaatcacaaaagcagtgtcagtgcatttctgttttttctcttactattgaaagtaaggaatatattctacaatttattatttgattggagataagcttttgtttgttagtctgctaatggaaacaatatatagtttttagatccatcctctcttgctccactggtcggtggtgtcagctccactgaaggagatgcagcaggatacaagtttcatttcatgtatacatgttggaggttgatttcctataagtatgttaattacatggttgatggaatcttcatggcatcacgttctactttgcaaatttacaaattatcttttcctttatagttctgcccctatggactgacaggtattttgtatctgaaaatgcaattggggcttgatgtggccatgcggattcttgggtgaaatatgcagcaagttccatgggtgctttaaatttgaatataccatggcatccacaaaagggcttcaggaattacgaggaagccaattaggataagggcctcctgacctgatgttgtgtattgcaagtacttctttgtatctcaatttggacaattgttgtatcaaaaaattttgttaatgaagctgatatctcaattgttgtgacttcttcctatgaatacatgtgcttcagcattaaagaaacaaatgtctttaggtatgcactttcaggaattatgggagaagatatgggcctccctctgctatctatggagcaacatgcacaatttagacaatatgtcagagtgcctggggagacaagttgaattattataccatttctacatctcggtaaagtttgtacttgatgatgttttatggccattgtagttgtaggttagttattcactgctatctctcctttctttagagaatgggctacatggtgcaatggttgcagttgttggttttgagaaaacttttagtatttttgcagttcattgtacttattcagctataatagccctcaagacaagcatatatcctaaggtaactcactgtctactaaagttgaaaaaataatttagttcatacttacggtacttattatgttataatagccctcaagacaagcatatgttctaaggtaactcactgtctactgaagttgaaatattaatttagttcatacttgaactagtttatcataaataaggttttgttatgtatatataacatgtccagtggcgcaaaaggtgcgtgattgttcaaaggtctttttgcttaggcttatgcttattagccaaaatttgaattttcaaccttaaatttgaagtagattttgggggtttttcatcgaagtttatttttcagccttttacttttagatagcttatgcttatgcttttcttttctttttgttcgacagtggagttaccttcaatcccactgaaagacaaatcttttttattccagcttttcaagtgttcgtcaagcaattttctctaacgttgcactattttcatggcaagtgtgtaacagggacctataaaaataggccatatcattattgctgatattattcttaaaatttgaagtgttgatatatttattgcgacaaatgctgttaaactacgtgcattgcacgtgcacaattactagttgtaaaaaaaaggacgacaaaatccaatacaacttcggcgcatcaccacccttttgttcttctcttcggcgagttctctcgacaagaggtaacttgattcgatgacttgtactatcggggctattatgtccctttagatgtttagcccttttatcatgaccatctgctattatatgtcttagttaatctagtcttagtatctcgatttagccctattggccagttctccctttagggttctcgccgatatcagctaaattgttttgctagattatattagctaaggcatgtaccatcctaaaaaatggttaattacttgattgtttatacttttaagtttctttacataatttgcgatacatcatccctagtcatgtcttgaaccctaaaaactaacttggaattaatcataattaaggatagtatcaaagttttagccgatcttacctaatatacatgcttctttactggatttatgtatatttgccacttatatagatagatcaccctatataaatatatcaagtctagatcagtatcagtcgggttatcaaacttggtaacttatcagtatttgatatatttctatagattgatttgtttatataagtttgtactagagtattattatctttatttatctatcttgctctgaatattgttccatcggttatttctatagtattgtctaaaatagatttgataaaccaaatagatgatatcacggccgatgaggcatatttagggtttgtgcttaatttatatatcaatccatagccgatttggtctaactatatcggctaggatcgccaacgatacgtcatcggcctatcggctgatcggctatctgttgacttactctgtttgttgtttttcttgttggttgaatcaaaccagttggcacgcccttaacacactcgaggctagccttggacctgcactagagttaagcagatgttctaggccgccatgtttcctgtcaacagttcggtaatcctctgagtgagctttccatagagtcctagatcatcaaaaacggactcctgagtaaaaagttatggtcattttactctgtgcctttcagcaattctaaaaaaaatatcagatattcttccccattttcctaccattatggtgcctgtttgtgagtgggatttgagaaggggaaagagttggattgagagattaaaaagttgagagctactgagattcacttcatactttgagcactcaagttcatagcaagcaaatcttcgattgtgtttgttactcttggggactaaggtctcctagacggctaggcatcgtcgatgagcacccaaggttgtggcgtgccacggaaagtttgtgaaggcttcaatttcgtctccgcaaggaaagaaaacaagagtgaaaccgaggagtgtatttgtgcaacctcaagaggaaagggttgaaatagacccggcctttgtggcccctcgacggagacgtaggatccgtggatccaaactttaggaaacaaatcacgcgtctcctctcttggtttgtccatttttgccttctctcatattgtgcttgagcttgattttacccgatctacttgtatgcttagtagatatatttggtgaccttatatattgcttagataccttgtttgtgaccttttgattcatatacattttgtttgttcaagctacaagttcatagctagcgttttattcctttaggaggagcccttggaggtcgtcgccgactgcctcctccaccttggcggtgttcgtctccacgcccttcccaaccccatttagaaccccaccatgcagaccttggctgcgcgcacaaatcaggcctcaaaatccaatcaatcaccaagaaaagaagtgtagaagagaagaggtgggatgtgtaattacctttgcactgctgctggaggaagaccagaggaggagctgttgccgtggtgctgctgccggaagaaggccggaggaggagctgctgctgcacgtggtggccggatccggcgtgacgcaaaggaggaggggcgctgctgccgcgcgtggtggctggatctggcggccccgacctccaagcggccggatccggtgtgacgcggaggaggagaagcaggagtggtggcgggggttgagggaggagaggaggagcagtgcggctcggattggcgccgccgggtagagaagaagtggtggtggggagagagggaggagggaaaaaaggaggaggcggagtagtgcatgtgcttggcaatcgaaaagataaagagtagtgcgctcggtcaatcaatctgacgtccggacagttttgttaataggtgttggttttttcaaagaaccgacacccaagttcatattttagaggtcggttcttttaaaaatctggtacctacagtattggtaccggttcttttctttacgacgaacatctctaatataagtatatgtgcatgttcttttaaaaaaccggtacctatattattagtaccggttttcctctagaatcggcacctataatatttaaatgtgccggttctgtatattttcatcgtgcggagttggttaaatgattataggtgccggtttatttgtaagccggtccttatgtggtgtttgtagtactctatgagtgcttatgtgtcggggattattacggccggtcaaaggtgaggcttacgtgatgggctacacgctcccatcacacagactggtcgggttgtgtaccagtgagttaaaaattttagaagtttgaaaagaactattactttgtatattctttactggagagagtagtatttgtaagtatacgagaccaggtttttgtttagtacggaggcctgaaattatgggtgcatctagcacggcactggtgtggttaggccttaaaattgtactgcgtacaacaaagaaaagttaacaagaatgcctccatacatttcattccagtacagacctatgcgtggggacttctatggatgcatgattgcattttactaccaccgatcacagtacacatgtactactatatgagtagtacttccgaaagggttacatacgcgttatcactttcgtggcaacagttaattacatcttccaaatttcaaattaacaactcccaataattcattgactattacagagagtctgtatgtatggaacgtcttattgcatatatgttgtagaatgtatagcaggcttaatttgtccttctctacttttcttacgactagcaaagtactcgtgccttgcaatggatttcaaaagatatatatgaaattcttgacttgaaaattgtatttgtcaaacataagttacaagcaaaaatgtagcaaaagactaagccacacacacaatgatatacttatttagccttacaaggtaccaccaactcttaagtaatggcatattatatgtctatatgtattccccattaagtgtaaggagtgctatttctctaagtcacatcatctcaattatttgtagcttttgaatcatttgtcaagggtgcaaattgcatcccttctcctgaaaactttataaaaatcatataactcaattatttataacctttggataattgaaaaagtatatacttcccccgtttcatattataagactttctagcattacccacattatatatatatatatagtagctctattatacacccctcccttaaaataactattctacaccccccctctatcctaccctatccggcccacctccccttctcccctcccgtgcgcttctccctctcccctttgcgcccgcgcgccccgcctccttccactcctctcgatctccctcccccgtcccggcgcccccacccctcctctcgatcttctctttttttttctcttttttttctttttcttcggtttttctctccatcccttctctttattttttcccattcttctctttttctagaaaaaataaaaataatttggtaaattaaagactagaacccatgacctcatggcttataacaaactctcttaaccaatttaccttatgacactttgtaatttgagatcattgtttgtttttttatatctgttcaaattttgtgaatacaaactcattatattactgtaggaatcataccttgttattataattcggtagtaacattatcataaaagtgcagtaacatgatacgttactgcgagatttatagttggttactgcgaaatttataggtctttactgaaattttgcagtaactacatgacaaaactttccagtaacagagaacatgcatagtaacagtggcactatagtagtaatgttttttagagataaaatattttaaatctcaatctttagagagtagtaacgtacacgtcatgttttatttttctaacccatttgcatcatggcgttcgtgaaaaaaagttcttaacaaaactagaaccatcataactattttttaacgtcattactgaggaaagcagtcatgttactacacattggccgtcgtgttactacgctgttccagtgagacgagaactaaaaagaggtaaatctcaatctttagagagcaatatctctcacatcatatcttgtttttctaatccgtttacaccatgatgttcataaaaaaacggttaacgaaactagatccattatgactactttttgacgttgttactgcaagaaagttgtcttgttactgcatgatgaccatcctgttactgcacaattcctacaagacgagaacagcaaagtggtgggcgggggagggagtggtgggcgggtttgaccggcgggaggacgctttgaccaaggtgggaggggggttttgggccctagggagggtgggggaggtgggtttgacccatgggaggaggggtgtagaatagattcaaaatatatatatatatatatatatatatatatatatatatatatatatatatatatatatatatatatatatgtaaattaactggtgctacatggagtatgggctccaagattcaaattgcgtatatacccaatttgaatgtttaaatgttttttttaaatgtttagatatgaatattaacttctttactaacaagttcaaacaagtttgaactgagtttgaacttttttttttagattttggttctagatatataacatctaaacatataattcgttatgtatgtaataatgaattgtgaaatgaagttgagtttgagttgttttgttgttaggtatttgtatgaattaaattcatatacctagatatctacttacaatttgtaaatttttaaaaatttgagagaatttgtgttttttataccttagagcccggacaccataaagtcccctatggatatcatatatatatatatatatatatatatatatatatatatatatatatataacacgatcatgctacgtagcgcgacacacagacgtagcacgctaggaaactacgtagcgcctctcacaggagcgatctcctcctgtttttccgtttctccttcctccctttctgtttctgggtttttcgtatttttcctcccaccaagagtgttttccgtttttttcctgcacaactgccacccggtctccacgtgccctcctcaagccccttttctcactccatcagttcacacggtgagtaaaaatattcttgagagaaatcaggttcccataatcagtaaaaaaattccttaacaaaatcaaaccctctttctatgggcaataaaatttttactcctagagtctccataatcagtaaaaaaattccttagcgaaatcaaacactctttagaccgacagtaaaattttaactccccaaatcccaataatcagtaaaaccctctttggacgggcagtaaaatttttactccccacaagttcagatactcatcaagatcacactctttcgaccgatattaaaatttttactcccaaatccccataataactagtaaaagaagcgaaatcaaaccctctttagactggcagtaaaatttttactcccacaagttcggggctggataatactcatcaagaccaaggttagtgaaatttttactccagcatatttcttacatcattggcgttcatagtaatatttttatcacatatattttggtaattcttttactcaatctgttcgtatggagaagagaaagagaatttttttcaggcattaacatatgagaaccattatcatttttacgggacatattaacacatacaatcaaaattagggagtattacattcaatcatgcatatgaaattatcaatcacacaaaatcttctgtgcgtaaaaaactacagaaacaacaggaggaaaaaataacatctccatccaagggaggagaggagacacagcagagatgttgatggcatgaggtgctgacgtgctgcagcagttggcggcgactactcgagacagatagactagcagctccaatcccatcccagccaccagcagctgttggcatcgaagcaggagcaaggcgacagggctccagtttagccccgcacaaagcatggtcggggttggactcgggttcatctgccagccagactacgccgctgtggcctagagcaccgccgcgcgacgtccaccatctccccgtcacctactccttcgccgttcctgtcgggataggacaaggcgctggatcccacaccggggaggagtttggcctgcaaatccggcgcagccaaagctcaccagcaccttcatcggcctcctcaccatcctcatcgacagcggcctagtccgcctgtaagctggtcaccggggctgacgtccattggcgcaacattttcctcctcttctggcttgaacgcagcctacgcacggtgagcaagaagaaggcgacctaacaccaaggtcctccctgacgattgatccagtgccctgcttcaggaccaccaccacagatcaaggagcgcgtcctcctgatccgccctcctccacgctgcagacggctgctcatcgtttgaagagctgttggagtagttcgtcgtctcctcacccgccgcccgtcgaccggtggcctaagccacacagagggcgagcaccgcccgtcaccctctagcacggacagaaccactgggcaacctcgtcggtgcgcgtgctggtcaccgaccgccgtcaccgaattgctgccatggccagccacgcgctcagatccgaaatacccggagagagtaagaaaaaataggatcggatatgtgattggttacaaggtgagaaaacaacatacatatatatgctgaaaattgggtaacattaagttaaaagtttactcggattataagcgtgggggaggaggcgcaggggtaagttaaattttaactacatactgtggactgggaggagggaggttgcaccagggtggtggcgctgtgtcgctccacctagttaggcagcgcccatagcgctataatatatatatatatatatatatatatatatatatatatatatatatatatacacatatatatatatatgtatgtatgttaatgaatctaaacatatatgtgcgcctagatttatgaacatctatatgaatatggacaatgctagaaagtcttataacctgaaacgaaggtagtagtaagtaagaaagaaaatcttacaacttgtgtatactattttatcacacaattttctcgcggcaacacgcgggatatccatcttgatcctttagtttactagtggtcaaagattttttagccacataaattatgtcatgtcatatgtttgttataaaagtttaatacactctctgtcatggtcatggatatcacatacctaatagtagttgactaaacttggcagggcccaccacatacgatatcttatacgaaaacaaatcccgtatatataaggagttccggataagaaaggataaatagagttctatatagaaacgataaggactactcggattgtatccatatttatctccctagttttacttggacaaggaggcatctatgggtataaatacaagccctctaaggaggagaggagatacatcataaagccacaagacacacccaccataggcgcacaatacacaagccaatatacgccaagacaagtcgtcgcatatcaacatcagagataagcctagacatatcccatccggtgcctacggaagccgacaagagggatcaagtgccatctctgatctcgacgtgttcgtacttcaggaggaagactaccctgtcgtcgactacgagatggttatctagccgccaaatcgacgacaactagataggttatcccaaatactgtatttgtgtgatccagatgaataaagagcaacaccggcttcggctaacaggatgtagggctattacttgtcagataaggggcccgaacatgtataaaaatccttgtctctatctcttttacctcaatctcgcacataccctagtaccaacgatctccataccatcaaataacgtagtcgcggtaccaaccgttgacagcggtgcgccaggtaggggaatttttggtgcttcaaggtttcaacgacatgggttcaagagatggattctccaatgacaaattactcgacgacttcggctgtagggaaatctaacccgaccggagtatgtcccccgacgagatcgggaccatcgccaaatattcgatccgtcgagatcgaccaatatttaagatttcgtcacagcggaaaaccaacagtatcgacgacatgagagattgatccaatatgtgtcggtcttattcctaacagggtgtcctcggacacgttggcccgattcgtaccgagatcaaacgtcgcgctgctagctggtgcaaggcattggcccgctgagtccaagctggacatgacatccactatcatcgaccgagtacgccgacggacatgaggatacaaaccaagagcatgcatgcatgcgtggaccagccaacatgcatccacacagtgcatgtgaaaattgcttcgttaagacatgtctatactactcggacacgtgcacacaaggtaattagtgagattgattttttttaaaaattaatctactaaattcgtagatatatccagcatatatctacaaagatacgcaatattttatatacaatttaccgtacctatttttcagatatatatacaatattatcagatcaataatttattatgtttacctagaccgtgttttttatacaatatttattgtgcgagtgtttccaatattaagccaaccacggtttaatactggggctcgccctacttttttcaagtataaatcatgcttgtttacggtttacataatgcccgatatttaatttgcttgttatatcctgataatactataactctagaagattcatgcagttttttgagtaaatactcgatattgtctactatattgtcttctagaaaatatttttcaggaacaattgagcactcgagtacgatgtggtcgagtacaccgcattatcgagaacgttctcgaaaaatgctgagttgtcgcacccaacctaccaacaaagaccgacgacttatctcatatatagcgttggctacggctagactatttgagaaaatattgttaacagataattcccccgcgaacgttgtcggcttgatcatccgacatgattgcgaacagacatccggatatgctataagttgggtatgtgagtcatgctggccacatgagatgcacatgtaataaccaactctagcgcccctataggtgattaagagatgcctaatcctagttatcgaccagacagttgtagcgacatctcatcgcctatcaatttaaattcacttgtggaccgttgaactccatctatcgttgtccaagactccatgcctctacggtcttacaccaggatcgaccaagtgagtacggcaaatattgataaaggggggtcgtggataacaagagaagtttcatcttcaggtgatcgagatacgcctacacctggtcctcgaccagtacatcgtagtgatctctcaccacctaaaaattcatcttcaggtgatcgagatacgcctacacctggtcctcgaccagtagatcttagcgatcttcaggtgaccagtagattgttgaccagttggttacaacaatctctcgacatctaacgcgacaatcaacattgccgtgatagcgacaaccaagaccgactagatcgccgttgtcaccaggacgacaacgtccaggactaatgacatcggaacgacaacggacaaggttaacgacatcacgacatcacacgacgacgacaaaacttgagatccccatacttctagagggctcgaggatgaggtagtaggtccaggaacggaacctccgactacggtaattcctcattgccttcgtcgtcatcaggaggcagttctcgcaggtcacgagaatgtcatccatctattactctggattcccttcaagtggtcgaggtactactacaactggttctctactagcaacgtagcgatcctcgtaccatgacttctaatggtcgaggtgcgactatgactggtcttccaccagtagcgtagtggtcctcgtaccatgtcttccaaaggtcgagttacgattacaactggtcctcaattagcagtgtagcggtcctcgcacctcaatttcaaacggttgagagactcctactcctggttctcgaaccagtaggtcatagcgatctctcatacctccacttcaagtggtcgagttatgactacaactggtcttcgaccaacggtgtagcgattctcccactacttttgtgatttgttgagtacaactatacacctggcctttgcccagtgtggtggtcgtctcatcatctacatcaacttctgtaagtgtttatatgtgcaatatttgtccgatgatcctcttttcttatatctcctcgtcttcgaagtcggtcctatcgtccctttacactattctgacaagcctccgagaaacctaagggaattttggctagggacgcccagagtagataaggtcttgttggattatgagagccgaacgaccatgtcaaacctggtcatgtaagagtgctcaatggacgcgtattaacaaggccgtgtaatcggaaattgatttttccaacttcacagctgggggctaggatttgtcagcttcagcatggtttgttataagatttaagttgtctctgtggaaaatggctttttcataaaaacaactaggggctaggaatggtaccaaactccgattgctaagggtgactctagcgagagtactcttttatcgtcacatgcagattcaatttattttcgatttttctatacatattatatcatgttacccttgagtgttcgctcgagggctatttctatttaatattctattttgagtattgattttaggaaagttctattcaatattgtcgaagactccgtgtctctacggttctacaccgggattgactaagcgagtatggcaaatgttctgagtattgatttcaggaaaattagacatcaaaataatcaagtcagatttcaaggctctatcgtagattctatgcctactcgattactcgagaacggttgattgggctcgacaaggaatatggaatgaagcgatggtctacccaccgagatggaatttcttgacttcaatccaaattctcgattacagcaagacaagaaacttagtcgcatgctctgtatcttctcggtcgacatcggagattaacctagacaaacctaatatagtgcctacaaaggccgataagaggaatctagctagccttatttctgatcacaccgagaacggtcaagcgatcacgacaatagttgttccaaagtcttcgattgagaaccttaactcgttcatttgcaatgaagtcgggggttactgtcatggttatggataccacatacctaataatagttgactaaactcggcagggtccaccacataccatgtcttatacggaaacaaacctcgtatatagaaggagttccggataaggaagtataaatagagttctatatggaaacgacaaggactactcggattgtatccatatttatctccctagttttacttggataatggggcatctatgggtataaatacaagacccctaggaggagaggggatacaccacaaagccacaagacacacctaccatagacgcacaatacataagccaatatacgccaagacaagtcgccggatatcaacatcagagataagcctagacataccacatcccgtgcctacggaagccggcaagagggatcaagtgccatctctgagctcgatgagttcgtatttcagaaggaagactaccctgtcgtcgactacgagatggttatctagctgccaaatcgacgacaattagataggttatcccaaatattgtatttgtgtgatccagatgaataaagagcaacaccgacttcggccaacaggatgtagggctattacctgtcagataaggagctcgaacctgtataaaaatccttgtctccatctcttttacctcaatctcgcacataccctggtaccaacgatccccaaaccatcaaatactgtagtcgcggtatcaactgtcgatactctccataaaaatatatagtagcaatatagtatcagataaaatatgtcatagtactactaatttatatggacctcatctaaattgatagtgttaagatgtgccttattcaggacgaaggaagtcaagtaaaacaacgatcaaacaaacccttaaaaacgcacgcaacagactaacagggaagaagcaccttgactcgataaaataatataaataaattaaatagttattttgtttagagatgactggattcgaggcatacgtgatcaacaacacaacaccgtctttgaaagcagaaaagaagctggtacttgtttcttcccccaaggtcgcttgagcttatcgggatgcccgaatcggacactcctactggaactccttttcttttttctttttaataacgctcgaagatgagttggattattctcctctccgttcaaaaggccgtagtttcgttcgaattagctgtttggctcagcttattagcgccatgcgaatcagcagagtactaataaattattacgtactattataagtctgaaaacatttattttttcaagggaaaagcctgaattaccctgaattattaggtgactaagaattaccctaaacttgaaaactaaatatctttcactctcaactagtaatatcagataaaaacccctctgagcactgttttggatagttttaacttgaaattgcacacgtaacgccaacgtggcaatccagttagtaaaaaaaatataagagaaatccatggacacacttgtcatctctccctcaagccatcctctcatgtgctctctctctctctgcaatagctgcaatggaggtggcattgtccacggccttggttcgtcgtcgcctcgacggcaccaggggcgcagcggaggtcgagctagctctgggatggcctcaggtgcggttggtctcggcgacggcaaccagctcacaaagcggcggatctattgttcctagccccgggacgaatctgccgttcccagcctcaggtgcggcaggtctcggcggtggtagatctggtgccctcggccctaggaggggtggatccgctgccccaactttgggtgcgacagttctcaatagcggcgacgacgacgttgagtggcatggaaccggcaaggtggcgaagtcggatgcctactcctagctttccgcctctatcgccatcgtcaccaccttgtcaagttgctttctccctccgactcttggtttgcaagtggccgacgatgaccgagatgcgacggaaagtatggagacgacgacctccgccggagtgcgcatgtgatggctaagagagctactgcccgcaacatcctcttcacgcgtcacaactgtcgtcggagtgtgcctccgtctcccaccatgtgccggagtgcgccggcggaggccgaggagaagttatgcggtcgtagaggaggcgcatgccggcggaggctgaggaggacccgcctcccccgctagtcgcccccagctgccttcgccgctctagctcatccgccctgctgttgtgtagtgtcgtcccctgccgatggacagactaggagggaagggtgaagagagagggggtgagagggagagaatatgacatgagggtcccaccatttttataaaaaaaaagtgctgactagattaccacatatagagctaaaaccaactaccacatatagagctaaaaccactccgtattgagttaaaagggttctgcatctagtattaatacttgacggtgaaaattgtctagttttcgtgtttagaaggtaattcgtacttacccaatagttcaggggtaattcagacttttccttttttaaaaaatgaacttctatatacatatatttttaaaaatacatttaaaaatacattgtttagcagtatgagaaatatgcttatgataaacgagaaaataggtgagaaaataatctgtttagaattcagcctcagagaaaaaaaatcatttggtcaggagatcttatttcatgattgataaatgtttttaatgaaataaacacctgtatatatgaatattcgtggatataaagttgatgctttagatttgtcctaccttatgttcttatgttttcttgttgctatgtcatgtgtatcttttaaacgaagttttcaactttcttgtgttcttaatttctatagaaatttaatgagtatgacactttattcttgtgttttttgtttttacaatcttgtgcttcaaaggagctgtatacgagattaggtgtagaaaaaaaatgatgcaacactataaattgtactacgtagcaactactaatatggcatttctacacaaacatgccagcaaactcacgataaaagcatgtgcctactcttcaccagattccgccattaaatttagcgtaaatattatacgaacccacttacatgacgcgcgagtgtgcaagcaatagttcaaaaggaaaaagaaaacttcaaaagttttaaaacatactgtaggagtattaatcattctaaaagcatttcaaatcaaacaacaaacaaaatatttttcatccttatcaagagaacgcaaggacaaataaattagattcctctcatattgccaaattgtccaaaatctggaccatgcatgatgcgaccaccaccccatcagcccatctgatagcgagcgacaagcaggacagatccgcgcggaaaatcccaaactcgcccgcccgcatgggatccaacccccaacctgtgatctcctctactctcttctactccgttctataaaaaattcaatctacataaaaacttattaggatttattattgtacgaagtattccatcatgttattaaccttttatgggtctaatagaaaccaatctagataaagactcatttaaacaattacatttattgtgttagaaagtattttatcatattattgattttctatagatggaggaagtactcccatccagggtttcccaaaccgtcgaggccagggttaccgtgtaaaatttatcaaaaattcaaattattttttaaatttatttaaatttcaggaggttattatggtatttatattaccgtactctatgataaacccgataactatggtaaccgcgcggcagtaaaggaaacctgctcccatctactccacggcctcactcactgctctgctctctctccccgcggttaaacttaaagctactatcgctagcgctttgccttggctaccgtgcctcttgacaaaaaccaaagcccaactactccccagtccccactgctgcaatgtctgctcgtgttctgcggctgttacggtagtttaagagcaagtttaatattatagcctattactggcttcaatttatctatagctaatctaatagctaattgatataatagttgtttactatactattaatatatggtcccacctattatacacactgtgttttgaaatccgtgctgcagctggctacagatctctagcccatttctcttctctctcatcttttatctaattaaaatatatttatagctgactaatagtctgctattatacctgctctaataactttgttttactgctaattataatcaccagtagagagaggggggaggaaactgtgatctctggtctccatcttttagcaatagtacgcataatttataagtaaatattttatatgtatgttatgatttaaatatcaatattgaaaattaaatttatataaattcctttttaaaattcaaaatttgacagcagctgattctaaacgaagcaaatcattggggcctctgaacagagtgacaatagtgtgcaactgttgacgtactagtagaaggagagtagtaccactaccgtggtagcagctgcttaactttgcccaccggccaccgttcaggggccattaatggcgtgcagggccgctgctgctgctgcttgctcttgctcttgctgctgggtggagtgagcgagagatcccatgtggcattggagcgctgtctcctgctgctgcacagtctactctcacctgctccgcctctcccctcgttaattcttggcggctgtgtggcgaggaagaagaagcggtgatggcatgctgatgggctgcgggttcttggatgcatttgggtggatatgcggacatggtggtgagttcgctgcctctcgcgcttctctgagcctgtattgattttagaaatttcttgtatttcgttctaactctagatggcattgatgctctgcttgcttggttcttgttatcttcttgtactctgtgtatgtgtgtgtgtgagagagatatttgaactgaagattctgcagtttcagattttctttggcctgtttctctctctcccccgagcggtagccattctctctttcttgttcttctgccaatttccagctgtttccagtagctggaaacttcgaattgcttaaagttcagttgtttgcttgctatgacttcgtttccccttcaagtttcactgcatttcctttccagtttttccttcaaagctcggatttgtttcttgcctcttcagcattcttttttccggcctcgattttgtataaagccgtttgtttgtgtcaaaatgttcaccaatatgcctttctcatgagcctcatctgttcggtttactgtacatatgctcttaatggtctgtcaatagtctgtccagaatgtcattttctatgtcgggaccgtacagatttttaaggctgcagcttccatattttttaatttgaacaaatgacaactactgccttgttttttctgttcaatctggagtaaaacttgttcgcgatgttcttgcatccggtctccaaattgtttttttttttttggtttttggaaataagtatgattcagtcccgtggcattcacatcttgcttctccttagtttcttcattgatttgggctgtaaatttaatctttttcctttgcaggaagctgtaatttgagagcgatgggagcatcttcttagggatcctcttccactggctagcctacagctgtttttctccttcattggtactccaatcttggctggaattttgaatcttttgtccgggaagtgataaaatttagaaagacaacacaaccattggcacttcttacagttgtgagcgctaagctgagcctccaatggcgtggcattttactgcggctttcatgatcgcaacctgtttgatgttattcccaagaagcgagcagtcctcgcagggtgaggtgctgcagcagctaaggaagcagctggagtacccaaggcagctggatgtatggaataacccaaacagtgacccctgctacacccagcctacttcggtggtcaccgtggcatgcgaggggaacgccattacagagcttaagattatcggtgacaggatcaccaagccaccaaagttcagtggctatcctgtctccaatatcaccctctctgaagcctttgttctcgattcgtttgttactacattggcaaggttacctgccttgcacgttgttatcctagtatccttggggctatggggtcctcttcctgacaagattcaccggctgtcatctcttcaagtgcttgatttgagctccaatttcctttatggatcgattcctccgaagctgtcagccatgccaaagttgcacaccttgacattggatgggaacttcttcaatggtaccatgccggactggttcaacttgtactcgaacctcacggttcttcgcttgcagcgtaaccggttgaaggggcccataccagcatcaattggtaaagctaccatgcttagtgagcttgctcttgctggcaacagcatcgctggcgaggttccacaattaggcagcttgaataagcttgagatgctggacttgagggacaatgagttggatggggagctcccagagctgcctacagcattggtaacaatcctactcagcaaaaactcactcaagggcgaaatccctgagcagtttggtcagttgaaccgacttcagcacctcgatctctcattcaactttctcgtggggaagcctcctgaaaagctcttcgctcttccaagcatcagctatctcaacctagctgcgaatatgctcagtggatcattttctactagtttaacatgcagcagtacccttggctttgtggatttgtctacaaaccaactcacaggtgacctgcctgtctgtcttaatgttaatgtcaataacagggtagttaagtttgatggtaattgcttcagtgacgaccctgaacaccagcatgaaactaagtattgtcaacaacctcacaaggggagaggatcaaacaaggatgttggacttgtggtcactgttgttggggtggtgtttattgtgcttgtgctttctcttatattaatggcttcaaacagaagaagctgtcagagagttttagcagaacaacagttacttcaaaagcaaatgcaagataattcgacatcaggaatgtcaactgaactgctagtaaatgcaagtaagtcttcttctgaagaaattttgctagtaaatgcctagtttcttatgatatatggaatgatgtgctagatgtggatcatgtgtgcatcactgcatcccatgttttgagatccatccagccgattgtttgtcatagtcacagatagatacatcatacatgtagactatcctaatggtagatgatggtattggaatgaactccaaaatttatttccctgaataataaacaagagataattgtatttcctcctattgaaattctcctctccctcacttcattgcagggtacatatctcaagctgtaaaattagggacacaaataatgcccatgtatcgagcattttctttggaagagctcaaggaagcaacaaaaagctttgagaggtcggcatttttaggcgaggggtcaattggaaaggtctgttgccatcttcaacatctgtctgatactccgatttagttaggaatttaccgtatacatgagataataattgtactgcttttaacctgttaacagtattataattactccattttattagctctgcaagctagatagtttctgacaatttttcctcatactattttaatgtggcattttccttactcctttcctttgttttcagctgtacaagggaaaactagagaatggaaccctgattgccataagatgtttggcattgcaccaacgatactcaataaggaatctaaaacttcgattagatctactggcgaagcttcgtcacccaaatttggtttgcctcttggggcactgtattgatggcgaagttgatgaatcaagtgtgaaaagggttttccttgtctatgaatatgtacctagtggaacgtttccttcatatctttctggtaaggaactaaaaataaaatgaggaattaaagtcgtacgaagtgatagcaatcgaatttgtaacttgtggttcgtgaatgcctttgctgtggtaggctctagtccagagaagactctgaactggtgtgagaggctccaagtgctgatgaacattgctaaggctgtgcatttcttacatactggaataattcctggttccttatataaccggttaaagccttctagtattttacttgatgaacaccttgtggcaaaactgagtgactatgggctatccataattacggaggagatatacaaacatgaggttggtttgccatatcatagaatgatcctactcctcttcccctgtatttaaaggagtctcaattatagaccattctttattttaatgcccttattcctattggtttacactttacaggcagcaggagaagggcagagatgtgtagaagacaatggtggagaattgtaagtacctgcagaacttgtagcaaagtatttcttacacaaagttgcatacaactaataaatgatcagacatgctgaaagtctaatataatttatgtttttagggaaaatttggaggatgatgtgctttcttttggaggtattttacttgaagtacttatggggccaaaacgtcataggaaagatctctctgtgctaagtgagctggtatgttccattttgtcttttgcgtaaagataattaatcaaatatccagatgatagttataataatgatacttcgatcaatatcacggtgatacatagctcgagcgctgtctggactgggctaatttcatgttgtattaagctatctatcaactcaatacagatattttgttggttgggtatgaccgtataactttcgtcctcattgtgctctgcaatccatgatatcataagctgaattatgacaccacacactaataagttctgagtatgaaatgtatgtttcaagcacttctgcttccctgcattagcccaacaaagagcattacatgcacaaatattaggagcaatgttgcttgcagagtaagaactacaaattttaatatccggattaatttggcatgataaaacttcaactgataggatccttagctctctaaaaccctacatgactcatatgctctgatcataccagaacaatcaaaattttacctgtatctgcaggttctgtcaatatcaaaacaggaagagcgcgagcaagttcttgatccggttgtgctgagcacctcttcgcaagattctttgtcgatggtgatttccattactgtcaaatgtttatcagttgaatcttcagccaggccttcgatcgaagaggttctctggaatctgcagtacgctgcacaagtccaggcaatatctgatggggaccagagatcagaagtttcctcgcagacctgttaggctaactgaacataaaacaccttggaggttattgtccatatctgggaaaagacggcgccgcacgtgcaagctaatttgatcttggtgtgcagaagagaatgaccaaactgactgatctcttcctgggagtaatcctgcatttgctgctacttcaacagcatttctgacacatcaacaagttaattaacatgtcaaatgctgtatgctaaacacagatatggtcacgttacgtcctgtaaagagttttttttttctcgattctagcttcccattgctgtgaaagcatccctatgagcagttcttgatttccaaacttccaatcgttgtattagggcattctcatataattaagtagtaggacgagtgatgtgatagcaaaattgatgagttgatagagaagggtatcccatgttagtgtagtaatgagaagatgtaattcatttgccacatgactcgtgctagtgcagaccaaagtgaatatgctccaaaactaaatttgggtaataaaatatggcctaaattctaatttactttaggattcaatgatgcaataatattaattccatttgttataaaactggtccgaaatcactatcgaaaaccaaacacgaaagaaacgtcataggtaattcaaacacgatgatcgcattgaagtacgatatttgttaacgagatttaaccgaagcctacatccctggagtgcttcttcccatccagcatttacagcgtattagagttataacaactatcgatcgaacgccgttggcagccgctccctctcactatgcgaactctaacaaactcctccttagcgaatatgccacgccaacatgaatttgttatttgctcgaacctccgtgtgccagaacttgagttggttcttccaccgctcatgctgagttggcccgacaagccttcaccaggatcaccacaacaagagactcccgctatccctgtaacttcttcctcttgattgcacctgcaacagtgttccaccctctcttatatcaccacaatcgtcttgctaagtgaaattgaatttctttctacctgttacatcatagactcctcaaaaatcatgttcaactacatctactgttttaaatttgacttgttctaatccatggccagataacacgcattgttaccaaatagaaaaatcaaactcactagacatgaagagaaccttttcttctttgatgtcttacgaaccgagctaattaacaaatccaatatccacgcttctacatagaaagtctcatgtaatatgttgccagaagttgtttctattgaaatctggagtcactgactccaaatcaacaaaacatcttatgttgaatcccatatgagtactaagatcctttcgtgtgagatagtattccgtcccgaagaatcggaacgtaataccttcccacacgtatcgcaacatacagagaaatcgtacggtaagaaaacgtgaaccagagtcatctactagcgcgaaatcatcccaacatattgctttccacacagtagcagaatcaacattcatacctattttagcaagcagctccgggtcgtatgctcgcgtatgagcgaacacttgatccctgagaaggttgtaggcctgcatcaactgatctttttacaagtacagctcggagtcgggacaaaacgtcaagccttgatcctcatgcattgacacttggccataagattctgcatgtccttcactcggcacatcctctttggacgagcacgcactcgagctgtaggaatggtggtgtgagctcgatactgataggaactataaaatggaaggtggactgctgaagtataaaggaaggatatatgcaggtaaaacatcttaaaccaactactaagggcataccactcctcctttggggccattatggaatgagggccacttgccatagaatcaaaatgtttttttactagcctggtctcaagagggatgctgacaaaatggttagggaatatcgtatgccaagcgactaaagaagaacacaagttcatattccaggactcctcaatccttttgatatagttgacatggcttggtcacacattaccatgaatttcattataggctaccaaaatccagaggaaaggatgtgatatcggtggtggttaacagattgactaagtatgctcactttttggccttgtttcatcattattcagtggagcaggtggtggatatctttatatggatatataacatccacaaactacatgggatgccaatgggtatcataattgatggtgacaagatattcactagctgtatatttcaggaagtatttcaaatcaatgaatatgcagctgagattcaacgaaaaaaatttggaaaaatattcttctttttaaaaatttgtgtttatatacctgtatgggagggtttagcacaaatatacctaatttgcagattggaaacgcgggaccacaaagcaagcgcgacatggacatgcgggaacggcggatgcttcggtgccgcggagtgaaaacgcggaatagcctcggtcccgtggagcagaagagcggaaccacattgctccggcggccctgtcctgcggcagcgtggtagagagcggcgtcgtgcgggatagcctcgctcccgcggaaccgtggtgcgccaccgacgcggttcagcgtcccgaatgcgcgccatctttccggtcccgctgctccgcacctcggaagagcagcgccgctttggccggcatcgttaattagctcacaaattttttttcattgcttgttggagataaatccggaaacaaaatattaaactaagcttaggctctgtttgtttcaacttaagattattgtaatccagattattaaatcagattactctaagctggattataataagctgatatagaataagttgcgagttgtttgtttctctagattactagagacatctaagggtagtgggtctttagccactcaataatctagaaaaagctcctccataggagattattagattatactaatctggcttatagattataataatctactggtttgtttcggcttactcataataatccagattataataattttaagctgaatcaaacagggttaatcacatcaacaaattaagttaccaacggaggttcattagccagtataatattttcttattagttgttggagattaatccggaagcagaagagtaaaaaaaaaagcctaatcacatcaacaaagtaagttgcttttttttacggttgtgacctctaatccagaacgcaatgccgctcgtgctggtgcgttcccgcactactatgccgcgggaccgacgacctgccggccaattgcgtagagattgattcacggtcccgcatgatggttatgcgggaaagggagcggtgcctcacgacgggaccagatcggtgccgcatatccgggatgcagaaccgcgtcggtagcgcaccacggttccgtgggagcaaatcggtcccactctccgccacgttgccacaggatagggccgcgggaacgatacggtcccgctcttctgctctgcaggatcgggcctattccgcgtttccgctgcgcggcaccgaagcagccgccgttcctgcatgtccacgccgcacttgctttgcggtcccgtgtttccgaaccgcggattagatatatttctgctaaactctccaatgtagatatataaacacaaattattaaaaaaagagtgtatttccaaaatttttttcgagattcaatacaggtcacctccatgaaacaaattgttagacagaaagagtgaatcaatgtctttgagtcctatatgagaaatatgaccttccaagagccccaacattggtatttatggtcggcgttggctgagtggtaatataccacatatcatacaactatcgagatgaccctattcaaagcattatataggtacacccattcaattgggtgggtttaatatattttaatgagtctagtgtcttgcatcaaattacgatatttttagagtgtcctcaagaaaatttctttgtggtgtcccacagctaattacgcatttgagtgtcttggagcaaatttggtgtaatatataatatccacccaactgatgagagataaatcacataaaatggcagttttgcccttatcttcttctcccttctcatagtcttcttccgacgctcactcgcagtgagctccattggcttgtccattgtgaacaaccgctcggtgcagtcgatggcgcggttgcacatcatgccacaggcgccagtgagattgggcatcgccaagccggcgtgcatggtgaggtggtgcgctatggtgctgccgtccgagtcaccggtgacgaacacgcggccgaagtcagcagcctcggtgagccagccatcagcattgtccaaggtgtgttccctaatccagtggaggaaacccgtcgcatcgtcaactgcggtgggaggcggtgcttgagggcgaggcggtacctgatggagaacacgacggcactggcatccctcacgtggtcgtctggccggggcacggccaccacggtggtgcgagtgcaagtggctccggcagctgcgccgcctccgcggtcgcctatggtgttcggcgtccggtagcggtggcctcgacatgttgcatgaccatgctgagcaactatctaccatgggcaagccggtggagctcactgcgagtgagagtcagaagaagaccgagagaagggagaagataaagggaaatttgtcattttatatggtttctctctcatcaaattggtggatactatattttaatgcgtccactatactacagaaaattaccacacttttagagtgtccttggcaaattgatgtctttgtgatgtcccatagctaattgcaatttttttaaatgttttataccaaattttgcctacctaaaattgcagccctacaggcgtacatcatttggtatcaggggctctcttaagctgagattaaaattttatggccctttcacaattactaggaagattggacaggctgcttagagactccaacttcaaagggctccaatatacatcctatttttcatgtcagccaactgaaaaaacacttgggagctcatgcagttccaatggccaatctgctatctgttagaccagacggctggatcaaaactgaaccagttgttgtattgcaaaggaggatggtgctagaaggggagaagctgtgactcaatggttgaatctttggtaaatttatcaccggctgaaccaccctgggaagataccactgtgatccgaagtatgtttctacctttcaatccttgaggacaaggattgtctcgaggggaaggtaatgtcggaatctggagatgagaaatggactgaatatgttctgaatttatgaatctctgaggatgcttaagccaattgaagagaagaggataaggaaacaattcaggagcggattatgaagatcggacgactggtaatagacgaggcatattagttttgcatctgggagcttgctcgttgtcaggaaccactgtttacatttcattttgtcgcttctctgttttcctctgcttttaagctagctctcgtgtggaaccaagggtagatactgaatgtactataaattgagatgccttatggccaaggaatggatatgaacaaacttatgattatcttttatttcaaagtaacttagcttttgagccttttgtgtcttgcgtcatacactaaatttcatgcagtgggggatggcaagcagcagcggacggacgtgggtgacaacgagccatggtggacaattggagctggatctgaactgagggttgctagacgttgagccggcggcggctagctaggatttttaggattttactcccttgctcttgctccggtacaatatcaatatacagggaggagaaattgggaatttaacttttcctggagtttaatcctaaatggcatatcaattatatacactagtgatagaaagttactttaatacttttcatacaaactatctcatatatacccttaacatacacaatgctagacaactgcagtcttgtttctacgtgtggattgaatagaagccgtgatgcccaaaatatatgaaaccctaaaccatttgcaattttgatcatcatatacatctttgcaacattttctgcaaaacgtttatataaataaataaataaataaataaatgcaatagaacaaatcaattcctgatgttcccattcaacaagaaaatataaagccgtgatggtcagaacatgtgcaaaatcttacaaagagggaaagttaaacttgatacaaaactgagagcacacatgcatgcccagaaaggtgagtcgaccatgagtgtgtatataatcccttttgttcgcatcaatggcgcgataggtgaaagcgaggacggttcgtgaacttccgtccgttagctttgacataacgcgtgatgccaaagcaaaaaccagaccatagtagtgacagcaccaaatggaaaacatcattacgtgctgcaaggaaatgaatcaagttagtatgacaaagcatgaagaaggatcaaattaaacttgttggagtgaatttggcctagtgacttggttatgtatttgtttccacatagtaatatgttggctgcaaacaactcgtcaagtttacaacagttgagtgcctctaatctgcataaattaacttaaatcattgccatttcggtaggatgaaatagtacctcttctcagtgacattatcaagaatatcacggcagccaaaagcagagcaaaagcaaggcggaaggactgcaaatgaaaactcaagtaagttctccactaaaatatcctaatttaaatatggaaaaatattgtaggatcgtaaagggcctttcccaccccaaaagctagccattgaggtgaggggctcccccacttatatcttaagtccctcagcctttcaccgtgtatagaccccacagaacaggcccacggtccattaggtatacgggccccgcaggcacccacggtccatcaaaccttcacatactgtgtccatcgggccagagatgttaacctagccaggctctgataccaattgtaagaccgtaaagggcctttcccaccccaaaagctagccattgaggtgaggggctcccccacttatatcttaggtccttccacaaccaatgtgggactattcaacaaatatctccactaagatatgcataacgacattcaaatgcccatgtaactctatcaacacgaaagaactaaattgagggaatacatcaggggtggaaatcttcgcaggtaattacactgctggttaccggccaggagctccaaaccagttactggtatttccggtcagaacattatgagctgtatattttttgcagcattaagtgtgataaatactaagtcattaaaaaaaagcacgcattatccatgccataagttttaatacaaaattttccatcaaaaactggttcatggtcggttacggctggtaaatggtttgtgaattaaaaaaaatggatatagtggttttccagaaagactggtattcaaaaccttggtatggatcatagcatcaccgctgtcaacttatcctagtaagtagatggaaacatcaaaattatgcatagaaattcattgtaaattgcaatccttttaagcatgagaattcagaaccaagagtaagaacaataaatgcaattcacggtatgcaacttaaggattattcatctgtaaaaaaaaatctcaagtaatagaaagaaaataaccaaccgcgtgattctctataagtcctttggttggagttggcatatcccgactaactgaggatatgtgatgtccttgaagaagatccatggcatcctatacaagacaataaacaaataatgagttatcactatgccttgatccatcattaccaacgtaagggatcttttcttcactcgtccatgatgtcttggataaaatagcaaacctaaaatagcaaaatccaactcactccagcccatcaatggtgagaccaagtaagcaacatacctgtttagtaccatctgcaaagttgttcaggtaatatctagccattgcattccacagatcatttaaaattccctgtgtagttcgctttccgtacctaataaataaataagatatagttaggttaagaacaacaaataactaattaatcattatttgtttctaaagatccaacaaccaaaagaagaaatagatcatagacagcggattaatagaggaaaaagtgaaaacatgtggcaatgccattggcagaacgatagtattattttgcaccttatgtgatcatgtagtttgtcagtaatttaattataatactgcactctcatgcattagaactgtgtcaacatcttaggtgtcagctcagtcctgatactgggaagtaagcaactaaacataatccaacaagtaatttttctgatggtgacgagaagataacttttcacagcgagcaagaaataaatcagtttaaaagttgccattataaaggtttaactattgaggagattcacaacatgaaactagagaaaatgtttagcaggctaggtgttaaaggatcttacaagttacaaaacctttgcttcataaggaaacattagcaactcagcttaaacgtgcttatggttgcaatcaaatcattacttctttttctgaaattagtaggtccaaattgtgcaaaggaaaaggggctaaataagagaattcacaaaaacttgaaaacacaaattaccgcacaaagtctcccttcaaggcaggagttccagagtactgagtgcttattgcatcgccatggttggcccacactgaaaaagaagtcagcaattgtttaggaccagcaacattgtgagacaaatgtgggggacatactaacaaacatgtttagtgaatatcatatgcaacacttacaaactttgtaatctgcatcaaatgccggataatcgctgattgtattgttgtcaccaagaacactgattttttgcagttggctttccaatatttttctcccgatcatgctctgttttgtgtattaaggagactattgtagttacatacacattaaaaaaatggagaaggccaaagaaacaaagtaattgctcgagaaagacataaggatccccacacaactacaaatactttgaatgtaatattctagcccagtagttgctacttgctagtgatgtaacccatggtgtggtttggtgagattagttccacatggagcattgttgacgcccgtaaaatgctaaaagtgatattttgtactccttaaatacttatgaataaatgaggtattgataaatgctgtatttattttggcactaaccttaatgtatccacgagttttggtgtgtcaacaagtttttggcggtaagccggtaataagtgcatcaacatattcaagcaaaatcaggaagttcaaaaaaaatgcaagaacaatgccaggcaacgtatgcaacggcccaaccagcctagccaaccaagggatgcagtccggccggtcccaaaccaa

SEQ ID NO: 10014 - DNA, 11594 bp, Oryza sativa
  unsure (1)..(11594): unsure at all n locations
gctcgcccaaccgcaataaatgtggttaggtgagccccgctatgctcacctaccccatatacgcggcgcaaaacccacaaggggtcggggcgcctcggccctcggggccgagacgggagcggtccaacccctcggggagataaagagaagggcggtcgtatcaccctcgggcccgacccccccccccgagggggttaggccacgtgggtgatcgtgtctgcctcaagtctctaagtcatgatactcccggtcccatgtcaccgacaaacaggcggataaaacctttttgaccggggtgatgggtggttctgtgtgaacctggttaggtggtaatgtatctgtgtgatcgttgccgggtacggtctctgtgtgagcctactgttgagctgtgtgctattgtagtttggcaagttgtcttggtcaattaaggacttcacttcataagtcatggatctgagcctaacgtgcaaccacatgttctcatgggaagaacctggcccagtaggattccgagtcttggcactgtcggcccaggtggctagatgataggagtttaggttcgccatggggactttcttgtctgtgtgagggaaaggtgtctcatgggggaaggcagtgttgggacgaagtttctaaaaagccttgttacagactccttggccacacacaacctgaagtgtgacacttgcgcatggccgttaaaaggacgatgtatcttgtgggtcaagctgcacaacctttgcagagtgttaattaatctattcgaatagtcgcgtccgcggtcatggacatgctcggtgatatctcatgaggggtagttgtgaaaactgggaatgaactgtgtgcaggttaatgaatatagctatgtggtcctgtgtggacgaatcctgtgtgaatggatagttggtaatactgttatttacaactattgttttaaacctgtttataaattgtttataactgcaaattgttgtgttatgcaaaatagccattttctttgttgtcagcttgcatatgcatatttctgtgtgcttgctgagtattccatgtactcaccttgcaatttcccccaattccagaagaaaggttcccgctgtttcctgaggagtttgttgctgaagacgaggaataggtcgtgagtcctagttgactgcctgtggcaagttgaatggagctactacgcatttatcttatttccgctgctactttaatattttccttaggcccttcgtggcagaataaatgtaaactttagccataaggtttatcacagtcattattaatattaaatattaggtttcctttgtgatattggctgtgatattatctttgtgtctgtgtgtgctagcttgatcctggactagcacttatacacaggaggtcctattttgggtcctcacacgccgtcagccgctccacccgcgatgcccagcagaacggcgccgaccctcctcgctcggtcgccgagcgccggctccctcctcgcaccggccaccgacgtcctggatggtcacatacgggttggagccctgcctcctttcccggtcgccgagtgcgccttcctcctcgcctggccgccaccgccgacgtcctcgatggtcacatccgggtcggagccctccctcctcgcccggtcgatgagcgccgcctccctcctcgcccggtcgacgagtgccgcctccctcctcgtccggcgacgagcgctgcctccctccttgcccggccgccgcgcgccgncttcctgctcgcccggccgcctcgagcggcccctcctctcgcccggccgccgcgcgccgcctccctcctctcctggccaccgcaagctacccgtcctcgcctggccgtcgcgtgcctctctgcccaccgccccccgctgcgccgccgctcaccgttctgtaagggagagagaggggggatagagagtagaggaaaaaaaattgaaaatatacctctttttcattggttttgtacaaatacgctcatttagaaaatatttacagaaatataccattgtcgtgaaatgaaagcgcgaaatcgtgcgttactgcacgatgtcgcgcgaggtgtgcgcgaaaccgctcggtctcgcaccgcgacttcgcttacctaacccgcgtactctcgctatcaataaattaattagtgtaattagcaattaattaattacaattactcctttaactaacatcattagtaattaattaatcgttaatcacccgttaatcgtccactgatcatgagtcatatcaggccatctcgcaaggtgatgaagcgagaccgccggtctcgcgacctgctgttgcgataccgtggcggatgcggcggaatcgcgccatgattctgcgagaccgtgacgaagtgtcccgttgtcgtcattttcgcttaacggcttagcgatatattagcgatatatcgtttcgatttcgctctttcaatcagcgacgacgatatatttgtgctaaaaattttacatctcgaatatttataaaataaataaataaataatatactttcaaatttaattcgagagtagagggggctgacatgtgggaccacatatgccccaccttttcttattatttttgtgtagctgacttgtgggtcccacattttttattatttcctgagatccaattgccacgtaagcgccacgtcaatgccacgtgggacgaggaccaagacaaagggagccacgtaggcgccacgtcatccaaaaccgggcacaatactgctgagagacctcttttgcacggttttgtaagttgagggacccgtcatacctggttttgcgaccgagggatgaaaatcggactggacgacaaatagagggaccaaatgtgaacttattccattttaaaaaacgagccaagcgtgctagtcacaactttttatttccagcctagtcaccatctaagctaccgggccggagcccatggcacaaaactaggcacgtgtttaagcctagcccagaaagcatagcacattagcacacgagcatagtcatactagtactagcaggtacgagacgcggaagaaaattacacaagactgagggtccctacagtcctccgaaagacctcgtccctctacatatgacacctgtccactacgaatctcaaagtaggcagcctctgtcttcttcctatctccccaatctcctgtgttctgccgttcttcctcaacacgaccaagtagagcttacgcacgaccaacgcacgcggtggcggccgccggtgtcgagcggcaacactcacccagccaattgacaattcgatggtgactaatggtgaacacttagattttgctcgttgctttcaatctccattactgctaagtgctaattattaatggtgattgaatttatccgagcatttgatgattcttttggacagtgaaccttggaaaatcacatcgttgtctgctttctcatcaagaggcttggtgtacatcaactcccgaatacatattgtggagcggaccaacggagttcacacgctacagcaaacatgatgcaagccgactggcagcggcagttgagcacgatgtcatcgtcgcactctcccgacagtcatccatgagcccgaagccactcgccgtcgcgcccgctttggtcgggttcgagggatgcctcaccgagcggaggaagaagaatggggattagaggggagagaggttgtctctttgagattcgtaatggacacttgtcacgtaaggggacgaagtcctttagatgagtgtaggacttcagtcctatgtaattttcttccacgagacgctccaactgtccaagcagaagtcgtcttctcgcgagaaaaacactgaaaaactgatgacgcgagtacactcgtcgagcggttagcgacggagccctgcagcgtcgacacgcgttccaccacgcaccccacggacgtgtcggccgccagaagctccggctcgcctgtatttagcacgtacgacgacgagcgatcccactcctaacacagtacagcgacgacgacagattaaccgagagcgatcgatcaaccaaatcagaatcagggcaagaaacaatggcgcagctggtggacaaggcgaaggggttcgtggcggacaaggtggcgcgggtggagaagccggaggcggagctggccgagctgtcgttccagagcgtgggccgcggcggcgccaccctcgcggggcgcgtggacgtgcgcaacccctactcccactccatcccgatctgcgaggtgagctactcgctgaagagcgccgggagggaggtggcgtcggggacgatgcccgacccggggtcgctcaccgccggcgacaccacgcggctggacatcccggtgaaggtgccgtacgacttcctggtgagcctcgccagggacgccggcagggactgggacatcgactacgagatgagggtcggcctcaccgtcgacctccccatcctcggcaacttcaccctgccgctcaccaagtccggcgagctcaagctccccaccctctccgacgtcttctaaatcggcatcgtgcacacgtacgggccgagtgtacgagaacttgtgtatttccagacttctggagtaataataaagaacacgagtggttggttaatcgcgaatcgtatgcgcggtgtctgtaacgtacgtttatgtgtggacgttatgctacggcgccatatgtccatatgcgtgccgacgcgcgggccgggggccataggcggctaaatcaagtaattagtcaaccgcggcgatttggtgagatcgctccttaaaggctcgcgccatattgcccacatgcgttccaccaggccacgaggctcacgagcaaacgacgcgcccggcaacggcacgatcgcccatgagcgcgctcgccctgccgtgctgcggtgtacccatgccgctcatgcgattgggatttgagagaggttcggagttatttagaggagctcaatattatgagaaaagctgttatttgagaagctgttagcctctagttttaagaggatctggaaaagccggattgtacttccttcttcacagattgatcattatatgatagaatttaaattttttcacagattaatcattatatgatagaatttaaatttttttaaattgatcatcatgtaaccatattgaaaacggattttatcgaaatataattaatggacacgaattttattgtaatacaattaatacatcataggagaatatatatatatgtgctaggatgtataattggcatggtgttttatcgatttttttaggatgtataattggcatggtgttttatcgatttttttaggagaatgtgtgtatggtgtcttagttaatgcgatttaaattattattggtcttagtgaataaatatatatgatgatcgttttggacggagtaagtattaactaaactttttcagcttttgtcttttaattctacattttataactgtcgcttctcaactgacaggagctcctctaaatatgccatatgttttcgaaattccaaatattttttctgcaaacaaagtagaaaaataaacgcttacaacacacacgctcgcgcacttatgtttataaatgcacatcatatcgctatgtgcactttcgaaagattagacaatcctattttaagattaacgaacatagacaaagttatcacaatcgactgttaaaaaaataactaatcgtaaataggaacactcatattattaaataggggctcatgttaaatccgaccaatcactgagcaagttctatcataagaaatctaaccatttaagcacttgagttacgctcgattataatatataaaaagtaaaacttttactctaaaataaaataaattcaccttttgtaaaaataaacttaatgtgagattagagtagttgatatttaagtttgaagtattttagaaattacggatggtcagaagtttaattatttaattaatctcaaactcgtactaagcgttacaagtacggaaccggagggtagtaggatgaacatttattaattagtgtttattattgtctattgatggtaaatattgcactaaaaaaaagagaagtatgttcctaacctgagcattgaaatttcgtaatataataagaaaactaattgtaaaatttcaaatttatctggcattttactttccggtcataatggaagttcgaaaataatttgaactttctaagtatatttgcacgctttgcgtttcatgcaagggcacccaataaccttaaaatctattttttctctttcaagtacagaaaacttactttgttgcatgtttatactcatttcaaattataatcagttggaatttgaaaccaaaagtttcggttgcgttgatagtctccgtaggtactagtaatacgcgaaacggtggggctgggagcacttttatagcactgtaaaagaactcacacatctttatcgtttcattagtttttttactaatcatgtccgcagagcaaaactagagaggcagcggaaaatttaattatttgctacttttccgtttggtaattagccaaatacctttttaggtttacacttatgaatttaccattggagagagaagcttttgtaattttttttcactttttttcactgtagagtgccacggccggtacatgtgcatgccaacatggaacctacgcaaaaaaatgactaatctacccatgctagctagcaaacatgtgcatcttagtcataattcattaactggagaaataacgagagaaatcggcaacctgtccaatcttcccattttaaatttgcaaggcgacaagatcaatggcaccattccggttacatcagttcattaacttttttaatcaagctaaatctctgtagcaccatgccaacaatgccagccaaattaaataccgctcttaatcttagtcacaaccatccagtggatctatttcttcaaatattgattcgttgtccgacttggaggtacttgatctttcatacaaggaccaccaattgagcaggttgtcgctcgaatcttcaatggccacctcataaacagtgaacaacatccatacctctgccatagattttgcgaaagcaattttatcctaataccgttcctgattcagcctataccacaaccaattgctagcagggtagattggtcatttcatgtgcctgtccatgctggcatgcatgtgtggtgctacacagtgcagaaagtggtaaaatattacaaaatcttctctctccaatggtaaattcttaagtgcaaacctaaaaaagatatttaactaatcatcaaacgtaaaaatgttaaatagttaaattaccaggcaacaactatgataagcaaaggtaaaatctaaaccgataacactttcggtttagtcttaattaaagagcgacggacacatacgtaagagaactactaatacacgtctatcatgtctagttgctaccagtacacccaacaatgcatgcctttctttcttcttatagaattctcttttaaattacttatccgatctataattcgattacactattatattcattgcaattaaatctttataacaaaatcttacaagactatattatgatgaaaaatatttatgttgtaaattactattattatatatattagttatttttatcatatatatatatatatatatatatatatatatatatatatatatatatatatatatatatatattatattttattaaactactttttagatattcagtgcatgatcagtgtactttataggttagttttataatatgttgattaaatttaatttctagatagacttatgtttttatcccccataatagatttacttttgatgtcgtgacaagttacttttataatatatgtaaattttttataatatatgtaaattatttttaggttttattgaatttaattttatatgaccaagaagtaatttaataaaatctaaaagttatttagatatattataaaagtaatttgtaacttttcataaaaaatataataatgtaagatcttgttataaaaatttaattgttacgaacacaatgatgtaatcggatcgtaaatcagatgagtaatttaagagaaaactttataagatgaaaaataaacatacactgttaagtgtactagtagtaacctgatcgctggttatgacaatctaacatacaacaccatcttaatcatgtccataaataaaagaacaagactatatagctagtggccatctatgagagcaaaaataaccccagtaccccacacgaaacccacgtgccttcagtatctctccgccacccgacagagtccactctccactgtccatagctgccttcgcctgagttcgactaggatacatttgcaccatatagtatcattcaccaactcgaatcaacacacactagacacgcatctaatttgcacttaagtaatccgatcggtatctgcatgcgcctgatctccacgttgcgctgcatgaaacgcgtgacgtgaacaggccagctacccgggatctctcatgacgatcgacaggtcaggtcggatccgtattaatcttcgctccaaatatttaccagttgtaggggtaggtttcccactgcatgtcaaatatatatgtcattgctgacacgatctaattaatttgtccatgtcacgctaaactaaacaagcgtctgcgatttttacggcgaaatttggagtaattaagtaaaaacattttggcttgttgctataatgcatcgagctcaatctcaaagtttcagagtcctgtcagttatcaccacgaggggttagttagctgtccatgtttgcacgcgtcccgactgatcattaaaaaaatatttcttgttaaagatggaaagggaagcaagtatagtaatgacctggaatctgattgccttgcttgatttggagatgtcgagtcagcatggtctcatggattattcccggacaagtgaagatcagatctgatgtgaactcttcttttcgaacaaaacgatgggaactggcctgctaccactatttttttcctggaatgggacgatatgagtctcagctggcgctccattatttgctagaacagtgatcgatgcgatcacagcttgggctacgggctccaaccatgtcaccaaccaaatactgcctccgtcccatcccaaaataagtagagccgtaggtgcagaacgttcaaacgttaaacacaaacaatacaaatctacacttatttattttagaatagagaaagtagtactcaacaataagagaaaaacgatctttttttaaaaaaaagctaaattgattatttgtctgatgattgtttggacacctagaaattatccatatgaaatctaattgcgtcgttgatgccactacattttattcgtaagataacctagttatgcttctaaactagctcacaaccaatgaacaaagcctataatattacaagctttaacttttaagggtgatggatcgagcgcgtgaagtacgagtaactgtccacctttgcatggaaggtggcaccactgagcatcccaacctcatcgataaccagtaaggggaagttttatagtggatgtgaaatttagttcacatcatcaactcattaattataagagacaatatatataaaacaaattacctctaacacatttgccccaatacatcatattaatttactttatttgtttcctatcaattcattggtctcttgttctcatctctcttggagtttgtgtagagattgccccttgcatgagaggtggcaccttctctcacacctttcatatatctcttccacgtcatcacgtgagcttacatggaacctgaggacaagtgtgtagaggcttataatacttgccctaagaacgtcactgctcttttcaagcggcgaatcttctctttcattggtcaattcgctaagccaaagcctcattaccaccgctttgtgagataaccttttaccctcgcttccttttcttctctcctgacctataatattagttagtcttcgttgcctcgccatgtccccttttgcccaacttttcttcacacttgaccggagatggacttttttttccctcgaggggacatccactcgttttgtacataacgtttaaaatatcatcaaaaaaatttgtcaataattgttaatatagatcattatatgatatatctttgcacaaacatgcaagttaaattttgacctataaaatttgaaacaaaaataacaaatttgaccatgaattacgtatttcatagtcaaatttgatatttttgtttctacttgtataagttgaatttgaacatgtatgtttatggagtgatatatcacatactgatctatcttacttttttttcaaattttttgatgactttttaagagatatgtaaaaatgagaggatatcctcttaagggatgattagagtttccccacttgacctatgcccacaacttctttttcttctcccttgaccttaccccttttgcctttcccttaacctctggacaactagatccaatcatcataaatttctctttgttggaaaacaacatagagtagagctaacggtgaggacaattctcatcatgtcaagtcgaagaggatttgaaaggggaacatgatgatggcatacctaagaaatccttaggggcaaaagatctaataatttgccaaatacaagcatcttgttaaaagcaaaataactatgcagcatttggtaggaaaatctaggagtgactatttttccataagataaaacctaggtaagcacataagtgacccttactcttagggattgtattttcataccaatcttgatgattccacttaatttttgaaattatatgggatgaaggcacatccatatttctcttttgttgatgccgacccgatttaaatgatcaaacacatccagctatcatcattttcaaatcataatggtatctagggccataagcgaaaatggtatattttcactggccattgatcgttggcggtagcattggctgtttaagaaaacttaaaatgtatgtcagaaaaagtccattttgtagtagtgtcttccattttccttccccctcagctgcacaccatgcacgatggctcaatgcctccactagggttaaaagtcgatttaacttttcagaaacttttagtcgattggtaaatactcactctgtttcatattataactcgtttgacttttttctagccaattttttttaagttttatcaagtttatagaaaaacttaacaacatttaaaatataaaaactgtttcattaaatctaatattgaatatagtttggtaatatgtttattttatgttgaaaataatactatatttttctataaatttgatcaaacttaaagaagtttgactagaaaaaaattcaaacgacttataatataaaacggagggagcagcaaaatgaacggcctcgacatcatataaccccagcacttcccacgcctctataaaattttagttttcttgacgtggatcacgcgagctcaaattattgacacattctagaccaggagtacttttgctatatatatatatatatatatatatatatatatatatatatatatat

SEQ ID NO: 10015 - DNA, 11584 bp, Oryza sativa
ttgatgtgacactctggacgaggaggcgccctccgttgcgtgggcagcacgccggccattacgccggcgctcgatactgatgcgggcatccggccccccacgcagatcttcctgggtcggaggcgctgacgaaggagtggcggctgaatggcgagcaacagccgccgctcgccgcgccctccgccttgacgacacggagccggtggtagcagtgccagaggtcttggtggcggaggaccgcccaccagcacctaggcgctgccgtgccgtcatgaccaagttggccacgtcgtccagccaacgttgggctggagactccgggtcagggacaatgggcgggtgacgtaggagcgcgcccgcagcttggagtgcgccctggggcgtgctgccgtcgccgtagacgaggaggcgacgctccccatctcgccgcccttccctatcacccgtggatgtcgaagtcgcggatccttcgaccctctcgagcgcctcctcccgcctaggactttggcgtggagggggcggtggagtacgagctcgacggcgtgggttctgctccccgtcgtcaccgctaacactcggagagaggttgtgcgcctttgcttgttcggccattgggctgaacaggaaaagcttggcgcacacgaaagaatgcgagagcttagaaaaacacacgcaaagccccctacctggcgcgccagatgacggagcgtggggctcctcaccgggagaccgcacaggcccccctttgccggttcggccgggggccctgggtgagattctaagctcctggtctgagtgtggaaggttcgcgagagtggaaacacacaagacacgggcgatgtatacaggttcgggccgctgagaagcgtaataccctacttctgtgtttaggtggatctgtgtatgaagaagctacaaaagagctggagaaccagagagctcttactttctccctctctgatctttctggatccgaaaatcccccccttctaagtgggcaaggtcctccttttatacctcaaggggataccacatgcaccatctctctcttttttgtggggacttatcctatcttttcataaacagacggagacttgtatggttgtcgtccgaatgaccttctgatgggacagcccatacctacctccacttccgccggaagcaggcgcgacgtgggaaaatggctgtctgctgacgacatgaccagtgtcagaccggtcacaaatcggtcattcttgtccaccacgcgtcagtctataaatctgcatgttcgcccttcttcattcaatatcttgcttgtaatggttaggatgaagcctggcatatatctgaccggaaccaacgtgccatctccaggagctaacacgccggctccggctagggacgagtgcttggaggctctcatcctgacgggatggggcgaggcgtgcgtcagaccgcctgtcgccacctaacccacgatctgatcggtctgtgactggtcactgaccggataaacgagcgcgctgcactgcgttacatgcggcgtgacgcgctcgtccaaatcgcaataaatgtggttaggtgagccccgctatgctcacctaccccatatacgcggcgcaaaacccacaaggggtcggggcgcctcggccctcggggccgagacgggagcggtccaacccctcggggagacaaagagaagggcggtcgtatcaccctcgggcccgacccccccgagggggttaggccacgtgggtgatcgtgtctgcctcaagtctctaagtcatgatactcccggtcccatgtcaccgacagtagcccccggcgttatgccagggcgatcgccctcctcgagggaagcggtcgggtgtgacgccacttcctaaggcctggtgacatggtggggccggtctaaaaatcgggacaatccggttcatttttcctggagatatggtgatggcgctttggttggcgagcgtaattaacgcgcgcacgagatgttccatctcgactgcccagccgcatgtccacctcatgcaccgcaaacgggcgaatgggattagtggaagcgtgggcgcgagaaacgagggggcaagatagtgggcgcgagaaacgaggagccgggcagcgttggcaagggtataaagtcgccgaggaagagatttgcttccttcctctcgccattattccccttgtcttcgccgcttgcgccctaactccttgtttcctgtgccctaccttcgccacacgcgctcactcttaaacatctcttcctccggcgtcatggcacggggctccgctttgcttgatggtagcgtgctgccgccttcccgcatcgtgagcgagaggcaggccgggctgccgcgccgcttcatgccggaatctgccaccggccgggagatagttacgctgggcgagggacgcccagcgccatgctacccggggcggtccgtcttcttcctcccttttgcaatggcagggctggttccgccattttcttctttcttcatggatgttctggagttttacgatctccagatggcgcacctcacccccaacgcggtaatgacattggccatcttcgcgcacctgtgcgagatgttcatcggggtgcgcccatcccttgctgttccggtggttcttcaccgtacagtcggtgtcgccgccgtcggtggttggtggctgctacttccaaccgcgggggccggtgttgaaccgctacattccctgcgtcctccgcaagaagtgggatgactggaagagcgactggttctacacccccctcgccgacgaagcgcgcctccgacttccgagccagcccccggcgcaggcctccagctggcgggcgccggtagatctgggagatggctatgacgccgtcctcgaccgcctggcgggcctgcgatccctggggctcacaggggccatggtgtacggcgactatcttcgtcgccggatcgcgccactccagcggcgcacccggggtgcctgggagtacaccgggtccgaggactgtatgaggactcaccagggagtcagatgggactgggctcctgaggacttcaagatagtggtccaacgggtgctgaatctcagctccgtggaggcatccctcattcctcaaggagtcctccccctctgcagcgatccagaccgcgccttcatcctgaccattatgcaggcggtcggggcgtcggaggagcgggctcctcgaggccacgatggcgcgggcgggagccgcaggggggaacaatctaccccgggagggggtcgtgcttctgggccccgcgacaggggcccggggagcggccgccctgccgacgcccgggggaagaggaagcaggaaggaacccctcccccatctcctccccgagggggcggggcggcacgtgccagcagcaggcgcccggaggggccacgccgacgtcgcagcccgagggggagcggaagaagaaacggccccgcaagatgggggggacagaaccatctcggggaaaccttatttcccctccaaggtggtcgtttaaccgacctcctcgcaggttcgtcccacgcccatcgtggccgtattcattccctcaacgcgagttttcactcatccatcttgtttgtcttctggtctttcttctgtttcagcgagatcccgtcgcgtccctcccgccatcccaagtccggccagtctgcgaccacagaggctcggaggcgggaatctgaccggcgagaagccgcggatcgcctacgggaagccgaggaggccgcccaggtggccgtccgagctcgccaagctgaagaagccactcgggaggaggccagacttcgccaggccgaggagacgacatcctccgaggcgacccgtgaaactgaccggcaagaggccgcggatcgccttcgagaagccgaggaagctgctcaggtggtcgtccgagctggccaagctgaagaagccgctcgggaggaggccagacttcgccaggccgaggcgacgacgacttccgaagcagctcgcgacgaggccgcgggcgcatcgctcgggcccactccctcgtgcgacgctcaggacaaaccaggtccgggggacatccccgagtccggcacgtccatcggcgggccaagccgcgcggcatcctcttcgaggcggctcttccccacgccttccgttgctccactgagcgcagaacctcttctgcaggccttggccgtcgctaacaccacggtgttggacgggttaagtgcccagatggaggccttgcaagcagagcgggtggagctcgacgccgcatgggcacgtgtcgaagaggggcgccgctcggtggaggccatggtggaggtgggccgcaaggcacaccgccggcacgtctcagagctcgaagttcgtcagaaggtgctgggggagatcgccaaggaggtggaggaggagcggggggctgccctcatcgccaccaccatgatgaacgaggcgcaggacaccctccgccttcaatacgggagctgggaggcggagttagggaaaaagctcgacgccgcccggggggtccttgacgctgccgctgcccgagaacggcgggcggcggagaccgaggtggcatcccggcggcgcgaagaagcccttgaggcccgtgccatggcgctagaagagcgtgcctgcgccgtggagagggacctggcggatcgcgaggccgtcgttgctattcgggaggtcacactggcggtgcacgaagccgcctgtgccgaagaagagtccgcgctccgcctccgcgaggacgcgctcaccgagcgggagcgagctctcgaggaggccgaggccgcgtcgcaacggctggtggacagcctgtccctccgcgaggctgcgcaagaggaacaagcgcgccgtaatctggaaggtgcccgcgccgagagggccgcgctgaaccagcgggccgctgagctcgaggcgcgggaggagctggacgcgagggcgcgcagctgcggggcggccgcgggcgaaagcgacttaaccgcccgcctcgcagctgccgaacacaccatcgccgatttgcagggcgcgctagactcgtccgccggggaggttgaggccctccgcttggcaggcgaggtagggcccggcatgcttcgggacgccgtctcccgtctagaccgcgccggccggcaggcgggcctctggggcgggcggactgcgaagtacgccgccaaccaggggggcctcgcccagcgcctctcggagatagccgggactctccaacggctccccgaggagctcgagaggacgattaagtcatcctcgagggatctcgcccgaggagcggtggagctcgtactggcgagttaccaagccagggatcccgacttctccccatggacggcgctggacgagttccctcccgggaccgaggatggcgcgcgcacgcaggtccgggacgccgccgaccatattgtccacagcttcgagggttcggcccctcggctcgcgtttgccctcaacttcgacgaggaggacgatgacggcggagtgggcgacagtggcgacgaggctggcgacccgggtgcatcggagtgagcccccaggcccccgccaatctttaaatagtttcttcttttcttcttccgaggccttcgggcccccttcttgtatagactaatttaatctgcaatcaaataaagagaaaattttttgtgtcaattctatttgttgtgtgtatgagacgaggatgtctgtgccgcggtccttttgtgtcttggcttgaacaagggctcgtgcccaggtcctagtcctcaaatggctcgggtcggggctagtgcctggggagatccacatgtcgagactggccaggccgggagcgtggtgaccgagggttatgggtgacccgattgtgggtttttgccgattcccccccggagttcaccacgccccggggcacggctcggttctgggccccgtttggcgattttagccgacccgagcccccgagggcaggattgaacacgagtgacctacttcaagtcaagatccttcaaaaggaaacaacagcacagatacaacctttaggaaatcgaaaatgcttttattgaaatacagatataagagaaataagaatatgcatatgtggtagcccccggccaaccttgcacgcccgaggggggtgcggggttggcccgagcccgaaacctgacacccgatccccttttaggggtagaagcgacgaaggtgttcgatgttccacgggttaggcaactctgtgccgtcgcccgtggccagccgaacggagcccggccgggggacgccgatcactcgatacggaccctcccacattggtgagagcttgctcaatccagcacgcgtttggacgcggcgtaggacgaggtcgtcgacgcagagtgatcgggcccggacgtggcgctgatggtagcgccgcaggctctgctggtagcgcgcggctcggagggccgcgcgccaccttcgctcttccaagtagtcgaggtcatctctgcgaagctgatcttgatcagcctcgcagtacatggtggcccgaggggacctcagggtgagctcggatgggagaaccgcttccgcgccgtagacgaggaagaaaggcgtttccccggttgctcggcttggcgtggttcggttcgcccagagcaccgctggcaactcctcgatccacgaatcgccgtgcttcttgaggatgttgaaggtcttggttttaaggcctctgaggatttccgcattggcgcgctctacttggccgttgcttctggggtgggcaggtgaggcgaagcagagcttgatgcccatgtcttcgcagtaatcgccgaaaagttcactagtgaattgggtgccgttatccgtaataatacggttaggcactccaaaccgggctgtgatgcccttaatgaatttaagtgcggagtgcttatcgatcttgacgaccggataagcctcgggccacttagtgaacctgtcgatcgcgacatacagatactcaaacccgcccggggcccgcctaaacggtcccaggatatcgagcccccagacagcaaatggccatgaaagtggtatgatctgcagggcctgggccggctgatggatttgcttggcgtggaattgacacgctctgcatcgccggaccaggtcgaccgcatcattgagagctgtcggccaatagaaaccttgtcgaaaggctttgccaaccaaggtgcgcgaggcggagtgggatccgcattcgccttcatggatatcagcaagaagctcgacgccttgttcccgaggaatgcatttcaggaggattccgttagccgcgcgccgatagagggtcccttctaccagcacatagcgtttggagatgcgttggacgcgttcactcccttcgcggtcctcgggtagagtcttatctgtgaggtatgcttggatctcagcgatccaagcaatcaatctaagggagctgggagcgctcccctcgggtcccgaggcctggactccgacgggcttcgggggcctgtcaggcgcgtccgtctcccctaaggggtcgggtcgcgccgacggctgggcaagcctttcttcaaaggcgcccggtggggtctgggctcgcgaggaagcgagccgtgagagttcgtcggcaaccgtgttatcccgtctgggcacgtgccgaagctctatcccgtcaaaatggcgctccatacgccgtacttggcgcacgtaagcgtccatctgcgggtcagagcaccggtactccttacagacctggttaacgaccagctgggagtcgcctaacaccaggaggcggcggatccccagtccagcagccaccctgagtcccgcaaggagtccctcgtactctgccatattattggtcgcccgaaagtcaaggcgaactaaatatctgaggacgtctccgctcggcgaggtcaacgtgacccccgcaccggcgccctgaagagacagggagccgtcgaactgcatcacccagtgggcggtgtgaggcatctgtgaggggcccgagctgacctcggggactgagacgggctcgggagctggggtccactctgccacaaaatcggcgagggcctggctcttgatagcgtgacgtggttcaaagtgcaaatcaaactcagaaagttcgattgcccatttcaccacccgtccagtaccctctcgattatgcaggatttggccgagggggtaagacgtaaccaccgtgacccgatgcgcctggaaataatggcgcagtttcctcgaagccatcagaatagcgtaaagcatcttctgggcccgagggtatcgggtcttggcgtcccggagggcctcactaacaaagtagacgggccgctgcacctttcggtggggccgatcctcttcgctaggggccacatccctggggtgctctttgtccaagcggcctcgcggggtgcactcgtcttctgtgccgacgacctcggggccggaggacgacaggggcggccttcccacagtggcctcgaggccgtcctgggggtcgggggctcttggcgtcgtcggacaagcgggcaaagggccaactccggtcgtcaggggccttaggccaccgttcggctcgggggcctcttctccctgctctctcccgggtcgagtcggcacagggttagcctcggggtcagagggcgataggtgcggccttcccgcagtggccctcgggccatcctgggggtcgggggcacctggcaccgtctgacaagcgggcagagggcctgctccggtcgtcgggggccttgggccaccgttcggctcgggggcctctcctccctgctctctcctgggccaagccagcacagggtgggggtgcgcggaatgaggattgtcctcatcgcgctccacaaccaacgccgcactaaccacttgcggggtcgccgctaagtagagtagcaagggttcatttggctccggggcgaccagaactgggggagagctgagatacgccttcaactgagtgagggcacgttcagcttcctccgtccaagtaaacggcccggagcgtttgaggagcttaaataagggtagcgccttctctcccagcctcgatatgaaccgacttagggcggccatgcaaccggtgacgcattgcacatccctacgcttgttgggggggcgcatccgctctatagttcgtatcttctcaaggttggcctcgatgcttcgggcagagaccaaaaacccgagaagcttgcccgcaggtacaccgaacacgcacttatcggggttcagttttatgcgggcggagcggagactctcaaaagtttccgctagatccgagagtaaggtctcttggttgcgcgtctttacaaccaagtcatcgacataagcctcaacattacgtcctatttggctacccaaagaaattcgagtagtgcgttgaaaagtaggacctgcattctttaacccgaagggcattgtcgtataacaataagttcctatgggggtaatgaatgcagttttttcctcatcctccctagccatgcgaatctgatggtaaccagagtatgcatctagaaaacacaaaaggtcgcaccccgctgtggagtcgacaatctgatctatgcgaggcagggggtaagggtccttaggacatgccttgttaaggtcggtgtagtcgatgcacatccgaagcttgccgttcgccttgggaacgaccaccgggttcaccagccactccggatggatgacctcgcggatgaatccggcttccagaagtcgcgccacctcctcgcggatgaaggcttgacgttccggggcctgccgccgtactttctgccggaccggccttgcgcccgaccgcacggcgagacggtgctcaatcacctccctggggaccccgggcatatccgtcggtctccatgcgaagacgtcagcgtttgcccgcaggaaagagacgcgcgtcttcctatttgtcgtccagaagaccaccgatccgtgtggtcttggacgggccgtcgcccagggcaacctccttgaccgggacctcgtcgcatgtgactatccgctgcctcggggcagcgggggcggaggtgccaagcctctcgtcgcctccctcgggcttggacgcggcggtgaggtggtccgcgcgctgctccatacaagcaagcgcgactttgaggtcgccatggacagagttggggccaccggggcccggcatcttcatctggaggtaggcgtagtggactgccgccatgaacttcaccaacgcgggcctccctaggaccgcgttgtagggcagactgaggtcccccacatcaaagttcacccgctccgtgcggaagttggcggatccaccgaaggtgaccgggaggtcgatatgacctagcggccaagtgtgacccggcgtcacaccgataatcggctgggacggccggagcaccatccctggggccttgatagcgtcaaaggctgcgggggaaaggatgttgagggctgctcccccatcaatgaggacacgccccagcttcacgttgcaaacagtgggggaaaccaccattgcgatctgtcctccccgggcaacgcacggtgggtggtcggtctggtcgaaggtgagggcaacctccgaccaccgcgcccggcgcgtcgcctcatgagtaggggccgcggccagaagctctcgcttcatggccttgaggctccggcgagaaacgtgagcacacgctcccccatcgacagtggcaatggtggccccaggctcttggaagcctaggtcatcatcgccgtcatcgatgtcctcggcgggggccttctgcttggcctcacttcgccgattgccggaaggaaccgccggggacttgccctcttggcgctcctgcctcctctcctcctcccacttcctcgtccgctcagccaaacttttgactgcgcggcagtccgcgaggtcgtgaagggaggtgttgtggacgatgcaccacttgccggttgggcgctccctactgggagcgccggcctccttctttttgtcgctcgcaggcctcccctttcgggtggcccgcgaagcgccctcgacggcgaggacatgaccctcgtcgtcggaatgggctgacctcttcttcctcctcctgtcacgccgccctgtccgagcagcggatccgggggcggccgaagctgccacaccggaaccggaggggttccaggtccatgcctcttccttacgagccactcggtccgcgagctgaaaaagctccgcggtagtctggggctctttggaggcgatcttttcgagcatgcggttgtgccgcacaccccccctgaacgcgtagatcaccgcgtgtgcagggatgcatagtatggtgttgcggacttgacagaaccgctgaatgtatgagcgaagtgactcatcatcccttcgctggactgcatgtaagtccgcttcttcacctgggcgcggatatgtgccttgaaagttcatggtgaactgttggcacaaatcctcccaagagtggacggacgcgggtggcaagttcattagccaaccccgtgcctgtcctcttcagggccatgggaaaaaaatttgccatgaccctgttttcaccccctgcagcctagatcccggtcgtgtagacgtggagaaactccgcggggttgacgctcccgtca

SEQ ID NO: 10016 - DNA, 17887 bp, Oryza sativa
tacacacagaggaagtcacatgcctagcaaagttccataaatatttggtgcaactcctgcaacggaaatcattatcttccataagttgggtagccattgttgtgggctcgcgccatgcatagtcgtccaaaccgcagtactgcggtaccattctttaggttgagaaagaggaaagggttgtcacttacatgtggacaaactattttaatctctcgagagaatatcccctcatttttttgtcactcaaatgattattaaaaaaatttaaaaaaaattgagaaggtgtattaacatgtgatataacactccacaaacatgtaagttcaaattcaacttctacatctcgtaaaaaaaatgaattaaaccgtacatagttaacgtatattcagagtcaaatttgttttttcgttgcgagatgtagaagttgaattttttacttacatgtttatggagtgatatatcgcatgttaatacatcttctcaaattttttcatattttttcataaccatttgagtgacatacaagcaacgaggggatatcctctagagggatcaaaatccacttccatgcatgtgggtgccactttttttaaaaaaaaattgtttttaactataatttttcatgtaagtgccatgcaagcgtcatctaggatgaagagcaagtgaacatatcatgtagacatcatatcagctaaaaccgttttaaaaaagagtcaaggatgtcaatacccggttttaatagttaaaagagtcttttgtgatggagggacgcgaatcaaaactcggtccatagctaagggatgcgaaatggaccttttccttcttgtgatccagttttataaattgagagacctaaagtgaacttattccacccaaccgtcctttggtattgggccgagctggatgagtcggcctgtctttttggcaaagtcgcaagtgtactgtactacaagtctacaacaatgggagacgttggtagtacttcatcatactcacgccagtacgccacgatctaccggggatgaccacaatatcgaaccattgtacactgcatggtgcatatgcttctgagaggctgagacagatggacttattactggcgctagcttagccttatcccaagtcgtcaacgactcaatctcctatctacatcgccacgtacgcatacgatacgagtagctacagcaaattaattaagctaattaattacactgacatgcacgtccacgtcgctgtctgaagaaccatcgatcgatcgcacggtcagaactgcccggcgccgagcgggcacgggtccgtcgacgtcgtcgtcgtcgatcgatcgccggcgtacgacggcggcggcggcacgccggcttcgaggtccttaatgcaggctgagtcggggtggatgtcggcggcggtggtggcgttcttgtcgcgctgctgctgctgctgctcgtggatctcggcgatgggcttgagcttgcgctcggtgatggcgatggagatgtcgttggggaagaggtcgcggtggacggcggcgtgcagcagcgtggtgaggaacagcgccgtgaccgtgagcgtcgccagcacggacagcgcgatgcagagcgactgcgtgaacgcgttcttcacctccgacgagtaccggatcgacgcgatcgccgcgctcgtcatcgggaacgtgtacgcccaccacgccagcgagaacctgaaccccctgaacaggttgatcctcaccgcctgcacaagcacacccaacatcgatcgcatcagctgctcgctgcaatggcgcgcggcgtagaaagctagctaggcagtgtcagtgtgcgcgtgcgtacgtagcgtaccagcgaggcgtagaggaacatggcgatgaagtaggcgacgcgggagccgtagccgaactcgccggtgatcctggcccaggcgaggcaggcgacgctgggggcggcgacgaagaggaagaagacggggtggaggtcgcgcgggagcgtctcgctggtggggagccgctggtacagcgtgacgaacagcacgatgtagtgggcgagcccgacggcgaagaagaagatggggccctcgcggaggcccatggtagcgccgagcagcgcgccgacgaagttgccgacgatggacaggtggttggacgggttcgccaccctcgacagccgccgctggccaccggagatccactgcccgtagatcttgagctccaggcacacgatcggcgccatgagcaggtaccacagccagtgcgggaggctcgccgccaccatcggcggcacgccgatggcgaggaagaggcaggcgatccacggcgcgaagaagaagttgacgcgcaccgggtggtagtactcccgccggacggcctcgaagtagaaggcgaccttgcacgcgtacagcgccgacacggcgcacatgagcgccacggagacgcaccagagcacgaggttgatcttgacggtgatgtgcaggaacctcgtcgacgtcgagatggcgatgttcttccacaggatcgcctggctgctcatgcccatgcacatgccgaacgccgacaccgggaaccggagcaggaacggccacgtcttgtccgacggcaggaccagcgcctccgacgactgccgacgacacgacaccaacaccaccaccacggcggcgcgttgtgagcgactacgtactagggtgcatgccaactgttcgaccaatgcgagacgacagggagagggttgctcatggtgtacccgtagtttgtcaagctcggggccttccagcgccgcgaagaagcgctgtactctcggcatcgacgagtacgaccggctgctgctcgccgtcgtcgccgccgccgccgccgccgccgccgcgtcgtcgtcctcgggttcctcatcctgccgccgctgctctggctgttgctgctgctgctgttgccggccgcctctcaggtgggtggtgatctgcttctccagcttccctgaccacgtcttgaacgagtcgtagctcgtgtccctgcgcccgcgcgccttgcccgtcgtcgtcgccgccgccgccgccgcgcgcggcgcgccatcgcggctcgtgccgtcgtgcacctgggagcttctgctctgctggggcagagcggccgcgccgccgaggacggcgatcggctgtgagcggaagatcatcctgtcgggctgcgcgacggccatcatcgccggccacccgggcagcggcagcatgcacggggcgtccgtcatggcgtgacgctggagctccaccccggacctggcgacgtcgaacccggtcggcgacgccggcaggctgatggacaccgggcgagccgcgtggaacgccagcgtggtgtccggggaggacgccatggcggtgagcaggtcgccgccgtgccgctcctacaccggcacgcgactgttcatactcgtgctccgatcaggtgatctgcgttaaccatgaagacggcccgaaacttaccatgaagattggctccttggcagagcggctcgccgggatgtgaacatctccggcgaccggccgcggcggtacaccggattcgtcagcttccatcaacctcgggaaacctgcaacacatgtaaaccatcatcatcataagaagaagaagaatcaagaatggatagttgagatcacattgttttagtgtccaagaacagatacaactaatgatatttcagccatgagatgtgtcttacgagggcacactttgcaatgcggcttaggcaacgacattgagttcaccgtgagaccaaaccaagcttcgaactttctgcttgtcttatcagaatcagaagaagattctgtccgcttatctgaactctacacaagtctcgccaatgttttctgctactagcttgatcagtgagtgcatttatacggcagcattgaatgcaacttcaaaccagcaacagtcgtataactcacggggcagcttgattaggcagagattgcaatcaaatgcagatgcattctgggccgtacaaatgtgtggcgttcgtgcaggacatcaaagcaaaccttggcacttgtggcactcaagttttggttctgggcttctggctgcaggtttagcaatgttaggcagggaattccagagacataaatggcagaatctgtcctggatggctggtaaccctcgcaattggcaaccaacattggtctctagactctagtagtctagtctcatcactcatcagctcatggttgtgaagagtgtgagcaaatctgggtaagataacagtaagtcagatacatcgatgatggcatctactgcaaaaacaggctcggtataggcaagatgaaatgctgcccatcaggcagggcagggcagggcacgcatgcagtgcaggaaagctctgaatgtttctaccagttctctgtctgactgctaatcttcggccggtctcagtaaaaatctcaacagcatgaaattgaccactaaatcatagtgtttttgggagtcgtcgatgacacgacagaatgtgctcgattcgcttatcatacatacactgtcctcttatttggacgcatctctacaaacaagaaaaaagtatgtgaaaagtatggtgtgaaaacttggttatgcagttatgctactacttctccggttaataactgcataccccgccggtcatatatggggttcacatcctctaccatactggcaatatggcactaccattacaggcactgacgtgtgggacaatagagggtgggacaaacataacagtaactgtaatgatagtaatattatagtagaggattctcacccatcagggacaaaaggaagcagttctaaaggttttttttttgtaatgtatcttcttcagataggcacctaagttttaatcttggcatatgatctttatatgataaatttatctggtcataatatcatactaaatcattaccaaatttcatgaacggatgcatgcataaggacacctgttattgtgctgttatataactctttcagcaatcaccatcaaccaagatggaacagaaaccgaaaatcctctccgaatttcctctaccctgccccattcttgcatgtaaacgcgtatctttctatgatcagcgacacctacaaatgaactaggccaacagcaagctttctgaactgaaaacgaactgcctgcacgatctggcagacaacgcgatcgagctcaaggttttccctcccatcactgacagcgtctcactacccctcctaccgaactcaagaacagcaggccatcgaggtctgaaagtaaaccacgccagagacatggcctctcgtcgctttcagagaagaattctggagcgagcgaaaacaagagcatccctaactggcagggcatcgtgatggccgagaagcgtgtcgagaggaaaacgaaggcgtgtgggctatgcggtccgcgtgaggctggaaatttttcaggttcagcaaaatcgatctcaccaaaaaaaagagagagaaagaaaagcattttccatcggcatggtggaaggatgattacccgggcgggatgcacgtgggggaagggaagaatgcaggaggagtccggtcatgtcggcggcggccggcgaggtggaggcggcggtggtcgtgggggcgcggcgcgcgagctgggagccgccggagcggcggcgatcggtggtgggtggccgcgaaggtggcgggtgttcttctctctgtgtggctgcttgtggggctggagtgtcggactcgaggtgttggggggggggggggggtgtccttcgtggtaatcgtggccgtcgatctgggatcccagcgcgaggaatcaacggctcagcttagccgggagccttctctcggggctggtccatgtgggcccccacaccccgggtacgtgagaggctgcgttagcatgacatgtggggtccaagccgtgatgacctgcggtgagtgactctgggcgcaaatagaattaccgatgcatcgtgattcgtgcagttaggaacaatagttctgatgctcctacttcgtactacttcctccgtcccacaatagttatgattctagattgtctagaatagattaaagtttaatataaaagtttataataccccttattaaataatgtatgatgagaagtggaatggttattgagggtaaaataggaaaacttttgaatagaaagtgattgataggacaacaagtactccatagtgataagtatttggggacaaaattaaaatcttaaagagacaagtattttggaacggaggtagtagaacttatcactcagtgttagagcaagtttaatatagccaactatcggctccaaatcatatatagtcaatttaatagccaattcatacaatagttacctataaacatgtactacatcattaatgtttggtaccacctgtcatacacatacgtatcttggagtccgtcctatagctggctacaaatatgtagcccgctactcttatctcttctcttttatctttttaaaatatgtgtatagctggcttacagtttactattatacctgctcttagtagtgtactctctcggtttctccgtaaaaaattaacttaaaatctgtcaaaagtccaaatttattgtagtaggacattcagtttgaggtttgtttgttttacggaggaagcacgtgtagaaaacgaaagatttttggagattctagagacaccaagtgaactgacctcgagagttttgacagatcaggcatacacagcacacattgtgatgtggggagctcttgacgtgggttgcagaggcagctctttcgcagcttcgctcgccttgtccgccggtgtgtcatgtgtgcgtctctctctcagcctcgcacgtccaatttatatacggaagtttacaccacctctggtctccattctccagttatgcggagtaacatccttacagtaacgaactaccctctccagtctagtagtagtagggaaaattacaaaaaccatttctaaaagttatttgaagtttaatatttcacctcataagttattttgttgtaaatatccagttatccaccttccactcggtttcgttgtaaaaataaccccagtgtgcacatgcttaactgaattaatatgttttcgtaaattgcaagttgccaatatgatctttaccaaaactaacaggtggtccgctcaattacacggttagcatacgtacaaaattatatatttttaatatgatttttacttaaaatttactaaacaactatctcgttgtcgtaatactttgaaaccaaaacttatcatctccatgattctacttttatagtttttaaaagtcacaccagttattaccccttatttctatcacctatttctttatttgtttgttcgatatgaactcttgtttttgtttttatatggactcttttttcaatattgtttatttttaatttagaattttagttatttctaaactgtattcctacatgagctctctttctctttttcttcgattaacgtgagaatagcatccacagcgaacgtgatatctcatttcaaaattattttaataatattatagattaaatacattacgaccaacaaatttgttagccacaagtaaaacaaaatttaaaacaaggtaaaacagaacctgacatatacccagagaagctatatacatatgcttgccatgactcctgcgattaatacaaacctgactgattattgcggcatgtctaaggtggttagacatagtaaagtaaggttgcgaaataaacatatcctaggtttttctttaaagcatcattagcacttgacatgagtgcatgaccaggcaggtatacatacagcctagctaaggagagtgtcacaccagactatgtggaaaaggggatgtcaaaatcaaggtcatttttgcaagaaagatgaggggaagaaaagcgcaaaagagccaaaggtgccacgctttaatttaaacgaaaggacaaattctgtataaattattactatctccgttttttaatagatgacgccgttaactttttctcatatgtttgatcattcgtcttattcaaaaaaatttacgtaattataatttattttgttatgaattgttttatcactcatagtattttaagtgtgatttatatcttatacatttgcataaaatttttgaataagacgaatggtcaaacatatgagaaaaagtcaacggcatcatttattaaaaaacagagggagtacaatctaaaaggtgaaaacaaaaggggaatagtcaagcttggttacttttttgaaaaaaaaaaaagagagagcacgattaagtcgtttttaacctttagcaatctgaattacattcaaaatagcttaaaccaataatagagttcagatggaaaaaacttgggatattgatttgtttataaattttgagtgcgagcgccccttgtgtgagagatcaattttatttatttctttctttttttgtaaattgagtttctggcgacaaactaagaaactaccttgttgcgataacatatcattttccggacatgttttaagttaaaccttacaaaccttgagcataaatatctttttaaatgcttatgttggatgtatgaaaatcgtatgtttaaaatcgccttgaaaataactttaataatactatacttgtattgctttttatttttctttttggcagaaattagtggtcagccgcattttaaagaacatgtctatgttcaaaattcttgtcacccgcagggaggagcacgtttttttgcatgcgacctttgctttgcttcattgacctgctttctaacccgtcatgcccaaatgcagaaaagaaaccgtcccagcaaagtcagagggttacttgataagcacagttttctcgaaatccaggaagaatcaacattctttcatcataatagaatgcttcgtttcctattaggcccaaaaaccaagtgcacccaataattcttcaatgactaaagcggcattattttttcatgaaagcaataagatatctttccataattgcaagtatcatcaaatttgtcattacgagctttaggattcagttgttggtctgtgtaatcactaatcacctcaaagagataagaaaatgggaggagcaagcaagcacaacaagaaaggcagcaggcattatgccgtgtccttattactctattatagagatatatagtactgggtgctaatgccatccaattcactaacctcttgttttctcctaatggtgtccacgattttttcgttggccatctttttctcggggccatctatatggctcatcataggggaaaagctgaagtcctaaccaatagtcccaaaatgcagctgctggaaaagtaatgcatggagatagaaatggtcaagcactcagtatgaataaaatgtattgaaatgataagctaaagaacaaatccgctattcatctaagctatcatgttatgaagttatttgctcgtatctgttgactattgctagatacagttccaagtctagatttgccggtccacttcttagtcctatcttactcagaaaattgaatccaaaacattcctcggtttaaatcttcaccagggtatctgatccaacaaacacaaagcttctcagaaactttaaacaaagtagaacatatatatttttttaaagtgctctcaggaccgattgcatcgtagataaatattcaatgaaaacctcatattaaagagatatatagggtaaaatttaactggtattgtggtactaactgaataaacactataactataattaatactaaggttatgttatgaatatgtaattttcatacaacagtgttttagatttcaagataatcttgggctgaactgggagtttgatcaaatgctgaaacattatagctcatatgctaagctattcatttctcaggtggtgattcatgatgcaggttactatggaatatcattaggaagggggcaaacgattcctaacatttattcaaggtatatcaccagcctgttgaatatatagcttacagtctaagcaacagcctacaatagttttgtacgttcagttcaacaccataagaacagatgggtacataagtataacatgatgtctccatgcattcgtaacaattagagcagtggataggaacaacactggttgatctaatatgtaaaatcccattgattttgagtcacgatctggtagttgtcatgaactactcaacagatcagaaaaggacctgtggccagtaatcatcacatagaaaagcctccaccatgtctgcataccattatcagaaaagggatgcccattctagcatttttcttcattttttcttgattccgaatataaaacgagttcgcaaggctgaattgtatacatccaatttggtccttggcatgaactacaataagttctctttagagaaggcaaagaagtttaatggtgtttccaatgtttagtacttgattacatagaacttacaaagcaacacatttgaactacaatggtgactcaagactgcagaagtggttatcacttatcagaagttcaggactgggtcactgacagtatcaatcttgccccacagtcaacaaaattgattaaaattttcagaccataagtggagcgtatcatggatgtgcaaaaagacatcctggaaaaagcatagaccggaacacaatttcttcgtaatattttttttagtgtttatgctggtgaagaaactcacagggccttatattggataactcatgtgaaaccataagataattaagtgtttaactgagggttcatagtgcaagcaattgaactttgcttagtcaatttaattttcatcaatgcaattggctacatattaaatcaaatttctgcattaatagttgacatgaaggggaaaaagtagcaactcaaacacctacttgccttgtgataaccttgaaaacttccagtggttaggcagaagaagattaaattcattacagctaagtggagttacttggacagttgggctgcactaaataggatgcccatacttcatcagctggagggggtggctgaacccagtgcccaggtattcggctgcaggcaggtgagacaattgcattgttaaataagagaatgctacatagaattcgtttcacatggtaaagcactacaatcgagagcacaatgtactaaatcctatcatcagagcacttcaataaaataacatgaatgctaccataagttattagtagatggcttgaaagaaccacaggacattcagcactataatgctatcccagtactgaaattacaagaaagcgttccagagtactatacaagtagcccaacaaacttcgaatgtatccaacaaccatcattctgtttactaaaagagattgcactttcctatggcataaacctcatatataacccaaatcaatagaacattatatattctcatgagttctttttttctcatcttggtattagttcttcagagaatcagcaaaatatatttccattgttttttgttgtatggcaaagatgcttgttgagcgaatttagtttgcatattatatttagcagagtgaaagtcataccttcctccagctctaataaaggaatcccacatcctgcggacctgcaatcaaaggtggaatacatacatgatggctgagtgaatctattgagtaattcccaatcaaaaaacatattgagtaattgcacatttgcattgatatgagaccatcgataggatcatcctaaaacattcacttggtagaaatcacattaactgattaacacataaagcattcgcaaaactcccagatgagccaattatggtattcaatggaagtgtgaaacccgccatgccatatctatgactctgatagattgatatgtaaagcctagttcagaattttggctgtgatagactgatagtgcaaagcctagttcaaatttacactgtattattcttatacactccacaaaaccttaatggtagcatgaagttgaaaagccagcataagttacctcaatgagtgttcccatgtcgtagctgcttccatgataataatggtagaactcaaaaggcagactggaaacagaatcataatgcccatgccctttgctgtcatctttatgaagttcatgctctgttttttggcttgcatgatgatttctgccgcttattcctggatctctctggttttgttccagtgttggtgcacttttggcttgatcagaatcatcttctcttgaatttgaacactgcacagccttcctcgactcttccgcggtcagaatagcatccttggcagcatcagtccgagcagcacttgcagcttggcgctcctcttcctcaactgcagccttaacacgctcaagatatttatcatcttcttctggcagaaaatgacctgaaatatattacatggtaactcatgcatcagttccatgtgtttaggttgatcaactgtactaaaacaggggaaaaaaataactattaacaaggaaaaggcaaagtttgcaggtgattttaggccctgtttgattcagcttaggattattataatctagcttattaggagtaagctgaaacaaacaagtagataattatagcagattattataatctataagccagattattataatctgataagctgctctagaggagcttttttcagattattgagtggctaaagacccactacccctacatacttgagaaaaattactcacctatgccatcaaccgaacagatagctgagggcattatagactttagcctttcaaacccaataatccatgccttcaataatccagacaaacaaacaactcacagcttattctatgccagcttattataatccagcttatagtaatctggcttaataatctagattataataatcataagctgaaacaaacagggccttagtgtgttcgcgcgagcctaccataattttatagcaaatatttttgtgaagttttcagacaccacccatttggacaacagattggcaagaaatgcattagatatgacagagaagaatgggaatgccaaaatttggcaatcatttaaacaagggacaaattcttgaagcattacaatgtgattgacccattacagtaagattgacccccatgtattaaccatttcccacattttgcacctctttagattatgactataggtttgacggactcatatattgaaataaataaaaagaaggaaattcttaaaaataatgggtagatgaatatatcctgccttgtttcttcattttttgaactctcatagagcgaagctcctgtagtttctcgaccattagggcaagctcaagctgaaaatagaagatttgtattgagaaaattagttttctagaaaacaagactattgtatttgccgctcttgaatttacaatttctacagagaatattaatagtttggaatctaaatataacatactgaaataaccactcaagaattcacaaactgattgcacaataattctgaatgaaagaaaacaggtaggtaggtggtgtaattgaagatgttgggttgcagcatatcaaacacaaatatacaagactttaagaaattttagaagcaagcttatagagtttcctaaattcgtagaaaatcagataaggtcaaagataaaaaatggtgtaacttaatgcttactacaacttaacaaaattcataactcaaggtatcacaatgtatagtaattcagcagtgtatgaaaatgaattaatgaaacatagcgctcacaatttccacgcagatgtccacagacaagcaggatttccacaccacaatgtaagcattaactttacctcagattctagacgctttctttcctcatttgcttttttcttggcaatctgcttcatgttttccacctgatttcacagtatcaatgaattgatcatctgtggagcaacagtgtatcttacccaaaacaaccccactaacaaaatgacaaattcaaaaatgagaaagaaccttgcgctgcgccatgtccttggctatttgcctagccctccattcatcagcttcctgatcaattctgtcataatctgcatgctcctgtgaaacatcaagacaattgatgtcattatggtcagttgtcactttgatttgatcacaatataaacagaaaaacgtattgatgagcgcaccttctggaaaagctctgcaacatgctttctttttctctttctccatcgcttatttctcttggatttctgcagcttctgagctaacctaatcattgcatacctctcttcccaaggacccccttggttcacagcaggataaataggtgcaagaaggttctgaatctgagaacaaagataattagcagcatctgtggccagagactcatgagtgtcttgactaatcttcatagctctagcaagctcaacgaaatgccggggcctatctgcagaagaaccatcaggctctgatgacaattttgctgaagacgagtcaggtccttgcgtgctagcatcgaccgagtttctagcctgcgcaatttcctcgagctcatttatcctgccaattcaattccattttcagtccacaaaaaaaaaaggtctaataaattagcaataaaggaaatgccttcggttttgagacaaagttgcatgattatcgctagctttaggcggttcaggaactcacactgcagtggctaattcgatggtttcctgcagcctccccacatgctcccgcacattgtcccgctgccaaaaggatgtagcggccggcggctggaaaggcggctgccactgccatggctgatgctgctgctgctgcggcggcggcggcgggggtgcgaccccgaaagcacccggtggtcggaacatggcgggcagcttccctcaaaatcccctcccttaggtcagttcaccacgctgcagttgaggcgaggaacgggcggaatcaggctcaggggaaatcgagtcttaccagggggagaccgggggaggacgaagaaggtgacccctgcgacggaaggcggcggccctcgcctccgccgccgatcgcctcgacggtgggctcggttgcggcgggcgtttcgcggcgctccgccggagcggagggagaggggaggaggaggaggaagccgcgggctcgctcggtggagtccaggaaacgaaacgcacggcccagtggcccacgtacgtttcgcctcctccccttggtgggccgcaagaagaaggcccgtgccgcgaggacgcgtgccgccgggtgagagatatttttctttctgcgtctcgctcgcgtcccgaggcgtgtgcatgcgtgccacgtatcctctccgagccagtggcgcgctgccacgtcgcgctaggttgtcatcgtccaaagcacagaaaaaaatatttatcttttatagcttggttttgaagcacatgaactaatgaaggactggcggttactagagcgttcttcttctttctcaattctgcatctgaggctttgggcattttatccagcgatgagtctcgtcaccgcgtgctccggcgagagaggacgtgtggcaaacgagagagatgaaagaaaaaatccactttatgtttgtgtttagtttacactgatatttgaaagtttggaaatatgattgaaattggaatgatgtgctgaaaagttgtgtatgaaagatttgatggatggaaagttaaaaatttaggaaaaaactttgaaactaaacagggctttcgatgcgaccaccgaagacacctgagagagcgcgtactcgctcccggagtcccgacccgacgtgccgggtggcggcttcacccgcagctgaagtccgcggcctctgtctctgtgcaacccaacggcagttaacccgtgcgcccagcgcatggagcgcgcgacattgggatcaggtgcattctcaactacagctgctcctaagagcacccacaatggtaaagtaaggtgctatctataaaacatgtacatctcagcaatagactagattaatagtaaaccacttcaatggtatgtctacatgggtatctatagctctctaatctattgcctcgtttttctctatagactatctccaggttagtagatagctttcctctccctcttcatttaatctcttccaagtaggaaaatatgctgacatggatttcttgtagagagcctataaataactattgcgggtgccctaacgcgacattgggatcgggctctcgttaggagcttacacaagatcttgttcattcaatttttcaatggaaggtctaaattaatgctacagtaacattgttataataattttgtgctgttttgttataataattaatggatagccataatatgactgtctaagttgcagtccaggctaagaactgtacaggaaccggtgtagatttttgcggcgagatgcgttgcacggggacaccgggcggggcggtaagtagtacagcaagttgggggatgccaatgattcaaaacagtttgatcatatctcaagcggaggtgcgttggatcatatcggtgcatctgcatggggcatgggtatgggcatggccatgttcaggtcgccccggccggtaaaatccggggattggtgattccaccgcaggagaggaaggttaataatatagcacactgttagctccaatttatctatagtcaatctaatagctaatttatacaatagttgcttactatgctattagtatacggtcccacctatcatacatatattgtgtcttagagtccatgctacagctagctacaaatctgtagctcgctgctcttctttctcatcttttatctcattaaaataatccctccatactcgtaaaggaagtcgtttaggacagcgacacagtctccaaaacacaactttgacttcttatttctataaaaaaatatttattgaaaagtgatatatgtatacttttatgaaagtatttttcaagacaaatctatatatatataatttttatattttcaaactcaataacttgagagttattcatgatttatattaccaaggtttgacttaaacattatcctagacgacttcctttatgagtatggagggagtataaattcaaacatagatatatccagatttacaataggcctaatttgtctagtaccatcacaaaaatcacggagttgaaaaatactatagtatgtgtcattgacatgtgggttcggccccatatgtcattctcacatacgatggtattttctaaatttttcctttactttacaataatatgatgtatcgaattcagtatcctctctgtttcaaaataaattctctaactcacaatataagaatccagggcatctcctggagctagagctcaaccaaacagtttcagttctactataaatgtgaatggagctaggtggagctctctcaccaaaatgaactagagaggtggagctgggtttaggcagctccacaactccactccagacccaactcctggagctaaatttaggagttggagcctaccaaacaggccctaagagcaagtttaatagtatagcctactactgactccaaatcatctatagccaatgtagtaaccaattcataccatagttgcttactatactattaatatatggtcccacctgtcatacacatattacgtcttggagtccgtgctacagctggctataaatttatagcccgctgctcttctcttttactttatctctttaaaatatgtttatagctggcttgtagtctactattgtatcggctctgggaatatcccaacatccatgtgagagacagaaaacaggggaaggaaccatcacgcaattacagagaaacttgtggccccatacgcaaaacctccccccggtttggacagcgccacagtgcgccacctctccccgtgaaatagcccacgtatgcgccccgcgtggtcgccc

SEQ ID NO: 10017 - DNA, 20013 bp, Oryza sativa
ggatcgcgacgtgttggtcgcggctgtcgctggggcggggcgcgggcgccttttctcgaacggaaacagagattcgggcgtgcaaaccggacggggaaagcaccggtgcaaaatcagcttttcttttgtctctcggggcttggttttatcccccgagttccacacacggcaggcatagtggtaaagctgcccgtccccgacacagccgtcttttctcagcaacacgatatattgacacaagacaaccaaagtcacacggtatgcctacctacaccccccacatgaccccatcgcatgcacaaattctgatgggaaaaaaaacgagcaagaaagtgagagatgtaacaacactcccgagattacgagaaagggagcaatttactagagagcgacttcacatgggagatggaaatattttacatatgcatactgctaagctagcactaccagattattgagctaagacggcggcgagcaaattacagataggaacaagatgggagttcatcgcggccaaaaagacaatcttttgccacgttgagacaagccgcacacatgcacgtttttttatcacggcatcatgtgttcgatatcaacaactaattatactactagcgtctaagctacggtttgagcacggcgatcaccgtttgtccgtagcggcgaatcggccggtccgagtcaagcgccgccgtcaccgccgccgccgtccttggtgtcggcccttccgccgtccctcgtgtcgctcatggaccgcagcaatggcgactccgaccctactacagagagagatgtcactacgttgcgtgatagtgtcactgggaggtgggccatggaggggggtgtggtgatggctacctttggaggcgttgaaggagcgcttgcagtgagcaatggcgctctggatgccgtcctgcagctgcagcagcgagtcgtcgcggcgctgcggctgctgcccggcggtggatggcggcggcggcagcgacggggacggcgcggcggccactgcggaggacgcggaccggctcttgccgaggcgcttgcacacctgcttcagcccggctggcacgctggcgcggggcgcgcgcacgccgcaggcgacgacgaccggctgcggcggcgctggggccaccgccgccgccgccgccgcggtaggaggctgggtgggcgccggggagggggaaggggaaggtgacggcgaggggtcgggctccaggtccgtctcctcgccctcgctggcgctggcgaagcggaggcgctcgccgtagcggcgggagaccttgacgtaaagcggtttgatcttgttcaggtacttgagcagcatctccttcgcgaaccgccgttcctcggcggtgatggccgccgcctcgggagtctgcagcgcctgcacagccggcctggctgcgccggcgccggcgccggcgtcggaggtgcgagagctgttgtcgcgcgtgaagagcgagacgaagggcgcgtcgtccactcggaacttgatcaagaaacggttcgtcttcggcgccggggagccgccgccgccgttacattccgccgggacagggaccttcggcttcctgagcttcagcagcagcacgcggaacttagtcgccggccggaggaacgacgccggcggtgccgccgcctccgagaccagctccaccaccttcgcctctccgcactcgccacccggcgccaccgccaccgcgtcgtccacggtcaccacctcgccgccggacgcgacatcccccgcgacagagaagttgaactcgaccctctcctcctccgcgtccgacgcggcactctcgtcgccgggcaccgcgaactccaggtcaaagaacgacgcgtcgtcatccacctcccctcctccacctccacccccacccccacctccgccgtcctcgcacgccgacgcggctatggtggtggccgccacggcgccgcccttgttgccggcaaccgcgccgccgcgcaagaacttgaggaaggtgaacgtctccatgccacacaacacaacacaacacaagacagcagctagccgcagtgagcttcactcgtttctagctcctactcctacctcctactgcctcagcactgagaaaaggactcttttggggagccttttgagggtggaaagagagaggtcggagaaggtggtgcatcaaggactaaacggtgagatcgtgagatagtttgttccgttttcaacgtgcgctcttcccgaactaataaacgggtgtgtttctttgtaaaaattttctatagaaaagttgttttaaaaaatcatattaatctatttttgaaatttaaaataattaatactcaactaatcatatattaattactcatctcgttttgcgtatcttcccaatcttctctatcttccctttttcaaactcagcctatatagatgagagaagagagagcgggtcagtgaggtagtgaggtgctcggctcgcgccatcctgtccgttcatcgccgactcgacggtgatgggcgagtcggggtcaaacgatatgggagggagtaactgaaacatttgggacgagtgtcccaagtgtccactaaaaagctaaactggtttggtttttcggtttcgatccttttggaattttgctggcctttctcaccgtagcaatcctctgtatttgaaagagtcgttttgaattagaattttgtaccccctcctcatcaaatgcatgcttacagtacacctatagttcgttttggaccacttcatgttttcttcctaatttgtgtgtacatctctctggtcaaaatacaacaggcatcttgatagaaaagcaatgtatccattttctgtttctatcttggtcacttgatagttgagaaggataaatggccttgtttggttagcctaacactgtaatgttttatgtctaataaaggcataactaagggcccctttcaaacacaggataggaaaaacacaggaatagaaaaaatataggaattgaagtggtatgttttactaatcctacatgaatgaaaaacacaggaaatataaagagggtccctttgatagcaccataggaaataaacaaagcaaatgatagtttccaagaggttgaacctcttgcttattttcctatgaaattgagctataggaatacaatcttaaggaaaatttcctatactttcctatgaatcaagggtttcataggaaaaattccttaggaaattaaatcctccaaaattcctataacaatcctccaattcaaaggggccctaaacttagttatttcagaaggggtttggccaagaaagttgaagggatttagcataactagctagagaggatttggaagaaggtgcatcgtgaacattttatcgggtgggtgcgcggaacatagcttatatttgcttagagtgatgattatatatcatgttgtttgagtcatgcatatgttttctgatggcaacatcttgctagccgtgttaagaaaactatctttagatcaaacatgatagagctacctaaggtttcttttgcagtaagcgataataaaggatcttttgggattttgaacctatagtgtttttttttcctagccatttggaacgaaggagattggacactattgaataaatggaaaatcctatggaatacatcaatccatgagagtttcagataaaacataacatgtggttcaaccttacgtaaattatatatcctccttttttcacatggtttatccaactaatcatttttttttaattttctttttttgtcaattttttgagtttattttccctactcctatgttttctcaaccttacgttatacaaaagatccctaacttattttgggatatgaccatacgagagtatcacccgaacgatatctctttggcttggtctagccagagacaatggttagagaccagtaaaccaaaaccaaacactacactctactccctccgttcaggagtatatacagattcgttgtattataatatgtcattagttttatatttatttatttatggagggagcttatatatatgctgaaatttccatgcccatcatttccataaaccatgataccaggaatgattgcgtccaaccagaagcatgcagtcattggcaaacgatgacagtgacacaaaagagaacgctgcagtattaccatcgcaatgatatttactcgtttctttggagatggaaggccatgatggaatcatccaagcctgacacgaaaatgatgactcttgagatacagtatcacttctacagatgtgagacacagttgggacttgggaggcttgatcagtcgtcaatcatttggagaatggatgctgaacattggagtttgagcgagagccagtagttgcaatgtgcaatgcaaatttggacgtataatttggcctcgccaccggtctggactcctactatgtcagtccttttaatctgagacactaccgtccatttgtgaggggggcacttccacatttctcctaggagtacttcattctcaccaaaatataaaaatctagttgtacgaatttaaacagagactgttcagttttatggtactaagatatatcactgtccagattcacagtagtagtactatgacatgtcatatccaatatactccatccgtcatataaaataccaatctaatactccctccgtcccataatataagagattttgagtttttgtttgcactttttggacactcgtcttattaaaaaaattttggaattattatatacttttttgtgacttactttattatccaaagtactttaagtgtaacttttcattttttatatttgcacaaattttttgaataagacgagtgatcaaacagtacaagcaaaaactcaaaatccattatattatgggacggagggagtacaggatatggcatatcctaatactacgaatcatatgccacttccagttttagatttttgtttttttgggatagatgaagtaggttcttatgttttgggataaatagagtagctagtatctttcttttctttttttttctttgtttctgttgttgcaacaatattactgttagttgacttaattggcattttggcaatatgcaacgttgccctgcgctagagtgaagctcaaatagagaaaatttaccttgttttttcacgtacatatatacttttcgaacggttaaataatgtattttgttaattcattttttaagtttaaaataatttatatttaattgattatacgttaatggtttacgtatcttcttcttcctctcttttcactatcaaccaaaacacgcttgagaatgtatagtcactggtattaggttcgaagatgagaagagtagtaggcaagtagctcgagatagtttagctctctggtgtctaatccaggccttttggatcatggcccgtccacgtgggctggggtcggttaggcaagacgcggcccaaagtcgctacttgcgtgggccttgcggttgtgaatgtgcgtgatcgtgtgagctcaaagaccaacagtttccttatctatttcgctttaatttgaacagaatagcccccattttgtttttctcaactcaaaggcaggacgcaaaccgaatttgcgagatgctctactcttgctgcagtctgcactcgcgctagtttgttcatgatttctcgacacggaaatatgaataaaccctaaaccctataccctaaaccctataatcccagcgtagcattcaagacaattgttccttcttctcgtgacaagaagcaagctaggtacgctcgctagctgaaaaggcagccttagctagctggactacgtctctctcagagcaagtttaattaatagtatttggcttcaatttatctgcagtcaatctaataacttatttatacaatagttacatattataggcaaacttttatatatatattctgagcgacttaaaattaaataaaaacaacattgaaaaaataaaaattaacttttaaaatttaaatttagtaacagcttataattcgtaactcatagcgcaagggatgagaccttaaggagccctttgctagcgattcaacctgtaacaccagccttattttgcttcgtcagtattaaggccatagacattgagtcattgacgcgacatcctctttgcaatgcgattattccttttccacatgaatagtacttctccctctatttcatattatataacactttgatttttttttaggtttctttaagttagatcaattgttctttaaaaaacagcaatatttacaacaccaagttaattttattaaacatagcattgaatatattttgatatgtttgttttgttttgaaaatatcattacttttatataaacttgatcgaacttaaaaaatttgatcaaagtgtattataatatgaaatgacgggagtttcttttttggttaaaatagtactacctcattttttatatacgatgtcatttttcacataacgttcgatcattcgtcttattcaaaaatatattgtaaatatgtaaaaaaaatataagttaaggctggagttttttttataataatacaagttgtcagggttatggataccatatacctaatagtagttgactaaatctcggcaggacccaccacataccatatcctatacggaaacaacctgcgaatatagaaggagttccggataagggaagacaatcagagttctacatggaaacgacaagtactactcagattgtatccatattggtttccctaattctacttggacaggggatacctatgggtataaatacaatgccccctaggaggagaggggacacaaccacctcaatcgacaccacaatcaacagacacgggcaacatagacaccacaaagccaatacaagccaacatacgccaagacaagacgccggatatcggcttcagggataagcacggctagtcccctacggtgtctccggatactgtcaagagaaacgaaagcgctatctctgatctcgccgggcacagattcgaggaggaagactaccctgttgtcgactacgagtcagaccttcagaccgccatgtcgacaacagttagataggctaccccaaatattgtactggtatgattatggtgaataagatcaataccggcttcggccaacaggatgtagggctattagctgacaattcaggggcccgaacctgtataaaaatcctcgtctctatctcttttacctcagtctcgcgtataccctagtaccaacgatccccataccatgcaaataccggaatcgcgacatcaaacttcgacacaagtcacaataaaaacaaatagcatttttataattttcttaataagataaatagtcaaatatcatcataaaaattagcgacgatatatatttaaaaacggaagtggtacaccatgggctacggccctattcttttctccaacaaaagttggataaacttttagataaaagtgacatgcttttcaaactgctaaacggtgcattttgtgcgaaaactttctatataaaagttgttctaaagtatcagattaatacaaatttcaagtttgtaataattaaaactcaattaatcacacgtaattaccacctcgttttgcatgaaacactttatcttcatattcatcttcaggagattcaaacaccatctaatagtagctccggggagaagtggcggaaacaaaactaaaatgatcagcttcaatttgaatctgtagttcgacgagtttcaaaagatttaactcattaaagtgcgtcacaatctactactactctgtcaaaaaaaaagccaaccctagcaatgaacatgtgtctaggttcgttggtaggattgggttttttataggatagaggggataggtctgtacatttggtcggataatcggatcacacaatgcaccgatcgagggggggataaggcctggtttagttccccaatttttttttctaaaaaaacagcacatcgaatctctagacatatgcatggagcattaaatataaattaaaaaaactaattgcacaattagtagagaaatcgcgagacgaatcttttgagcctaattattccatgattagccataagtgctacagtaacccacatatgctaacgacagattaattagactaaaagatttatcttgtggtttccagagttataaaattagtttttctattcgtatgaaaaacctttccgacattcggttaaatatctaattacatttagcgaaataaacaggccataagtttgaagttgtgtgcacaaaaatgtccggattctccacgcggacgcagagacatttggacacaccgtacgtacccgtgtggtgggcccatgccacgtcggccattttgggatactagtaggccggatactctacaaatcaaaaatgacgcagagattccgaattcaagcagatcgtggggcccggtccagcagaaaagctggccgtccgccgcagcggtagggtagtgcccgccacgttgattccggggccctttttgacatcacccgctactctcctcccggtcctcctttctttgctagatgcacccataatgttacccccaacagtttatagggtcaattaattagcacgcacccataaatccatctactatcattataattatatttccttctttatcactttatacacccaaaataacgggtcaggattaagtttcacagatcaagattgatataacctgtcattacacagcgagagagagaaaggtggaaaggagcatccgacactatagtggagatggctattcacggtgcaatataattgtttgtggaaataggctatcatatagcacgaggatgtgagaattgacataacacggtcatattcgcacaatcatgcactactgtagtagactgcaaacaatgatcgtctcatactccttagcacaccacttatattatatcgagtttggcaagtttatttgagttagattaataatgctgcatccgatagtgtgggttggcttagctagttagtgcacggaaatcaaaacacatgattagcgaatgattatttaaatattaactatcataaacttcacagattatattcatttgatttgtaggaaatatctatattttttttaaaacatatcgtttaacagttcgagaaatgtactcactataaatgagaaagtagatcagctcattagagcaagtttaacagtatagcctactactagctccaaatcatttatagctaatgtaataaccaattcatacaatagttgcttactataccattaatacctggtcccacctgtcatacacacattatatcttgaagtccatactacagctggctacaaatttgtagtccgctgctcttctctctcttttttatctttttaaaatatgtttatagctggcttgtagcctgctattgtacctgctcttagctgataagaacccaaccttagactcatattggtgtagccataatggtggctgttgttttttaatgcaattttcacgccccgagaactattagggtaaaacaggattatcttttgtcactgaacaattttgatggtataacctcaaacaagtttttttgttctaaagagagaagttcattgtgacaatctagtattctactataatcgatagcaaagtttaaataaatactcctccatatctaaaagattgtctttttattgtgaatctagagtcctcaatagtgatgtccaggtttatagctaaaaagctatccaaattcatagccaaaatgatactatcttcgtcccaaaataagtttacttttgacacaacccacacataccaaacaaaaccagaaagacaagaatatccatactatcaaatctcaatacaagtattccttactttatcttcttccaatacatcaattttgtactttcacaaactttgatgcaatgatagctttaaaaatgaacttattttggtacaaatggaagaaactaaaaatatgggacggaggaagtactcatttaggagtaacattcaagttcatagcttttttttttgagacggagctagttgtactcaatatagagaaaatatatttgattttgagaaaatgtctttcaacgttaaacaaatttgagataagggagcatgtggaaaacccaaatcgtcactaacatgatcttaaccaactttataacctcaaacaagttcttttttttaaaaaaaaaggaaaaaacattgtaacaatatactagcattctactataattgatagcatagtttaaaaaggtactccctccgccctaaaagaatgttttttttactatgaatagtgtctaggttcaaacaagatataattaggtatctaggttcaaacaagtagatagaaaatactattttagctatgaatttggataatattcattatctaggttctattgtccatgttaattgctaaaaatacattcttttggggatggatagtgttatactcactatagagaaaaatagtcgacgtcgagaaaattgaactcggataatcaacctcaaataaatttgacagaagggagtacctgaaaaaaaaacccaaatcagctccgctcggcgtcagctgatttggaggaaaatctctacgctcaagcttcctaaagtactaaatgttgctcttttttttaaaaaaaagaaaaatcacttaaaaaatcaaatcaaatcattttttaatttaaaataattaataattaattaatcatgtgtttatctttttttccctccttccaaacacactcgagtaccccaagcatttccccattccaaccctgcgtagccagtaggacatgcgtattgtggtccactcctccgcaaaaagcgccccccaccgtccacccccatcgctttccaccgtccaatccaaatccaacgtccacgattcccccatctgccctaaacccccacccccactataaaacccccatccccttccacaccgttccacgtctcctcaactcagatctcccccatttcaactccctcctcctccactttcccccccgcatcgagcagcgaagcggcgatggcggaggagcagccgcgcgcggcggcggagggcggcggcgagacgctgatggagaagatcgccgacaagctccacatcggtggggacgggtcgtcgtccgactccgacgctgacgagcgcaagcagccgaagccctcggcgccgccggccccggccgaggtcgcaacggagtcgtttgttgattcggctgctgctgccgcggccgaggccaaggccaaggtgttccgcctcttcgggcgcgaggagcccatccacaaggtcctcggtggaggcaaacgtatggctgctctctctctgctgatgatctctctctctctctgtttcaaagctgatttggtttgaatttgttagagcgggtggggatgggctggatctggattgattgggagtgttgggtttcgggctagatctggtagattagcacttggccaatgggagtagggttttagccttttgctatgtgtgaccatctattcagatctgtgggtatttggggatgagtttagatatctttgacaaatcggaacaactaatgtgatcctcgctgtgctagttaattcaaatttcggcaatgcaggttgcgtgcgtctcgtatactcgtatacaatctgatctatgtgatttcattttatccgtatctttttgagtaagtagtggacatgtttagctttgatgaatcataagcgattgtggcaaagagaaaaagatatgcttgtatgtgtcaggatccatgtgaagcggggttttgattgacatgtaaaaagtaatggaataattgaattcatgatttccttggttggtctgtcacattattgtctgctggtgtgctagtactggtccctttagagtgacaatgagcaagaattgaactgtttgtaaacagtatgtgtttgaaggttagtgattagcaatagtgtactccgcctcgtcacacagttaagccgtagctaacacaatcatattgaatgaggatgtacctcattctggtgaatccttatcaatagctacaaaggattactataagccacatatgctgttgattattgctatatttgtctgggattgttagtcttctgctgtcctgccttcaaaacaaacacctttgctctctccataggggtggtcatattttgtggttgaggtgaaatttccattatgtgctcatgttatatagcctgattatccattgttcatcctgccatattgatttcagttctctatttgcagccgctgatgtgttcctatggaggaacaggaacatctctgccggtgtactaggcggtgccactgcgatctggatcctttttgaattgcttggctaccacctcctgactttcgtttgccatgggctcatattctctttgggtcttctctttctctggtctaatgcctcatcatttattaacaagtaagattgtttttcatctctatcacaacttgttcaagttttggcaaagcataatcatgttccacaggtagataattacataaaaggtctctaaactgtgccctttctttcaggtctcccccgcggatcccagaggtgattattccagaagatttggttgtcaacattgctctatctacacgttatgagatcaacagggcctttgccaatcttcgtcagattgctcttggccgggacatcaagaagttccttattgtatgtctgtgatgcttttgtgtttgtataattattgttcccatagcaaactgaatatttatgatctataccacacttttaggtgattgctggcctttggttgctttctgttcttggaagctgctgcaacttcttgaccttggtttatattggtaagtggtttgggctactttggacagaattattctttattacctcttcaaactatagatttgactaatgttagatcttttgcttcttatgccaaacagtgtttgtggtgctgcacacagtcccaattctgtatgagaagtatgaagatcagattgactcatatggtgagaaggggtgggttgagattaagaaacagtatgctgtgctcgatgctaaggtcctgagtaaagtaccaaggggccccttgaaagacaagaagcactaggaagaggtgatgcagtgcctcgtggcaggtgatagtagtggttgggttgtggttcttgagatgcactgctgtcacctattgccttgtgttgtgtatggctcttttgttgtctgatcttgatgggagtagctgagtagcttgcgctacgacagtatgcagctgcagcgcatgctttgctccatcgctgtttgatttttgatctgtaagatgtcgcatgcatattgtttatgcgatattgttttgttactaagattgctgcattttggaatttggtgatatttatgaaccaatgttgagactagatgtcatctacccgtcatttttgttgttgacgttggtgaaaaatcttgttatgattgcgctattaaagattcagcctgcgatgtgcacatttattttttcagtttgaagatgcacataatcttggacatataccgaaattttgaagctattccaaactttggctttaggacttggaaaaatttgtggtgttgcgtcactcgacgagtcatttggggaatgcagcatcattttctatccataatgaagttttaatattgaaacatcatctgatgctgctttgtaaaggcttataaggaaccaaacttggtcccttcgactccttgagtccttgatccttgaaagcaaaggtaacacttgggcttctgatgttcacttttgctcttcttccaggctaatctatgagctgccacagctttctcacatgccaatgtgttgagtaaccatggtctcatcatgggcagcactaccggtctacctttgcttttttgcttcctcataagccatttgattgcattaaactctcaatctggctaatataacaagctacactttcgctctcaaaagatgattcttccgcgtcatggttcgtgcgatgcgcttagattcttgctgcagcagtgcagctagccggcatcgctggaactcgtggcgtaatggcatgtttggctggtgccagccacactttgtcatgccatactttcttatttttggttattttggcacggaggagtatgcaaaaagagcacagggatggaaataaaaaaagagacaaaagaaaacaaacgtccgctccggattcattattctgaagcacaacaaccggaggcaggcaaaacatagtccctgtgtatggaagttctctatcaagttttacaacaaaaaaaaaccggtttcataaccaggctcctttggtcccaaacattcttaactggtggaacttaaaacactggactattttcacatggttgttttccgtctattctagttttcaaattatgttcatacactctggatatttagatagttcagagaaagtatgtcaactgttgtttctttctggagcctccttcaccgtacaactcattccattgcttcagctcacccattattgttccttcagcagcaaagcttgccgccacctgcatttcaaagtttccacaaattgttaacaagcaagtataatgctaacagtttttcagttttatattagcaagaattacgttctgtgcatgtttcagaattctaaattcaactgtaacaaaagattcacctggttttttgcttctttcaaatctttcatgtttagtggccttagtatgatcgtctcgtccttctctttcatcttcgaagcatctgaagcattgcctccttgttcccgcttcttctcctgaagatattaggcatatatattttacttttagtataaaatttcacaaaattgtctccagtgaatgcttaagtatcgcagtgactagattaccagttccttctttctttccttttggatcagttccctcactggacgatacgctgctgttgtgcacaggttctgtcacacagcagactactgagttaaccaaagagttctttgggttgacatagattcatgtcttatgatactgacctttagatcactgccactatatccttcagtcatggtggctagttccttatagtctagaccgccatcaactttctccttcgacagaaggctcctcaaaatcaattcccgactttccaatgatggcaggccgaccatgatcctaaagaagcaaggcaatacactcaggcatggaacttggaacaatcgaaaggggctaaaaaaaagtttagatacagatgagagaactagcatctagcaaggaagagatgcaaacctgcgctcaaaccttcgaatgatagcttcatcaagatcaaagggtcggttggtcgcagcaaggacaagaattttttgatctggtcttgacaagaggccatcccagtgtgtcatgaactcattttttatcttcctcattgcctcgtgctctccagctctgttccgctgaccaagcatgctgtcgacctcatcgacaaaaatgatcgtcggtgatactttggcagctaatgtgaacaatgctctaacattcttttcatcttcaccaaaccatttcgatgtgatagtcgacattgaaacatttatgaaactcgcttgagcttcatttgcaatagccttggctagcatcgtcttgccagttccaggaggaccaaaaagtaatatacctctgcaaggtttaagaagaccccctttgaagagatctggtcttctgagagggagcatgacaagttcttgaagggattctttgatatcacttaatgcaccgatatcatcaaatgtgacaccgatttcattagcaggtatcacttcaggtctgatgcgcttttcaaactcattgtctggcggcatttcctgaatacacgaaaaggatgcaattacacattatcaaaattagattcatggggcttgtgaaagtaacataaaacgacacaagatattttttaagaactacgtatgatatatcaaagtcataaaaaaacctttcaataattgatttcaaggaactacgctttactctgcacagcattcaacagaacgacacttccataataaccaacggttctgtaatagttttgctggtgcacgtgtgcttttagacttttaattaatgctcttacaggtgcttttgcagctggagatggattatccttcttctcgaatttctctggttctgctttgctctcaacaggaggggcagcagcagctgtaggaggtactggtggtagcaaagttgcaggttttgtttctgattttgcagcaaatggagcaattcccctgtcagccacctgtatgtgaggcataatacatgaataacggttcgttaaaaaaaaacatgaataactacaaatcaacagaatattcggaatttcctgaagcgtatgaagttaatccaaaagcagtagaaataaaacaaacctttgaagcatcacgctttgcttccaacttcatgctatccttatcatacatcttgttctcttgaaaaatttccagtgcatgggacaagctgtgtcatgagagagtcataaagcggagaagagatgaagaaaccaacagacaactatacaaaaatgctaagtacctctttgcagatagaagtaattttccgtttcggtactccggatctttcttattcatcaggtgataagaaactgctgaaaccacaatctcctcaatgtacctacctagaaccatagtatcagataggcatatcgagcctaaatcatcacactcaaggtcgttttcggcaaggacttccgtaatatggttccggttatcctggaactgaatcatcttcatatcttcttctaattgggagttccagctcacaaggtggttctcattttctggtggcttgatttcgatgttgtatggaaataaagcagttagtctttcatccaactcttcatcaaagtccatatccacaattcttgagccaaggactagcactggcccttcaagtttattcagtagtttttcaaacatgacatacatttttttggacttgtgaagaaacttctcaacatctcttatgtagagaacaattgggttcttcttagatactgaatgcagtaccttgtatactgcttgcaccaaaatcttctcatcaaaagtccagctgctagcacgtctgagagaagctgcagtgtttaaccaaatacaacatgactcatgagaaacagatataggtgcaaaataccagaagcctcaggacaaattttgtgtgcaagagattttaatatgacctggattatttggagggccttgtgatgccagactactcatatcagatgaagttgaggcattccttttaagcttcgggaagctgctcgtactttcagagctcctgcaaaatacataaagaaagcatatcaacagcagccaatgatttgcagtttctgtaacaggttcacagaagcacaattttccagtaccttaatttcatgtccgtcatgctgctttgtctacgaatagttcctgtgataaaaaataaaccaaactaagataacaaatatacagctgcaaaacttcctgaggtagaatgaaatacataattcagttattctctatggtcattcagctgcaaaacttctgaggtagaacgaaatacaattaagttatgctctacattctgcaaatgcaagcaaattcaattttttttaaggtaagcactattacattcgttcacagcatcagaatttcagaccaaattgaggctaaattatgtgaagtcaagaacagttgttttgcgctttgctggcagtaagtgtacttattcattctctcagttcagcaggaattgtagttttctgaaactctgtttgaataccgatgccattcatccatataaataacagcatatacagatggaatcgctagacatttttgtttcagataactgagaatgacagcaacatggttgtattcaagatctcaactgtggtgtgcaaaagtgtgaatttcacatgaaaatacatgttccatctagtttgttctaatagaaatgaaaccagaaaagttcatgtcgtctgctaatgactgagcagagttgcaaaaattccatgcaagaactgaagcagactactgacaagcaaacataattattctgccctacttcagaataaggaacagttgaacatttcttattgtgaagtcgatcatgtcacctttgggtttctccttttgtggtagaatcgaaagagatccaagtaatccagacaccttttcaagggtcgtctcagatatggatcttttgaaagactgataaggagaaagtgctcacaagttaatagttaatttaaactggccactacttgggcagttgataaaaattctaaatttcgcaacaatgtagggaaaaaaaagcactacaatgtcaagaataagcaaaacaggacacacacatttatattctccaaggttcggaaatcagaagaatggtgaccttacaacaaatacgacaaagcgtgttgagttcttaccgagtctgtgctgctaccaccaccatatttgctatggatctgtgaggaagaaaagtctgtatcacaaacatacttaaaaatgtacatgaaaggaaatctgtgccagccaaactcacctttatgagaaaatctgtaggatctagcaacagcaattttgcttcaaaatagtgggcaagcgctttggcaagcatttgctggtaaagttcttcaagataggaacttaattagccttaacttagtcagggccagaagaagagtgattcagcaactccttaacctgtgcaatggaatatgatttacctgcagggcctgacaatagaatcgcacggctagctggtgcaagattcctggtgtattgtgagatgtctgcttgcttcaagtgaacatacgccgcgcttgtcagcaatacacgcgtttgctcgctgcaaatcatagtttggggaaaaagagaaacaaaggatgatgacatggagggtggaaaaggaaatgaacgtgtacattaaaaaagagaacagagctagaaatctatcgttcatctagcatcttccttgtcctgctgggtgatcattaaaattgaattccagctaatattttgatcttgaaagtgaacaaacagacgtttgacgtctcatcgatgttgttctgtatgtgttctatcgtcccctcattttttttctttaaccaattctaccagcactacctttcaaggctgccatttttcaatcacaaagaggaacatttcagaaaagcagggttgtctctcttcgcctcccacgcaaaattatgaacaagctaatctacagaaatatagcagtgccactgtcttcaatcagagcgttcattttgtgatctccgagccaaaagattgttgaaacctttcaaaacatttctctctctctctctctctctttttctaatttgccaaactacacagttcatctgtaaatctgttgcttgcatatcacagactcagaattatttgtgcatgataagatcataagaacggagggaaaaacatatcccctatacaggacagaacaaaggggaaaaaatcctaaaaaaaaaaatctgacgatgcaaggtgacggaacagttgcatagctcgatgaacgggaggaaaaaaaagacgttgttgatgttaatcacctgaggtagtaggggaacccgtcgaaggtgaccctgctgtcggcgccgtcgacgacgaggcggcggagctcctgctccaccctctccaccgtaaccccgaccctcgccccctgcccgccgccgcctgcccacggcgcggacgccagccccagccccaccccgacgcctatcccgatccccaccgccgacatcaccacgtgcttcccctccatcccctccccgccgccggcgttcgtcctcctagcaaggtggtgagacgcacggagcgcagcgatcgatcggtggcgcggcgcggcgagcggaggaggagggttaatgcgggggaggggtggaggtggcggaatgggtggctcggcgagaatg

SEQ ID NO: 10018 - DNA, 41504 bp, Oryza sativa
ccccccccccccaccctccctcaaaaaacatccatcgtctttctgtcaagtccgtcgcggcacgaggcacaggcggccaccgcggcgcagctcggactttaactgtagtctatgtaataaaaactaatttgcgagacaaattttttaagcctaattaatttataattagagaatgtctactttagcatcacataggctaattaggctaattatggattaattaggctcaatagatttgtctcataaattagtctaagattatggatgaatttttattaatagtttatgtttaatatttataattaatgtccaaactagatctaaacaggtctcagcctcggcgtgccgtgccgtcgcgtctgccggtgctcgcgcccgcggggtctctcccgtctctcgcctcggtcgccgcgaaaggcgacagcgccgaggccaccccacccacgaacgtacgcgcgtggatagcgtcggtgccatctcgtcacggcgggcgcgaggcgacgacgccgcgggcggcggtgcgtgacgggtggccggcctctgcccggccggtggcatgggtgcttcggtgcgcgcgcacgtacgcttgcgggttggcgcgacgcgtagctgggcatattgctactactacgactcactagcgtactggagtacactactaccgcccgtgtaaatacagccactgcactgcagcatgggagtgtatgcacacactgtatacgcacatacgtacaacacgggcggtacgtgacagaagctacactacgtaccagcctactacgacgtggcgtcgacacgccccggagttactgcggcctgcgtcggcattgattcgggaagtggatctacggcgccggctgttagagcatgtacaatagtatacttattaaccagctgcaaatatattttaataagataaaagataagagagaaaagcagcggactatagatctgtagccagctgcagcacggactctaagacctaatgtgcgtataacaggtaggactatatattaataatatagtaagcaaatattgtgtaaatttgacggagcgtggagctcctcaccgggagaccgcgcaggcccccctttgccggttcggccgggggcgctaagtgaggttcttcgccctcgatcgatcacaagacacgggcgatgtagacaggttcgggccgctgagaagcgtaataccctactcctgtgttctggtggatatgtgtgtgaaggagttacaaagagccggagagccagagagttcaggctccagaacccctctagcctccttttttctttttttttctctccccttttggtgggcaaggtcctccttttatatctcaaagggataccacatgcaccacttctacctacttttcttttgggtggggacctaccctatcttgaccaaaacttggctcgcgccttcgcctggaagctaaatcacagcttgtccttgagtgaggcccagcgccatcactcgcctgacacaggggataaccctgtcattccttcattaatgggtggagatttgcaatggccgctgtccgaatgaccctccgatgggatgggtcatacctacctccactccgccggaagcagatgcaacgtgggagcacggttgtctgccgatgacgtgaccggcgtcagaccagtcacagaccggtcattcttgtccaccgcatgtcagtttagcatgccgcacgtctacccttcttcatacaatgacttccttgccatggttgcgatgaagcctggaatgaatctggccgggactgacataccaactccaggagttagcacaccggctctggctagggacgagtgcctggaggctctcatcattccgacgggacggggcgaggcgtgtgtcaggccgcatgttgccacctaacccgtgatctgaccggtctgtgaccggtcacacactgtgacctgtcacggaccgaacgagtgtgctgtgctgcattaaatgcggcgtggggcgctcgtccaacccgcaataaacgcggttaggtgagcgccgttgtgctcacctaacccacacacgtggcgccaaacccacagggggtcggggcgccccagtcctcggggccgaaacgggagcggcccgacccctcggggagacagagggaggggcggccacaccacccttgggcccgacccccccccccccccgagggggtcaggccacgtgggtgactgcagctgccccaaacctctagtcaagatacccccggtcccatgtcaccgacaaaattagctatagatgaattagaacctagtgagctatactattaaacttgctcttaagcctttttggacgtaccatacgtcttcaccctccctcggaagcttgcacattcgttgccgtgggccatgtccgtcagcctgacgcaggcatccactcgctcattaaccgcattgactttcttagatctctagtagatgagtgaagcatagactaatcactgcactttagataatgtcagaatagcataaacgtgaaccgtatccaccgatccacgagtcggggaatccaatgccgcgagcaacgcaagcgctagccttcctagtccgtgtccaccgatgatggagtggttatctgtttcaccgctcgtccgatccgagccgaagttaaagctgctgcagcaccggccagttgagcatttaccacagcacgtccaccgcaattcattccgtcgccatggccgtgggctccgtgcatccaccatccacccgtctcgctcagaggacgcgtgattttattccatccctcttgcattgcaccaatcaagcgcctaataaacactgttagtagacaagcgccgcgtcggtcccagcgggagaatattattagcgggcgatgcatacggccaaggtaggcacacagatgagacgagcacggtacgtacgtgagggagacccgacggcctggtggtggctcgccgccgcggctggaccagctgatagcgcgcgtgcctgctggtgccaaggccggaggcgcgtacgtacccgcctgaatcatttgctactacaggcgaataggcgatcgaccggtagtcgtcgtgtgtgcccctcttggcatgtgatgtgttcgccgcgtcgagctccttggttggcatgcatggcgcgcgcgcgcgcgatgggtggttacggcacggtgtgtgtgtgtgtgcgcgcgtgcagtacgcgcgcgccgcggggagggaccgagggagggagggagggacgcgtacgaaggctaaagccaagacggcaacgacgacacgacgacgcgttggaaagcatgccgggaatgccgtgacgggatggtttgattataactagctgggtggcccgagtaattacgcggctagcacccatataaaattatatatatttttaatatgattttacttaaaatttattaaatagttctctcgttgtcttaagattttaaaataccaaaccttattatcctcgtggttctaattttgtagtttttaaaagacacatcagttgctacccttgcttctgttatattattttctattagctttctcgatctaccattctccttataaccttcatctaaaaacttatattttttagagtttattgtcctgttgggattcttttttataatttttagaagtctcgtcaaacgctgctattatactcctctacaaccgtccactgtatcttctctttattgttattgttattttaaaaatcgaacataattattgtttagcttcatttttttactttctagaagttccgccaaaatgttagcgactttgtctatctactcctctacagctcgctcgctgccgcctttctttaatgtcattgagattttaaaatcaaacatcattatcgttggggattttttttactttttagaagcctgaacttttaaaaattgaaccttatagtttttagagttttattgtcttgttgggttttatgttttttataatttttagaaatcccgtcaaacgctgccactttactcctctagaagacccaccaaccatcagcggtctaccattatactcctatacgacccgcccgctgcgtctcatttttaccgtaattgagattttaaaaatcaaatatgattatcattagagtttatttttttactttctagaagtccccgccaaccgccttgacagatagcttcacgacctacccgtcgtccttccttttaatcgtcattagaattctatttggtcatttattaatagttttttagatgtctcatcaaccgccacctctctgctcctttataggcctgttatttaattaatctcgtcatgtgttttagatggtcttttctttcatttgtcttattttttatcaccgattttagttatttataaattgtattcctagttgaaatctttttttttctaatttcagaatttattttatttattattatgttcttttgatattcttattttttattttttatttaattgtttcaaaattgtattcctactttaactctctttttaatttgcctaatttcggattttattttatttttattccgaattttaattaatctattattgggttcttatatgtactctcatttcaatatttcttatatttaattctgaatttaagttaattttaaattgtatttctacttgagctcttattttcttttattttttctaatttcgatttttttatttttttattgtgaattttaattaatttggtattggattcttgtatggactcttctttcaatattccttatttctaattccgaatttcagctatttataaattttattcctactcgaaatcttcttttttcctttttataattttgaaatttatttattattattccgaattttaattaatcacgtattgggttataaaaatattcgataaattgtatttatttttatcccaaattttagttatttataaattgtattcctaattgaaattttatttttctttttctaatttcagaatttttttgaaaaaaaaaagttaatactgtattgtgttcttttattgtttttattttttattttcaatttcagttgtttcaaaattgtattcctacttgaactctcttttagtttttctaattttagatattattttattttttattctaaattttaattaatctcgtattgggttcttatatggattcttctttcaatattgcttatttttaatttcgaattttatctaattttaaattgtatttctacttgaactcttcttttattttcttttgctaatttcagatttatttatttttattctgaattttaattaatctcgtatttggttcttatatggactcttcttttaatatttcttatttttaatttcgaatttcagctatttttaaattgtattcctacttggactctcatttccttttctaattttagattttattttatttttattttgaattttgattaatctcgtattgggtttttatatggaaacttctttcaatattgcttatttttaattccaaatttcagctatttttaaattgtatttctacttggactctccttccttttctagttttagattttattttattattattctgaattttaattaaccacgtattgggttcctacatgaactcctctttccatattgcttatttttaattccgaattttagctatttttagattgtacttctacttgtactctctttttcttttttttcttgtaggaatttctagtctccacggcgaacgtggtgcctatttttaaggctattttaataatataatagatagattacttgattggcgtggcgctgatgacaaggaggcgggaggaaatcaaatcatatctctcctcgctgtcaacgtaccatgcgggtcagatcagctcacagagtcatcgtttatgagaattgagggcttgcaaaactgccactggtggcaaaactgcggtcacatactgaacggcatgagagttactgccactgtttggtggccgcttcatgagagagcttgatcgatcatgataagctattttcagggatggaatgctcctggtggctactaaatgtatactaatataaggtgggggctcggctctgattgatgatttgatggtgactctgccgccttgctccaaactgctaatgatttcagagaaacaaaaagggtcccaggatgctggatttgtctctaagaggttataaaattctcagcctttatctcttactacttactccgtatcaaaatataagcatttttagctataaataactgtatgtttagatttataactaaaaattgttatattttggaacgaggtagtagtagctgctcaatagtcaagagtctccttcctgtttcagaatacagtatccggtacagattttaattgttgctcctgaaggtgcaatatcatgctactattagtaacgctgtgctcaggcgtcagaggagattacaacagtaggaaacacagtagtaatattaggccattaaaaatgtacagtcccccctatgggacccataactttcattcacattaagttctgatgtgctatcacctaaacctcctcctagttaacgagcactgtgcctgctctgccctgcagctttgtaatgctactgtactagcgtacagtacgtgtgtgctcggacgacatgtgctaactggcaggaacagagaacagatgaacttgctctatcagatgatgggattctgatttgcatgcatgtgcattgtttactttgatctgggaatgatcagccgagttgcactgagattgacaaagatacatggacgcagtacacacctcaacgagttagagtaaccttaaggacagatggcatatggagtggctatggctgtgtttagtttgtgtgctgatttttttttatatacgaacacatatttgaagtattaaatgtagactaataataaaataaattacagattctgcttgtaaactgcgagacgaatcttttaaacctaattaatttatcattagcaaatgtttactgtagcaccacattgtcaaatcatggcgcaattaggctcaaaagattcatctcgcaatttacaatcggactgtgcaattggttttttcctccacatttgatgctccatacatgtgtctaaacatttaatgtgacggaaaagttagaagttcgaagaaaaaaagttagaatctaaacacggcctataccgatcttggactgttgtacataattgttttagccattaagatcagatcaagaaatgagcaagtttaatagtatagcccactactagctccaaatcatatatagccaatgtaatagctaattcatacaatagttgcttactatactattaatatctggtctcacctgtcatacacacattacgtcttgtagtctgtgctgcagctggctacagatctgtagtccgctgctcttctctctctttattttatctctttaaaatatgtttatagctagcttatagccaactcttactctctctgtttaccaaacacatgggaagagtatagaccttgcttttatcacttactccgatccttctattttagaaaaaaaaacaacttttatacacaaatttgatcatgacctaagtctagatataaaagttgttttttttctaccccagagagtaagaaacatcaatattcttttgtgatttaataggtacaaatatcttatctctctataaagagacacatatacattatggctaacattatacgatgcacttatatatcccaccttaccactagcaccggcaagtactataccacatgcctctttcaatccactcttcctccaaccctactacttaaattgatccttcattttgccttttcttgcttgtttgcgttggatgtgcccattgcctcctaaccactctaaatacgatgtcctcgatcacacctacatccatggtcctcctctagcttgtggctagctatatgcaaacattgtcatattgctgtcaacgctgctctcgacccggcatatataaaacatttcggctatttagtgtcatggagttgctaagtatgtgattttacaagtactattatagcatcttagtccacatcatctttgtgattttgtaattcgttgccattcatcttacaacctctctaataattgatataactttctttaagcaaatgccgaaatgaattcattatctaaaaaaaattgcttcatgtagccatttcaaccgtcatgcacgtatatatgtgtgggataaatcatagttaaggtaagattgtttggtatcttggtttagggcatcatcaatgtatatggcaaaagtggtctatatagataggatccacataaataaactttacctatagcaatcctcacaatgtatatggatacaatgtgacattaggagaagagagagaagtagagatagataatattatttatgttatatgggtagtccatatgcatatagataccttttgctattttctttatatggactagttgcacaatgttactagatggctgaatggaatagtttatttcctatggactacttttgtagtacattgtggatgcccttatatcccacaagaatacaatatttatgtgtgctagcttacttgtgctgccaatcttgactttaatttagatcacttgccaaatatcatacctaaagctaacttggataacaaaaggcatgatgaaactaagggtgtgtttgaggagaaggggattgaggagattgggaagatacgcagaacgaggtgagccattaactcatgattaattgagtattaactattttaaatttcaaaaatggattaatatgattttttaaaacaactttcatatagaattttttttgcaaaaaacacaccgtttagtagtttgggaagcgtgcgcgcggaaaacgatgtgcattcttactccctatcacccaaacgaacacatcctaagtatatatagacaacattaatgggtgagtttgaggaataggggattgagaagattgagaagatacgcaaaacgaggtgagtcattagcatgtgattaattgagtattaactattttaaattgtaaaaatggattaatatgattttttaaagcaactttcctatagaatttttttttgaaaaaacacaccgtttaatagtttgggaagcgtgcgcgcggaaaacgatatgctatctcacttattgtccatgtaacgaacacaccctaaaaatagacttgactcaaaatcctgaaggccgaatctgtgaggaagaatgcccagcacacaccgatatgtaaaaaccttttctcatcaggcggattttgtgcttatatgcgtgagaggcggaggagacttcaaaagtctatgtggaggagacaagtattgtgcatgcgcgggtaaaccggggaccggagcgtacgtgagtacttgcaccaggtactaaggagccatgcaagatgcaacagtagtactcctacagtagcagtagtactggcgtcacacgtgaggtctctcgccggtttcagcgactgcacatggatggcgcgggaatctctctggtcagctcagctcagcttgctgctctgctcttacactacacgcaagtgagcacaggtacagcgtcgcggcatgcgtctcacggattcaccaccattgcaacgcgacgccgtcatgcacacaacgatactctccgtccaaaaaaaaatcaacctagggtatatttagttcacgtcaaaattagaagtttagttaaaattggaacgatgtgatggaaaagttaaaagtttgaagaaaaattttgaaactaaacttggccctagaagacggtatgaccactcctaatacagtgaatctaaactatactttatctatatttgttgttttaggaaggaccaaatccggttctaaatttagttttttttaaggacggagcgagtactcgacagccacatgataccgcgctgttgaaaaaaaaagatactatacccttttctttccccctttcactagcacttgttaataaagttattacggccatttgcatggagagaacagcagacgagaacttaaaccatgtttattggagatggagtagtacgtactacgtagtagcaagagtgcaatactatcaagtaccaaccggtgtaagttgaactctgcttgagttgaaacttactcgctccatcccaaaatatttgacgccattaatttttttaaaaatatttgaccgttcgtcttattttaaaaaattaagtaattattaattctttttctatcatttgatttattgttaaatatacttttatgtatacatatagttttacacatttcacaaaaaattttgaataagacaaatggttaaacatatttaaaaaaaaatcaacggtgtcaaacatttagggaagaagggagtagtatttttttgggttcagatcttgccacctaccttgggggagcttcacgtactcgatcacttcggattcctgtttggcgttggcatcaatccacttccagaacagtaagtaattaactaacctttcttcgctttgtacgttggtgtgctcgatcgtatcacgtgcaggctcaagttgagcaatttagcaagtactccacttcagatgaagacaacagtgctacgactaccatgaacaagcaaagctccttactcttctctattctgaactcttctaatcaatcaatttactataccgatacgagtagtatatggtaactgttgggtgactcgatctgtcagatatcttgatacgtttttacaggaagatgttaattacactgcctgcccagcttctcctccatctggtaagtggtagcgacattttcgagtggatcgatcagatccggtgaaagttcagtgcacacgcacgtactacgccgtgaatgggcagcagtgactcgtcccggatcggagtcggggagccatgtgcgaggcaccctttttcgaaggccgctgctgccattctgcacgcagcggcagaggctgtctcgcccggcgccctgttctcggctagctgcttgctcgcactgaccgatctctgcaggagacatgttctgtccggtgtccggaaacgccatggatctagctcggacagcgcgccgtacgtgggcgcttcacggggcaccaacagtggcaatcttgatagccggaaaagctctgaaaaatcttatccatggagctgaggttgcaatcaacagagcttggtggagaggaagagaagatcactgtacctggacaacgaagctatagccatccatccatgcatgcacgagtgcatgatatgatgctgtagagcagagcacgaggaagacgatacagggaatgaatcaaattttatatccgggtgtatatatatctagcagggggaaagattcagcagtagatcttgtcgctaaatctcttgcgatccacgctaactgacgcgttaacaaagggaagtgggcaatttgaattggaggggcgctcccggtttcaaaatctgacggggtcccgtctgtcttctgctaacattggtgaccgcattgcaacagatttgctcctgtatcagagggataggtgtctgtccacgttttgttctttcggctcgcagtacatgcatgtgtgcagttaaatactgctatatggtaagttgttcattggtaaacaatgtagtggacgtgttgaagttcaccccacacgactagtttcgaaagaaggataagatatataataaccacagggaagcacacgaagaacaattatctttatcaactctctgttcttcgttcataatcttgaggcagcatgcggcttgcagggatgaataaacatagcaagactgcaagagtgagtcaccccatctaagcagcggggagaaggtgaatagttcatgggccttgaagttaccaggccggtgcccatggcaaaagcatgggcctgcatttaggcccagtctagaaagcagagcacacgatttcactgcggagtaagttcaccggaagtccctcaacttaacagcgagatttttttgaggtctctcaaccacaaaaccaaaaatgtttgaccctaaactcattcaaaccgttcacaggaggtcccttggcagtataggtgggtggcttcgcttacgtggcatcctagtcagcaaaaaaaaattaaaaaaaattcgtggggcccatatgtcagttgcactttatttttttcttctcttttatctcctcttctctttcttctcctctctctttgccggcggcgggtggcgatgggcgagcgtgcgactggagtaggtggaggggcggcgtcagtgcgctcgagcaggcggagcggcggtgtctccgggtgagcgcggctgcggcgacggcaagcggcgggcgagcgtgacggcaggcaagcggcagctccgagtgtgggcggtgcgcggccggagcaggtggagcggcggcgtctccgggcgcgggcggagcagaggggcagggggcgcggcgggcgagcggcggcgaggcgtcgcctctttccccctctcccaccagcctcatcttccccaactccgtccgctcccgctgctgcggcgcgccaccacgctgggctccttcgatgagtgcgacggcggcggcgggaaccagcggcaagacgacgtgctcgttcgctctgtccgctttgcgcgccgctctcgccgcccccgccgaggcgactagcggagtaggccgccacgctcctccttcggccacctccgccgttgcggccccctcatccgcctgcagtgctcatcggctcgcccgacgcccgccgtccgctctgcccgcagctcgccgcgcttgccttccgctcgcccgccgccgtccaacgccgctccgcgtgccgccatgccgcccgcctccgttctgcccacaggccgcgctcggtggacagcgctgctcaaggatgacctcgtgttcggggaccccaacgcgccgcggttccgcctccacctcccggatcccgccccaacctcctgccgaggtcgcccgcagtccgtcgccgctctcgccggccatcgccccgctcctgcctgcttcgcctgccgcggccgcgctcgccctccgccgccgccgccgctcttgccggccgttgccccgcccgtctcaactcgtcgaagaagacgagagaagagaagaaagggaaaaaaaaggaagggatgtggggcccgcaccgttttctctcacttacatgtggtccccacgtactttatttttttttgctgactaggatgccacgccagcgaaaccacccacctatactgccaagggacctcctgtgaacggtttgaatgagtttaggggcgaacatttctggttttgtggttgagggacctaaaaaatctcgctgttaagttgagggacctccggtgaacttattcctttcactgctgcactgcaccggcctacccctccaggctctaccccaccccacacatctaagcatagaggaataagttcacattgtatctcatcttaatgtgacgtttgaatgacatccttaaactgcaatataaaaacattgaaccccatcttttgaaacaagattaaataatatcctaagatagtatagatgactattttggccaacatggcaacctagtaaaaaaaacatatgagatccatatgtacgcaagtaggtggacttccacctctcccacatatcccctctcttcctcctgagctgaccagataggaagaggggcacgaccagtgagcgcgtctgcgggagacgataacggcggttggaggtcgatgacgagggaggtgtcagtggtctgtggcggcggagcacggctgctgacgacggtggtgtcccctttcgaccccgtacatcaatgacgcgcagccggaagtggcaggtggccgggacttcaactccaccagctgggaggagacgtgctcctcgtcactaacgtacgaacacgatgtgttggctctacaactcgataatcaggggcggatccagcgtgggtgctggggggactcgagtcccctctaccccactggatcaaccattgatagaagggaatataaaagggaaagaatagtgaaaaaatgaagagtagggaggactaaagaagaaagagataaatccttaaatcttgttctggatccgcccctatcgataatactatattgccacccctactgtcgtcctagactcaaggtttgctcacgcaaccaattacattggcatatttagcttgtgagttaggtggctcgttatactcctttcttcccaaattgaccatcatatatgtttatgcaccaaaaccaaaaataatttaaatcacatcaattaagacaacatgcacacattctactataatgcatacatcgattaaaacaccatgccaatcacaccttagcatgcacacattctcccatgctgtatcaattgtattctgatgaatctgtgtccatgtggttatatgacgatcgatttgagaaattttgaatttcattatatgatgatcaatttgggaaggagggaatatctataacgagataaaatcttgtcttagcacgttaacaattttaaaaggaataagttcactttgggtccctctatttgtcgcctagtccgattttcgtcccttaaccgcaaaactgggtatgacccgtcccccaacttacgaaaaccgggtaaacgtggtccctcggctgttttgaagacggttttggcttacgttgcgcctacgtggcttgtttgtcttggtcttcgtcccacgtggcattgacgtggtgtttacatggcaattatatctcggaaaaataataaaaagcgtggcctcacatgtcagctgcacaaacaaaaatagtttttaaatggtggggcccacgtgggccccacatgtcagcctcactcatctcttcttccctttcccctctccctctctctctccttcccaggcaggggacggagcgggtgggtggcggagcaggcgagctccggcgacggcggcggctgacggcgggagcgctaggcgggcagatgaatagggcggcagcgcgaagccgaaggggcgccagcctcgtcgtcatcttcttccggtgcacagcgatgcgaagccggtggggcggggcggggtagggcagcggggacgacatgatgcccggcttgttcgggttccatgatcatcggaggtccttcgatgggctcgccgcgcccttctcggagttcttgggtactgcgaggacggcgaggatgccaccatgtcacgtcctgatttttcgctttctgttctgctcgcctatttgcgaaaattcacatttggtttattcgtctaaaatagcttaatgaaaatttcgttaaatcaaaagggttttaatgtgattaattaattaatacgttgtttgctttgtggttcttaattggagttagttggatttaattcgtatttcggaagtggagctcaatccctaattcaaattccatccaaatccaatattctaattcaaatcctaaatcctttccaaaaattccaaatactttataattggaattttccagagaagtccctgttttttttccctttttcctttctctctttctctattctgccctttttcagtttagcccttattcttctctctttttcctttttccccaccttctacctccagctctctctctccttcttgagccgcaggcccggggagaccaagccccgagcccacgtgccgcctcggcccggcctcctcctcctctctgcatcgccggcccaagccgccgccgaccgagcccgcgccggccgcgccacaagcccaatcggccgccgctaaaccccgcaagaaccggcgccgcccttccataaatcgaagccgtgcgtcgccctaaccctagctactccctcctctataaatagcgctggtcgccgccctctttttcccctccttcgtccaaagccgccgccgccatctccaccgtgagcagccgccatcgccgctgctgttctgtgccgccgccgggagccgcgccgtcgtcgccgccatctccttcccgtgccgccgccgctggtaaagccccgaggctgagccctctctccctttcgcgccgccgtttctctctccacctcaactccggcgtccgcctctcgtcgccgtgcgccatctccacgccgtcccggagctcggtgctgcgccaccgcgttggcctcgacctcctctgcctccgccgctgtttgccgcagccgccgtgcgccgtcgccgacgaacgccgccgacgccgccgcgctggagccgccatggcgccatggccagagcacgccatgccgtgtgatggagcagctgctccttgtccttttctctatgccactgacagtgggcccacatatattttcctatccaaaattaattcaatttccgaaattaaatatccagagaatattctcggaatattcctttttcttttaccctcggattttccctgaattcaaacttccggaggccataacttttccgtttgaactccgattcgatccattcttcttcctaaattcttctaaaatcgagctctaccttctggtttaattggttatttcatttgatgttatttagttagtttttctttgtgtttatttgttttcgtgtgcaatcgtgtagacgttggagcggaagagcagtttgcttcagaagacgctgtgcaaggacaatactgggaacaaggcaagtgcactctttgaatatattgaacccatttgtgaaatgttttgttttgaatacatgcattgttttgtttataaactatcgatgggtagcgtgacctaattgttaatattatcctacctttgataattattgattgcccataataccttgtcaccctagtctttgtgagttgaacattgggctcaactcatggtagagtagttatgcttagcccgctcaaggttgttttacaagcaaaatataattttgattaatcatatatttataatcatttttatatgaattgtgtggctgtgtgctatcttttcggtagtatgtgttgcaccgtgtaaaacaacagtgacggagcgtggggctcctcaccgggagaccgcacaggcccccctttgccggttcggccgggggccctgggtgagattctaagctcctggtctgagtgtggaaggttcgcgagagtgaaacacacaagacacgggcgatgtatacaggttcgggccgctgagaagcgtaataccctactcctgtgtttaggtggatctgtgtatgaagaagctacaaaagagctggagaaccagagagctcttactttctccctctctgatctttctggatccgaaaatcccccccttctaagtgggcaaggtcctccttttatacctcaaggggataccacatgcaccatctctctcttttttgtggggacttatcctatcttttcataaacagacggagacttgtatggttgtcgtccgaatgaccttctgatgggacagcccatacctacctccacttccgccggaatcaggcgcgacgtgggaaaatggctgtctgctgacgacatgaccagtgtcagaccggtcacaaatcggtcattcttgtccaccacgcgtcagtctataaatctgcatgttcgcccttcttcattcaatatcttgcttgtaatggttaggatgaagcctggcatatatctgaccggaaccaacgtgccatctccaggagctaacacgccggctccggctagggacgagtgcttggaggctctcatcctgacgggatggggcgaggcgtgcgtcagaccgcctgtcgccacctaacccacgatctgatcggtctgtgactggtcactgaccggataaacgagcgcgctgcactgcgttacatgcggcgtgacgcgctcgtccaaatcgcaataaatgtggttaggtgagccccgctatgctcacctaccccatatacgcggcgcaaaacccacaaggggtcggggcgcctcggccctcggggccgagacgggagcggtccaacccctcggggagacaaagagaagggcggtcgtatcaccctcgggcccgacccccccgagggggttaggccacgtgggtgatcgtgtctgcctcaagtctctaagtcatgatactcccggtcccatgtcaccgacagtagcccccggcgttatgccagggcgatcgccctcctcgagggaagcggtcgggtgtgacgccacttcctaaggcctggtgacatggtggggccggtctaaaaatcgggacaatccggttcatttttcctggagatatggtgatggcgctttggttggcgagcgtaattaacgcgcgcacgagatgttccatctcgactgccacagccgcatgtccacctcatgcaccgcaaacgggcgaatgggattagtggaagcgtgggcgcgagaaacgagggggcaagatagtgggcgcgagaaacgaggagccgggcacagcgttggcaagggtataaagtcgccgaggaagagatttgcttccttcctctcgccattattccccttgtcttcgccgcttgcgccctaactccttgtttcctgtgccctaccttcgccacacgcgctcactcttaaacatctcttcctccggcgtcatggcacggggctccgctttgcttgatggtagcgtgctgccgccttcccgcatcgtgagcgagaggcaggccgggctgccgcgccgcttcatgccggaatctgccaccggccgggagatagttacgctgggcgagggacgcccagcgccatgctacccggggcggtccgtcttcttcctcccttttgcaatggcagggctggttccgccattttcttctttcttcatggatgttctggagttttacgatctccagatggcgcacctcacccccaacgcggtaatgacattggccatcttcgcgcacctgtgcgagatgttcatcggggtgcgcccatcccttgctgttccggtggttcttcaccgtacagtcggtgtcgccgccgtcggtggttggtggctgctacttccaaccgcgggggccggtgttgaaccgctacattccctgcgtcctccgcaagaagtgggatgactggaagagcgactggttctacacccccctcgccgacgaagcgcgcctccgacttccgagccagcccccggcgcaggcctccagctggcgggcgccggtagatctgggagatggctatgacgccgtcctcgaccgcctggcgggcctgcgatccctggggctcacaggggccatggtgtacggcgactatcttcgtcgccggatcgcgccactccagcggcgcacccggggtgcctgggagtacaccgggtccgaggactgtatgaggactcaccagggagtcagatgggactgggctcctgaggacttcaagatagtggtccaacgggtgctgaatctcagctccgtggaggcatccctcattcctcaaggagtcctccccctctgcagcgatccagaccgcgccttcatcctgaccattatgcaggcggtcggggcgtcggaggagcgggctcctcgaggccacgatggcgcgggcgggagccgcaggggggaacaatctaccccgggagggggtcgtgcttctgggccccgcgacaggggcccggggagcggccgccctgccgacgcccgggggaagaggaagcaggaaggaacccctcccccatctcctccccgagggggcggggcggcacgtgccagcagcaggcgcccggaggggccacgccgacgtcgcagcccgagggggagcggaagaagaaacggccccgcaagatgggggggacagaaccatctcggggaaaccttatttcccctccaaggtggtcgtttaaccgacctcctcgcaggttcgtcccacgcccatcgtggccgtattcattccctcaacgcgagttttcactcatccatcttgtttgtcttctggtctttcttctgtttcagcgagatcccgtcgcgtccctcccgccatcccaagtccggccagtctgcgaccacagaggctcggaggcgggaatctgaccggcgagaagccgcggatcgcctacgggaagccgaggaggccgcccaggtggccgtccgagctcgccaagctgaagaagccactcgggaggaggccagacttcgccaggccgaggagacgacatcctccgaggcgacccgtgaaactgaccggcaagaggccgcggatcgccttcgagaagccgaggaagctgctcaggtggtcgtccgagctggccaagctgaagaagccgctcgggaggaggccagacttcgccaggccgaggcgacgacgacttccgaagcagctcgcgacgaggccgcgggcgcatcgctcgggcccactccctcgtgcgacgctcaggacaaaccaggtccgggggacatccccgagtccggcacgtccatcggcgggccaagccgcgcggcatcctcttcgaggcggctcttccccacgccttccgttgctccactgagcgcagaacctcttctgcaggccttggccgtcgctaacaccacggtgttggacgggttaagtgcccagatggaggccttgcaagcagagcgggtggagctcgacgccgcatgggcacgtgtcgaagaggggcgccgctcggtggaggccatggtggaggtgggccgcaaggcacaccgccggcacgtctcagagctcgaagttcgtcagaaggtgctgggggagatcgccaaggaggtggaggaggagcggggggctgccctcatcgccaccaccatgatgaacgaggcgcaggacaccctccgccttcaatacgggagctgggaggcggagttagggaaaaagctcgacgccgcccggggggtccttgacgctgccgctgcccgagaacggcgggcggcggagaccgaggtggcatcccggcggcgcgaagaagcccttgaggcccgtgccatggcgctagaagagcgtgcctgcgccgtggagagggacctggcggatcgcgaggccgtcgttgctattcgggaggtcacactggcggtgcacgaagccgcctgtgccgaagaagagtccgcgctccgcctccgcgaggacgcgctcaccgagcgggagcgagctctcgaggaggccgaggccgcgtcgcaacggctggtggacagcctgtccctccgcgaggctgcgcaagaggaacaagcgcgccgtaatctggaaggtgcccgcgccgagagggccgcgctgaaccagcgggccgctgagctcgaggcgcgggaggagctggacgcgagggcgcgcagctgcggggcggccgcgggcgaaagcgacttaaccgcccgcctcgcagctgccgaacacaccatcgccgatttgcagggcgcgctagactcgtccgccggggaggttgagccctccgcttggcaggcgaggtagggcccggcatgcttcgggacgccgtctcccgtctagaccgcgccggccggcaggcgggcctctggggcgggcggactgcgaagtacgccgccaaccaggggggcctcgcccagcgcctctcggagatagccgggactctccaacggctccccgaggagctcgagaggacgattaagtcatcctcgagggatctcgcccgaggagcggtggagctcgtactggcgagttaccaagccagggatcccgacttctccccatggacggcgctggacgagttccctcccgggaccgaggatggcgcgcgcacgcaggtccgggacgccgccgaccatattgtccacagcttcgagggttcggcccctcggctcgcgtttgccctcaacttcgacgaggaggacgatgacggcggagtgggcgacagtggcgacgaggctggcgacccgggtgcatcggagtgagcccccaggcccccgccaatctttaaatagtttcttcttttcttcttccgaggccttcgggcccccttcttgtatagactaatttaatctgcaatcaaataaagagaaaattttttgtgtcaattctatttgttgtgtgtatgagacgaggatgtctgtgccgcggtccttttgtgtcttggcttgaacaagggctcgtgcccaggtcctagtcctcaaatggctcgggtcggggctagtgcctggggagatccacatgtcgagactggccaggccgggagcgtggtgaccgagggttatgggtgacccgattgtgggtttttgccgattcccccccggagttcaccacgccccggggcacggctcggttctgggccccgtttggcgattttagccgacccgagcccccgagggcaggattgaacacgagtgacctacttcaagtcaagatccttcaaaaggaaacaacagcacagatacaacctttaggaaatcgaaaatgcttttattgaaatacagatataagagaaataagaatatgcatatgtggtagcccccggccaaccttgcacgcccgaggggggtgcggggttggcccgagcccgaaacctgacacccgatccccttttaggggtagaagcgacgaaggtgttcgatgttccacgggttaggcaactctgtgccgtcgcccgtggccagccgaacggagcccggccgggggacgccgatcactcgatacggaccctcccacattggtgagagcttgctcaatccagcacgcgtttggacgcggcgtaggacgaggtcgtcgacgcagagtgatcgggcccggacgtggcgctgatggtagcgccgcaggctctgctggtagcgcgcggctcggagggccgcgcgccaccttcgctcttccaagtagtcgaggtcatctctgcgaagctgatcttgatcagcctcgcagtacatggtggcccgaggggacctcagggtgagctcggatgggagaaccgcttccgcgccgtagacgaggaagaaaggcgtttccccggttgctcggcttggcgtggttcggttcgcccagagcaccgctggcaactcctcgatccacgaatcgccgtgcttcttgaggatgttgaaggtcttggttttaaggcctctgaggatttccgcattggcgcgctctacttggccgttgcttctggggtgggcaggtgaggcgaagcagagcttgatgcccatgtcttcgcagtaatcgccgaaaagttcactagtgaattgggtgccgttatccgtaataatacggttaggcactccaaaccgggctgtgatgcccttaatgaatttaagtgcggagtgcttatcgatcttgacgaccggataagcctcgggccacttagtgaacctgtcgatcgcgacatacagatactcaaacccgcccggggcccgcctaaacggtcccaggatatcgagcccccagacagcaaatggccatgaaagtggtatgatctgcagggcctgggccggctgatggatttgcttggcgtggaattgacacgctctgcatcgccggaccaggtcgaccgcatcattgagagctgtcggccaatagaaaccttgtcgaaaggctttgccaaccaaggtgcgcgaggcggagtgggatccgcattcgccttcatggatatcagcaagaagctcgacgccttgttcccgaggaatgcatttcaggaggattccgttagccgcgcgccgatagagggtcccttctaccagcacatagcgtttggagatgcgttggacgcgttcactcccttcgcggtcctcgggtagagtcttatctgtgaggtatgcttggatctcagcgatccaagcaatcaatctaagggagctgggagcgctcccctcgggtcccgaggcctggactccgacgggcttcgggggcctgtcaggcgcgtccgtctcccctaaggggtcgggtcgcgccgacggctgggcaagcctttcttcaaaggcgcccggtggggtctgggctcgcgaggaagcgagccgtgagagttcgtcggcaaccgtgttatcccgtctgggcacgtgccgaagctctatcccgtcaaaatggcgctccatacgccgtacttggcgcacgtaagcgtccatctgcgggtcagagcaccggtactccttacagacctggttaacgaccagctgggagtcgcctaacaccaggaggcggcggatccccagtccagcagccaccctgagtcccgcaaggagtccctcgtactctgccatattattggtcgcccgaaagtcaaggcgaactaaatatctgaggacgtctccgctcggcgaggtcaacgtgacccccgcaccggcgccctgaagagacagggagccgtcgaactgcatcacccagtgggcggtgtgaggcagctgtgaggggcccgagctgacctcggggactgagacgggctcgggagctggggtccactctgccacaaaatcggcgagggcctggctcttgatagcgtgacgtggttcaaagtgcaaatcaaactcagaaagttcgattgcccatttcaccacccgtccagtaccctctcgattatgcaggatttggccgagggggtaagacgtaaccaccgtgacccgatgcgcctggaaataatggcgcagtttcctcgaagccatcagaatagcgtaaagcatcttctgggcctgagggtatcgggtcttggcgtcccggagggcctcactaacaaagtagacgggccgctgcacctttcggtggggccgatcctcttcgctaggggccacatccctggggtgctctttgtccaagcggcctcgcggggtgcactcgtcttctgtgccgacgacctcggggccggaggacgacaggggcggccttcccacagtggcctcgaggccgtcctgggggtcgggggctcttggcgtcgtcggacaagcgggcaaagggccaactccggtcgtcaggggccttaggccaccgttcggctcgggggcctcttctccctgctctctcccgggtcgagtcggcacagggttagcctcggggtcagagggcgataggtgcggccttcccgcagtggccctcgggccatcctgggggtcgggggcacctggcaccgtctgacaagcgggcagagggcctgctccggtcgtcgggggccttgggccaccgttcggctcgggggcctctcctccctgctctctcctgggccaagccagcacagggtgggggtgcgcggaatgaggattgtcctcatcgcgctccacaaccaacgccgcactaaccacttgcggggtcgccgctaagtagagtagcaagggttcatttggctccggggcgaccagaactgggggagagctgagatacgccttcaactgagtgagggcacgttcagcttcctccgtccaagtaaacggcccggagcgtttgaggagcttaaataagggtagcgccttctctcccagcctcgatatgaaccgacttagggcggccatgcaaccggtgacgcattgcacatccctacgcttgttgggggggcgcatccgctctatagttcgtatcttctcaaggttggcctcgatgcttcgggcagagaccaaaaacccgagaagcttgcccgcaggtacaccgaacacgcacttatcggggttcagttttatgcgggcggagcggagactctcaaaagtttccgctagatccgagagtaaggtctcttggttgcgcgtctttacaaccaagtcatcgacataagcctcaacattacgtcctatttggctacccaaagaaattcgagtagtgcgttgaaaagtaggacctgcattctttaacccgaagggcattgtcgtataacaataagttcctatgggggtaatgaatgcagttttttcctcatcctccctagccatgcgaatctgatggtaaccagagtatgcatctagaaaacacaaaaggtcgcaccccgctgtggagtcgacaatctgatctatgcgaggcagggggtaagggtccttaggacatgccttgttaaggtcggtgtagtcgatgcacatccgaagcttgccgttcgccttgggaacgaccaccgggttcaccagccactccggatggatgacctcgcggatgaatccggcttccagaagtcgcgccacctcctcgcggatgaaggcttgacgttccggggcctgccgccgtactttctgccggaccggccttgcgcccgaccgcacggcgagacggtgctcaatcacctccctggggaccccgggcatatccgtcggtctccatgcgaagacgtcagcgtttgcccgcaggaaagagacgcgcgtcttcctatttgtcgtccagaagaccaccgatccgtgtggtcttggacgggccgtcgcccagggcaacctccttgaccgggacctcgtcgcatgtgactatccgctgcctcggggcagcgggggcggaggtgccaagcctctcgtcgcctccctcgggcttggacgcggcggtgaggtggtccgcgcgctgctccatacaagcaagcgcgactttgaggtcgccatggacagagttggggccaccggggcccggcatcttcatctggaggtaggcgtagtggactgccgccatgaacttcaccaacgcgggcctccctaggaccgcgttgtagggcagactgaggtccgccacatcaaagttcacccgctccgtgcggaagttggcggatccaccgaaggtgaccgggaggtcgatatgacctagcggccaagtgtgacccggcgtcacaccgataatcggctgggacggccggagcaccatccctggggccttgatagcgtcaaaggctgcgggggaaaggatgttgagggctgctcccccatcaatgaggacacgccccagcttcacgttgcaaacagtgggggaaaccaccattgcgatctgtcctccccgggcaacgcacggtgggtggtcggtctggtcgaaggtgagggcaacctccgaccaccgcgcccggcgcgtcgcctcatgagtaggggccgcggccagaagctctcgcttcatggccttgaggctccggcgagaaacgtgagcacacgctcccccatcgacagtggcaatggtggccccaggctcttggaagcctaggtcatcatcgccgtcatcgatgtcctcggcgggggccttctgcttggcctcacttcgccgattgccggaaggaaccgccggggacttgccctcttggcgctcctgcctcctctcctcctcccacttcctcgtccgctcagccaaacttttgactgcgcggcagtccgcgaggtcgtgaagggaggtgttgtggacgatgcaccacttgccggttgggcgctccctactgggagcgccggcctccttctttttgtcgctcgcaggccttccctttcgggtggcccgcgaagcgccctcgacggcgaggacatgaccctcgtcgtcggaatgggctgacctcttcttcctcctcctgtcacgccgccctgtccgagcagcggatccggggcggccgaagctgccacaccggaaccggaggggttccaggtccatgcctcttccttacgagccactcggtccgcgagctgaaaaagctccgcggtagtctggggctctttggaggcgatcttttcgagcatgcggttgtgccgcacaccccccctgaacgcgtagatcaccgcgtgtgcagggatgcatagtatggtgttgcggacttgacagaaccgctgaatgtatgagcgaagtgactcatcatcccttcgctggactgcatgtaagtccgcttcttcacctgggcgcggatatgtgccttgaaagttcatggtgaactgttggcacaaatcctcccaagagtggacggacgcgggtggcaagttcattagccaaccccgtgcctgtcccttcagggccatgggaaaaaaatttgccatgaccctgtcgtcacccccggcggcctcgatcccggtcgtgtagacctggagaaactcggcggggttgacgctcccgtcatatttttcggtgatggtgggccggaaccttgggggccaacggacgttccgaaggctcgcatgaaggctctacagccgacaccaccaaccgggggcacggagggctgatccccgcgtccgtgttgatgtgacactctggacgaggaggcgccctccgttgcgtgggcagcacgccggccattacgccggcgctcgatactgatgcgggcatccggccccccacgcagatcttcctgggtcggaggcgctgacgaaggagtggcggctgaatggcgagcaacagccgccgctcgccgcgccctccgccttgacgacacggagccggtggtagcagtgccagaggtcttggtggcggaggaccgcccaccagcacctaggcgctgccgtgccgtcatgaccaagttggccacgtcgtccagccaacgttgggctggagactccgggtcagggacaatgggcgggtgacgtaggagcgcgcccgcagcttggagtgcgccctggggcgtgctgccgtcgccgtagacgaggaggcgacgctccccatctcgccgcccttccctatcacccgtggatgtcgaagtcgcggatccttcgaccctctcgagcgcctcctcccgcctaggactttggcgtggagggggcggtggagtacgagctcgacggcgtgggttctgctccccgtcgtcaccgctaacactcggagagaggttgtgcgcctttgcttgttcggccattgggctgaacaggaaaagcttggcgcacacgaaagaatgcgagagcttagaaaaacacacgcaaagccccctacctggcgcgccagatgacggagcgtggggctcctcaccgggagaccgcacaggcccccctttgccggttcggccgggggccctgggtgagattctaagctcctggtctgagtgtggaaggttcgcgagagtggaaacacacaagacacgggcgatgtatacaggttcgggccgctgagaagcgtaataccctacttctgtgtttaggtggatctgtgtatgaagaagctacaaaagagctggagaaccagagagctcttactttctccctctctgatctttctggatccgaaaatccccccttctaagtgggcaaggtcctccttttatacctcaaggggataccacatgcaccatctctctcttttttgtggggacttatcctatcttttcataaacagacggagacttgtatggttgtcgtccgaatgaccttctgatgggacagcccatacctacctccacttccgccggaagcaggcgcgacgtgggaaaatggctgtctgctgacgacatgaccagtgtcagaccggtcacaaatcggtcattcttgtccaccacgcgtcagtctataaatctgcatgttcgcccttcttcattcaatatcttgcctgtaatggttaggatgaagcctggcatatatctgaccggaacctgcttgccatctccagtatctaacacacttgctcctggtcgggcccactgcttgacaggctctcattctgacgggatggggctaggtgtgcgtcagaccgcctgtcgccacctaacccacgatctgatcggtctgtgactggtcactgaccggataaacgagcgcgttgcactgcgttacatgcggcgtgacgcgctcgaccaaaccgcaataaatgtggttaggtgagccccgctatgctcacctaccccatatacgcggcgcaaaacccacaaggggtcggggcgcctcggccctcggggccgagacgggagcggtccaacccctcggggagataaagagaagggcggtcgtatcaccctcgggcccgacccccccccccgagggggttaggccacgtgggtgatcgtgtctgcctcaagtctctaagtcatgatactcccggtcccatgtcaccgacaaacaggcggataaaacctttttgaccggggtgatgggtggttctgtgtgaacctggttaggtggtaatgtatctgtgtgatcgttgccgggtacggtctctgtgtgagcctactgttgagctgtgtgctattgtagtttggcaagttgtcttggtcaattaaggacttcacttcataagtcatggatctgagcctaacgtgcaaccacatgttctcatgggaagaacctggcccagtaggattccgagtcttggcactgtcggcccaggtggctagatgataggagtttaggttcgccatggggactttcttgtctgtgtgagggaaaggtgtctcatgggggaaggcagtgttgggacgaagtttctaaaaagccttgttacagactccttggccacacacaacctgaagtgtgacacttgcgcatggccgttaaaaggacgatgtatcttgtgggtcaagctgcacaacctttgcagagtgttaattaatctattcgaatagtcgcgtccgcggtcatggacatgctcggtgatatctcatgaggggtagtttgtgaaaactgggaatgaactgtgtgcaggttaatgaatatagctatgtggtcctgtgtggacgaatcctgtgtgaatggatagttggtaatactgttatttacaactattgttttaaacctgtttataaattgtttataactgcaaattgttgtgttatgcaaaatagccattttctttgttgtcagcttgcatatgcatatttctgtgtgcttgctgagtattccatgtactcaccttgcaatttcccccaattccagaagaaaggttcccgctgtttcctgaggagtttgttgctgaagacgaggaataggtcgtgagtcctagttgactgcctgtggcaagttgaatggagctactacgcatttatcttatttccgctgctactttaatattttccttaggcccttcgtggcagaataaatgtaaactttagccataaggtttatcacagtcattattaatattaaatattaggtttcctttgtgatattggctgtgatattatctttgtgtctgtgtgtgctagcttgatcctggactagcacttatacacaggaggtcctattttgggtcctcacacacccgtccgctggctcaacgcccagccggccaagtccgtcgtggagcggtgggcggagcaacggcgacgagtggcgggcggaggaccgagggcggagcagaggggcggtttggtgaagcgacgacgggcggcgggtggcgtggcgagagcgctgcgagggaggaggcgagctcgtcggggcggccggcgggagaagagccagctgcgcgccggccgatgggagggagggagaggagcgggggtcagtagccggcgggagtcggtggtgcgtaggggtcaacgcccggcggaggtggcccgtagaagaaaattctaaagaagaaggcccccgccaaccccggcctcacccccgtaaccccttcacccccgatgcccagcagaacgggccccccctcctcgctcggcgccgagcgccgcctccctcctcgcccggccaccgacgtcctcgatggtcacatccgggttggagccctccctcctttcccggtcgccgagtgcgccttcctcctcgcctggccgccaccgccgacgtcctcgatggtcacatccgggtcggagccctccctcctcgcccggtcgatgagcgccgcctccctcctcgcccggtcgacgagtgccgcctccctcctcgcccggtcgacgagcgctgcctccctccttgcccggccgccgcgcgccgcctccctgctcgcccggccgcctcgagcggcccctcctctcgcccggccgccgcgcgccgcctccctcctctcctggccaccgcaagctacccgtcctcgcctggccgtcgcgtgcctctctgcccaccgccccccgctgcgccgccgctcaccgttctgtaagggagagagaggggggatagagagtagaggaaaaaaaattgaaaatatacctctttttcattggttttgtacaaatacgctcatttagaaaatatttacagaaatataccattgtcgtgaaatgaaagcgcgaaatcgtgcgttactgcacgatgtcgcgcgaggtgtgcgcgaaaccgctcggtctcgcaccgcgacttcgcttacctaacccgcgtactctcgctatcaataaattaattagtgtaattagcaattaattaattacaattactcctttaactaacatcattagtaattaattaatcgttaatcacccgttaatcgtccactgatcatgagtcatatcaggccatctcgcaaggtgatgaagcgagaccgccggtctcgcgacctgctgttgcgataccgtggcggatgcggcggaatcgcgccatgattctgcgagaccgtgacgaagtgtcccgttgtcgtcattttcgcttaacggcttagcgatatattagcgatatatcgtttcgatttcgctctttcaatcagcgacgacgatatatttgtgctaaaaattttacatctcgaatatttataaaataaataaataaataatatactttcaaatttaattcgagagtagagggggctgacatgtgggaccacatatgccccaccttttcttattatttttgtgtagctgacttgtgggtcccacattttttattatttcctgagatccaattgccacgtaagcgccacgtcaatgccacgtgggacgaggaccaagacaaagggagccacgtaggcgccacgtcatccaaaaccgggcacaatactgctgagagacctcttttgcacggttttgtaagttgagggacccgtcatacctggttttgcgaccgagggatgaaaatcggactggacgacaaatagagggaccaaatgtgaacttattccattttaaaaaacgagccaagcgtgctagtcacaactttttatttccagcctagtcaccatctaagctaccgggccggagcccatggcacaaaactaggcacgtgtttaagcctagcccagaaagcatagcacattagcacacgagcatagtcatactagtactagcaggtacgagacgcggaagaaaattacacaagactgaggtcctacagtcctccgaaagacctcgtccctctacatatgacacctgtccactacgaatctcaaagtaggcagcctctgtcttcttcctatctccccaatctcctgtgttctgccgttcttcctcaacacgaccaagtagagcttacgcacgaccaacgcacgcggtggcggccgccggtgtcgagcggcaacactcacccagccaattgacaattcgatgttgactaatggggaacgaggttatattgcgctttgcggtcaaaatccatatatggtaagaggcgatttattaaggggagatggattttatccgagcatttgatgattcttttggacagtgaaccttggaaaatcacatcgttgtctgctttctcatcaagaggcttggtgtacatcaactcccgaatacatattgtggagcggaccaacggagttcacacgctacagcaaacatgatgcaagccgactggcagcggcagttgagcacgatgtcatcgtcgcactctcccgacagtcatccatgagcccgaagccactcgccgtcgcgcccgctttggtcgggttcgagggatgcctcaccgagcggaggaagaagaatggggattagaggggagagaggttgtctctttgagattcgtaatggacacttgtcacgtaaggggacgaagtcctttagatgagtgtaggacttcagtcctatgtaattttcttccacgagacgctccaactgtccaagcagaagtcgtcttctcgcgagaaaaacactgaaaaactgatgacgcgagtacactcgtcgagcggttagcgacggagccctgcagcgtcgacacgcgttccaccacgcaccccacggacgtgtcggccgccagaagctccggctcgcctgtatttagcacgtacgacgacgagcgatcccactcctaacacagtacagcgacgacgacagattaaccgagagcgatcgatcaaccaaatcagaatcagggcaagaaacaatggcgcagctggtggacaaggcgaaggggttcgtggcggacaaggtggcgcgggtggagaagccggaggcggagctggccgagctgtcgttccagagcgtgggccgcggcggcgccaccctcgcggggcgcgtggacgtgcgcaacccctactcccactccatcccgatctgcgaggtgagctactcgctgaagagcgccgggagggaggtggcgtcggggacgatgcccgacccggggtcgctcaccgccggcgacaccacgcggctggacatcccggtgaaggtgccgtacgacttcctggtgagcctcgccagggacgccggcagggactgggacatcgactacgagatgagggtcggcctcaccgtcgacctccccatcctcggcaacttcaccctgccgctcaccaagtccggcgagctcaagctccccaccctctccgacgtcttctaaatcggcatcgtgcacacgtacgggccgagtgtacgagaacttgtgtatttccagacttctggagtaataataaagaacacgagtggttggttaatcgcgaatcgtatgcgcggtgtctgtaacgtacgtttatgtgtggacgttatgctacggcgccatatgtccatatgcgtgccgacgcgcgggccgggggccataggcggctaaatcaagtaattagtcaaccgcggcgatttggtgagatcgctccttaaaggctcgcgccatattgcccacatgcgttccaccaggccacgaggctcacgagcaaacgacgcgcccggcaacggcacgatcgcccatgagcgcgctcgccctgccgtgctgcggtgtacccatgccgctcatgcgattgggatttgagagaggttcggagttatttagaggagctcaatattatgagaaaagctgttatttgagaagctgttagcctctagttttaagaggatctggaaaagccggattgtacttccttcttcacagattgatcattatatgatagaatttaaattttttcacagattaatcattatatgatagaatttaaatttttttaaattgatcatcatgtaaccatattgaaaacggattttatcgaaatataattaatggacacgaattttattgtaatacaattaatacatcataggagaatatatatatatgtgctaggatgtataattggcatggtgttttatcgatttttttaggatgtataattggcatggtgttttatcgatttttttaggagaatgtgtgtatggtgtcttagttaatgcgatttaaattattattggtcttagtgaataaatatatatgatgatcgttttggacggagtaagtattaactaaactttttcagcttttgtcttttaattctacattttataactgtcgcttctcaactgacaggagctcctctaaatatgccatatgttttcgaaattccaaatattttttctgcaaacaaagtagaaaaataaacgcttacaacacacacgctcgcgcacttatgtttataaatgcacatcatatcgctatgtgcactttcgaaagattagacaatcctattttaagattaacgaacatagacaaagttatcacaatcgactgttaaaaaaataactaatcgtaaataggaacactcatattattaaataggggctcatgttaaatccgaccaatcactgagcaagttctatcataagaaatctaaccatttaagcacttgagttacgctcgattataatatataaaaagtaaaacttttactctaaaataaaataaattcaccttttgtaaaaataaacttaatgtgagattagagtagttgatatttaagtttgaagtattttagaaattacggatggtcagaagtttaattatttaattaatctcaaactcgtactaagcgttacaagtacggaaccggagggtagtaggatgaacatttattaattagtgtttattattgtctattgatggtaaatattgcactaaaaaaaagagaagtatgttcctaacctgagcattgaaatttcgtaatataataagaaaactaattgtaaaatttcaaatttatctggcattttactttccggtcataatggaagttcgaaaataatttgaactttctaagtatatttgcacgctttgcgtttcatgcaagggcacccaataaccttaaaatctattttttctctttcaagtacagaaaacttactttgttgcatgtttatactcatttcaaattataatcagttggaatttgaaaccaaaagtttcggttgcgttgatagtctccgtaggtactagtaatacgcgaaacggtggggctgggagcacttttatagcactgtaaaagaactcacacatctttatcgtttcattagtttttttactaatcatgtccgcagagcaaaactagagaggcagcggaaaatttaattatttgctacttttccgtttggtaattagccaaatacctttttaggtttacacttatgaatttaccattggagagagaagcttttgtaattttttttcactttttttcactgtagagtgccacggccggtacatgtgcatgccaacatggaaccttcgcaaaaaaatgactaatctacccatgctagctagcaaacatgtgcatctaagtcataattccttaactggaaaaattccaaaaaaaatcggcaacctgtccaattttcccattttaaatttgcaaggcaacaagatcaatggccccattccggtacatcagttcattaacttttttaatcaacctaaatctctgtagcaccatgccaacaatgccagccaaattaaataccgctcttaatcttagtcacaaccatccagtggatctatttcttcaaatattgattcgttgtccgacttggaggtacttgatctttcatacaaggaccaccaattgagcaggttgtcgctcgaatcttcaatggccacctcataaacagtgaacaacatccatacctctgccatagattttgcgaaagcaattttatcctaataccgttcctgattcagcctataccacaaccaattgctagcagggtagattggtcatttcatgtgcctgtccatgctggcatgcatgtgtggtgctacacagtgcagaaagtggtaaaatattacaaaatcttctctctccaatggtaaattcttaagtgcaaacctaaaaaagatatttaactaatcatcaaacgtaaaaatgttaaatagttaaattaccaggcaacaactatgataagcaaaggtaaaatctaaaccgataacactttcggtttagtcttaattaaagagcgacggacacatacgtaagagaactactaatacacgtctatcatgtctagttgctaccagtacacccaacaatgcatgcctttctttcttcttatagaattctcttttaaattacttatccgatctataattcgattacactattatattcattgcaattaaatctttataacaaaatcttacaagactatattatgatgaaaaatatttatgttgtaaattactattattatatatattagttatttttatcatatatatatatatatatatatatatatatatatatatatatatatatatatatatatatatattatattttattaaactactttttagatattcagtgcatgatcagtgtactttataggttagttttataatatgttgattaaatttaatttctagatagacttatgtttttatcccccataatagatttacttttgatgtcgtgacaagttacttttataatatatgtaaattttttataatatatgtaaattatttttaggttttattgaatttaattttatatgaccaagaagtaatttaataaaatctaaaagttatttagatatattataaaagtaatttgtaacttttcataaaaaatataataatgtaagatcttgttataaaaatttaattgttacgaacacaatgatgtaatcggatcgtaaatcagatgagtaatttaagagaaaactttataagatgaaaaataaacatacactgttaagtgtactagtagtaacctgatcgctggttatgacaatctaacatacaacaccatcttaatcatgtccataaataaaagaacaagactatatagctagtggccatctatgagagcaaaaataaccccagtaccccacacgaaacccacgtgccttcagtatctctccgccacccgacagagtccactctccactgtccatagctgccttcgcctgagttcgactaggatacatttgcaccatatagtatcattcaccaactcgaatcaacacacactagacacgcatctaatttgcacttaagtaatccgatcggtatctgcatgcgcctgatctccacgttgcgctgcatgaaacgcgtgacgtgaacaggccagctacccgggatctctcatgacgatcgacaggtcaggtcggatccgtattaatcttcgctccaaatatttaccagttgtaggggtaggtttcccactgcatgtcaaatatatatgtcattgctgacacgatctaattaatttgtccatgtcacgctaaactaaacaagcgtctgcgatttttacggcgaaatttggagtaattaagtaaaaacattttggcttgttgctataatgcatcgagctcaatctcaaagtttcagagtcctgtcagttatcaccacgaggggttagttagctgtccatgtttgcacgcgtcccgactgatcattaaaaaaatatttcttgttaaagatggaaagggaagcaagtatagtaatgacctggaatctgattgccttgcttgatttggagatgtcgagtcagcatggtctcatggattattcccggacaagtgaagatcagatctgatgtgaactcttcttttcgaacaaaacgatgggaactggcctgctaccactatttttttcctggaatgggacgatatgagtctcagctggcgctccattatttgctagaacagtgatcgatgcgatcacagcttgggctacgggctccaaccatgtcaccaaccaaatactgcctccgtcccatcccaaaataagtagagccgtaggtgcagaacgttcaaacgttaaacacaaacaatacaaatctacacttatttattttagaatagagaaagtagtactcaacaataagagaaaaacgatctttttttaaaaaaaagctaaattgattatttgtctgatgattgtttggacacctagaaattatccatatgaaatctaattgcgtcgttgatgccactacattttattcgtaagataacctagttatgcttctaaactagctcacaaccaatgaacaaagcctataatattacaagctttaacttttaagggtgatggatcgagcgcgtgaagtacgagtaactgtccacctttgcatggaaggtggcaccactgagcatcccaacctcatcgataaccagtaaggggaagttttatagtggatgtgaaatttagttcacatcatcaactcattaattataagagacaatatatataaaacaaattacctctaacacatttgccccaatacatcatattaatttactttatttgtttcctatcaattcattggtctcttgttctcatctctcttggagtttgtgtagagattgccccttgcatgagaggtggcaccttctctcacacctttcatatatctcttccacgtcatcacgtgagcttacatggaacctgaggacaagtgtgtagaggcttataatacttgccctaagaacgtcactgctcttttcaagcggcgaatcttctctttcattggtcaattcgctaagccaaagcctcattaccaccgctttgtgagataaccttttaccctcgcttccttttcttctctcctgacctataatattagttagtcttcgttgcctcgccatgtccccttttgcccaacttttcttcacacttgaccggagatggacttttttttccctcgaggggacatccactcgttttgtacataacgtttaaaatatcatcaaaaaaatttgtcaataattgttaatatagatcattatatgatatatctttgcacaaacatgcaagttaaattttgacctataaaatttgaaacaaaaataacaaatttgaccatgaattacgtatttcatagtcaaatttgatatttttgtttctacttgtataagttgaatttgaacatgtatgtttatggagtgatatatcacatactgatctatcttacttttttttcaaattttttgatgactttttaagagatatgtaaaaatgagaggatatcctcttaagggatgattagagtttccccacttgacctatgcccacaacttctttttcttctcccttgaccttaccccttttgcctttcccttaacctctggacaactagatccaatcatcataaatttctctttgttggaaaacaacatagagtagagctaacggtgaggacaattctcatcatgtcaagtcgaagaggatttgaaaggggaacatgatgatggcatacctaagaaatccttaggggcaaaagatctaataatttgccaaatacaagcatcttgttaaaagcaaaataactatgcagcatttggtaggaaaatctaggagtgactatttttccataagataaaacctaggtaagcacataagtgacccttactcttagggattgtattttcataccaatcttgatgattccacttaatttttgaaattatatgggatgaaggcacatccatatttctcttttgttgatgccgacccgatttaaatgatcaaacacatccagctatcatcattttcaaatcataatggtatctagggccataagcgaaaatggtatattttcactggccattgatcgttggcggtagcattggctgtttaagaaaacttaaaatgtatgtcagaaaaagtccattttgtagtagtgtcttccattttccttccccctcagctgcacaccatgcacgatggctcaatgcctccactagggttaaaagtcgatttaacttttcagaaacttttagtcgattggtaaatactcactctgtttcatattataactcgtttgacttttttctagccaattttttttaagttttatcaagtttatagaaaaacttaacaacatttaaaatataaaaactgtttcattaaatctaatattgaatatagtttggtaatatgtttattttatgttgaaaataatactatatttttctataaatttgatcaaacttaaagaagtttgactagaaaaaaattcaaacgacttataatataaaacggagggagcagcaaaatgaacggcctcgacatcatataaccccagcacttcccacgcctctataaaattttagttttcttgacgtggatcacgcgagctcaaattattgacacattctagaccaggagtacttttgctatatatatatatatatatatatatatatatatatatatatatatatatatatg

SEQ ID NO: 10019 - DNA, 2319 bp, Oryza sativa
ggcgaattcgagctcggtaccctacattaaaacatgaagggagtagtttttttataaaatataccccacactggcttcgctgaaacggaggagagcggcagaaggaaggatcggagcggggagtggggggagaagaagatttgagagagttagacacttgagcgacgaaacggaaactgcagtggtaggagacagctgacgtcttcatcttttcccccctctttctctctttatttttcacccttctttagcttttcttcacggactgttaacacttaacagtcggttaatttatcctttttccctctatttttttaaatactcccttcgtattaaatattaatgtatgtcgtcgtttactttttatcaacgtttgaccattcggtttatttaaaatatttatgtaattatcatttattttattgtgacttgatttatcatcaaattttctttaagcatgacataaatacttttgtgtttgcacaaaaatttcgaataggatgaatggtcaaacgttgctcaagaagttaagaacgtcatacattaaaacatgaagggagtagtttctttataaaatatatcccacactagctccagtgaaacagaggagaatgacacaagggagggtcagaataggggagaagaagatttttgagacttggacactagagtgatgaaacagaaactgcagtggtaggagacaactgtcgtcttcgtcttttccccctcttactctctctctccatttttcacccttttttagattttcttcactgaccgttaacacttaacagacggttaacttatctttttttgcctccattttttttagaaaaatactccctccgtattaaattttaatgcaagtcgtcgtttactttttatcaacgtttgaccattcgtcttatttaaaaaatttatgtaattatcatttattttattgtgacataatttatcatcaaatgttcttaaaacatgacataaatacttttgtatttgcacaaaaattttgcataagctgaatggtcaaacgttgctcaggaagtcaacaacgtcacaaattaaaacatgaagggagtagtttctttgtaaaatgtatcccacactggctccggtgaaagagaagagaacgacggaacggagggtcagagcgggggagaagaagatttgagagacttggacaatggagtgatgaaacagaaactgctgtggtaggagacagttgtcgtcttcgtcttttccccctctttctctctctccctccatttttcacccttctttagcttttcttcattgactattaacacttaacagtcagttaatttatctttttttgcctccattttttttaaaaaaaatacttcctctgtattaaattttaatgtatgtcgtcgtttactttttatcaacgtttgaccaatcgtattatataaaatacttaggtaattatgatttcttttattgtgacttgatttatcataaatttttctttaagcatgacataaatacttttgtatttgcaaaaaaaaattgaataagatgaatggtcaaacgttgctcaaaatatcaacaacgtcatgcattaaaacattaagggagtagtttctttataaaatgtaccctacactggctccggtgaaacagaggagaacaatagaagggagggtcgaagcgggggagaagaggatgctggagagtgatggaacggaaactgcagtggtaagagacagttgccgtctttgacttttccccctctttctcccactccatttttcacccttcgttagcttttcttcgtcggttaagttatctctttttctccattatttttaaaaaatctctgtatcatcccggcatagggcttaataggattaatagaatactcatatcaacaagttgcaacttcttttccggaagtcaatctccaaagaactccagggttaagcgtgcttggcctggagcaatttgggatgggtgaccgaccgggaaattcttcccgagtgtacacgagtgaggacaaagtgtgcagaaaagacatgtgttggtctgtgagggcagtcttatgacctatgaaagctatcagatgtaagcgggcccggcaatttgggatgggtgaccgactgggaaattcttcccgagtgtacacgagtgaggacaaagtgtgacatgtgttggtctgtgagggcagtcttatgacctatgaaagctatcagatgtaagcgggcccggcaatttgggatgggtgaccgactgggaaattcttcccgagtgtacacgagtgaggacaaagtgtgcagaaaagacatgtgttggtctgtg

SEQ ID NO: 10020 - DNA, 8749 bp, Oryza sativa
  unsure (1)..(8749): unsure at all n locations
tccaaagatactacgatttggataggccggtggtctggatctggacacaaatcccatccgtgtaattctagtatttctctccatttccaagattgatcgatgcatgtgtagcagaaaataatgatactataatccctagcatttgacatgttctttggattgaaaatataggtgaatccgctcatgcgcttgagctttctatgcgaaaagttcgctttgtttttgtcaaacttttctttcgaaaagccacatgctttcggacaaaatatatccctttacgttttgtgccaaacatttctttttgtcctcttactatcagacggaggtgatagcacttcgtccaaaccgcgtttggttcaacgttaagccttaaggcagtccgggtaattaaccttaatgtttcttttgttttaacatggtaccttaatatttcttttgcagggatgattaaacttaaatctagttgggttaattatagcttgggaagcaccgttgattcatgtgaacttggttcaatttttcttaaacaacacatataggtatagtgcgatatttcgtatggatagaacaataaaaaaaaacaagaatatagccttgggaggctatagcctggaaaaaaaagcaaccacaccacacgtttacaatcagacctcactactaatgaactactaatgagatagtaatacgacatctcgaaggaaaaggattttccaaacgacgacttcaagaacgatatgacactgagatgccagcaccgtccatcctaggttcaagacatttcacctagaggaatccatcagggggcaaaagagatcactcaataataccctaaggggaaaagtggcgctcgcaagcgtcgcccttgctagctcaaagaggctaggctttcgtttgtaatcttcctacttcctcgtgtcaagatcttctgctggtcatagagaacaccaccaaccacactccttcgacgcacagccaccgcgccagcatcttgctgccagctgaccatcgagtagaagctcgacatccgacgcattccaaatccatccacacggttaggttggagggcgagagagaagaatggatctcctctccgcactaatctgccaacgaggccttcttatggtgtcgtcgccacaagtggccttcttatggtaggcctgcaacgcacacctcacaaggccaccgttgtcactgccacagctagactgctagcgtcatctcaggccgcccatccgcatcactgccaccttgtcctcgccatgcaccgtaccagctcagtttgccgctggccggcctgcgcctcgctgctctcaacctcgtcaccgtgccggcctcctgccaccgccggacacaccaagcttgcgtcacataggcctttgctgaccgcaacttgcttctatcaccaaccacgtcacgtcagcctcctactccaaatgtcgtcatctacccgctgtagtcggctgcgtcaacctccttctcatccgctgtcgtagcttccagcaccggcctcttacttccgccaacgcaggcgtcccgcggccgccgacgctgtcggcccgtagccgtcggccttctactgaggccaacgccgcccatgccgaagttcactgacaactttctgagctttgcgtcgcttcccccgcgctgtagatggagtgtcgtcgggttttggccccgccaccgccatccttgcttgtcgcccggttttccaggcggtgagctccggtggcagcgaggcatcgaggagggtgggagggacggcggcgggtggctaggatttcgcttcgagccgtctgtgcgtgggtgacacggatatctttcttccttttcggttcaaattctgatccccacaattaagaacacatgggaccatgagttcactttgtgtagaagtttcaatggggttcacgaatttatccatggccccctccatccatctaatgcgttaaaaaaacacacatttacggatatatgtaattgttatatacatgtgtgttgatgtgcttgtgtgcatttcccattaatataaagtagctcgaccagaatctcgtgtgtggcaactaaccttagctatcatggttgtcgtcggcttctatttaagatgtaaattgcccatcatttcattaacttatggacgttttgcatgcctagccaccttttaacaagaataaaaatgggttctatgggaaaagtaggcgtagtggtgaccggtgaagctgtcacccatgggtgcaagacttaatactatctgcgctttcaatagtaatttaacgagggcaaatatttgctactgacactacttagaaaaaaatgttttttcaggcggtcaaaacatgttctcacacccccccccccccccgagggggtctggccacgtgggtgactgcagctgccccaaacctctagtcaagatacccccggtcccatgtcaccgacaatccccatgtttctaattatatagttttaaaagtcacaccagttgctaccacttatgtcatctcctcctttacttgcttgctcgatctaccactatttctattcattctctttggaatttttaaaaattggatcttatagttttaaaagtttattgtcacgttgggtttcgtttttttaatttctatatgtcccgtcaaacgttgccattatactcctctatggcctgtccactatctcttctctttattatcattgagattttaaaaatcgaatataattatcgtttgggttcatttttacttctagaagtcctgccaaaccgttagcggctttgccattgtacttctctacagctcgctcgctgcctcacttttttattgtcattgagattttaaaatcgaacatgattatcattgttttttttttactttttagaagttccgaacctttaaaaattagggtttcattttttataatttttagaagtcccgtaaaatgatgccactatgcttctctatggcccgtccgccacctactctttattgtcattgtgattctagaaatcaaacataactatcgttggaatttatttttattttctagaagtcctgtcaaccgttggctgctctgcaactatactcctataaaccccgctcgttgcttctcctttttatagtcattgagattttaaaaatcgaatatgataatcaaatggggtttatttttttttactatctagaagtcctggcaaccgccttgctcgttttcttcatggcctgctggtcgtccctccttttaatcgtcattaggatctatttggtgttttatcaacagtttttatatgttgtatcaaccgtcaccactctactcttttataggtatgttacttaatttatctcgtcatgtgttttagatggtcttttctttcaatagtctttatttttatcacaaattttagttatttataaattttattcctaattgaaatcttatttttatttttccaattttagaatttatttttttttcaaattttaattaatatcatattgtgttcttttaatttttttatttttttattttcaatttcagttgtttcaaaattgtattcctagttgaactctcttttaatttttctaatttcagatattattttattttttattctgaattttcattaatcttgtattaggttcttatatggattcttctttcaatattgcttatttttaattctgaattccagctaattttaaattgtattcctacttgaaactcttcttttatttttttgctaatttcgaatttttattttatttttattcccaattttaattaatctcgtattgggttcttatatggactcttctttttaatattccttatttttaattccgaatttcaacttttttaaaattgtattcctacatgaactatcctttcttttctaattttggattttattttatttttatttcgaattttgattaatctcgtattgggttcttatatgaaaacttctttcaatattgcttattttaattcctaattttagctatttttaaattgtatttctacttgaactctccttttctttctttttcttttttccgattaatgtgagaatttctagctcccagagtgaacgcagtggctacttttaaagctgttttaataatataatagatagatagattcggcatattttaataaaaaacaagatactaaacatgacatgtgaataacaggaggatgatcaagtgatagtactaaacacaaacatgctaataacaagaataatatcatctagtaacatgttaacactaaagtgaatagagtgatatgcggagaacgctccggattcaaaggcgatggtgttggtgttgtcgctaccgttgccattggcgtctcctccattccattgctagtcgacgtagaggaagaccgttgctgttggcgtcttctcctccattgctgctcgacgtagaggaagaagaacctggcgtagaggaagcagtgtagagagcttattgtctatcggttccgctttctcataaaaacagaaaagacaagaaaacgagcggctggctcgccagccccgttgctccgctccgctaactcggcccggttggctcgactcggcgcacgagcgcgcggtggcagttcgaccaccatcttaaccgctcgacatgtgctctcatttagcaacttacttctcattggttccaaggtgggattaatcttttaacattaattgtgtgcctttgaaattagtatgattaaatcggggctagcccatttaattctaacaataaatatgcagattacaaaatacagaaaaataaaaaacgaatgtttgaatataatgtgtaaaagagtaggaattagaaaaaataagtgcttaaatatactgtatagaaagaaaagtaggaatttgtcgacgggctatacccgcagacgggatttgtagagtatgggaatcgttggaacctgcagacgtgagatcagatcgagcagacaaggaaaaagatttatactgatttggaccctcaaggatagtaataaccctaatctagattatatggatttatggatggaatatcaccaagattacaatgaggaatttcacgactagactaatccgccgactagaaactgtcgaggacggcccgaggagatctactcggcgaatacggctatgacttcctctggattgcttctcaatgtagctttggctatggcttgtaattcgatgcccttccctgaatacgggggtcttgtatatatatagtgtagatcatatttttccctgaataggatttgtcggtgatatgggtccaggggtatcagggccatagagaggaggctgcccccgggaggctgcccccggtagccacatggccctccccctgaggggggtcgggcccgaggcagggtggcgaccgccccctccatgccttggggtcgggttacctcgacacccttcgcacggtgccgcgtgtgctacgataggtgggcgcccccagcgcccacctaaccgtatttaaggcggtgtgagcgagcacaccatggcgcattaaatgcacaccgccttaaatgcggcgcatggtgcacctgactggactgtgaccggtctgcgaccggtcgaatgaccgatgtggacagggtagtgcgcctgcgcactggttgcatattaggcggtgtgccgcctgacaccccccgtcacgtcgtgatgaggagaggctgcttagactctcatcaagaccggagacggcttgcctaacccggtcagggtagaatttccgtttcccagcgcaagtgaagacccaaaaatcttcactcattaaatgccgaatgacatgcgtgtccccccgtgtcagactgatagatttgacgggccccacgccatagcaaggcatgccagagacttccaaggcaagcaacaagacatgcatttaatgtgattatcctccctgaataggttcggtgggcccatgtggtaacccctnnnnnnnnnnnnnnnnnnnnnnnnnnnnnnnnnnnnnnnnnnnnnnnnnnnnnnnnnnnnnnnnnnnnnnnnnnnnnnnnnnnnnnnnnnnnnnnnnnnnnnnnnnnnnnnnnnnnnnnnnnnnnnnnncgacgatgaagcttatcccccatcgtctcactggccgaccttggcccctgttatttttgggtcatatctaattcgttatactcaaaatacacctttggtacaaaattaataatctcacaaggatgaaatatcagtaattttctatttactggttgatcccatcttttacggcatcaattccttttttgaacgtacaaaaatttggggagctcagcgtgtctggaagcacgggagaacgttcttttgctgatattattaccagtattcgatactgggttactcataggaaaatcagcctttccctatatcaggcactaatttatttttaacgtctaattagatcagggagttcttccaattaagaagttaagctcgttgctttttgtttcaccagaattggagccaggctctatccatttattcataaaaggaggtccaggcctacttagggaggggttgagccctttttcacttgaggagttctcctgcccctcattattaacaccttctactccaacaaggagatcttgtaatttctcccacaattagctaagcacaagagtagggtataacgcttctcagcggcccgaacctatataaacccctcttgtctcatcgtccttgaggggcctgacccctatgcactgaactatccaccgagcccttgagtctcacctgctgcccctggccgaaccaacaaggggctctcactatcccctgcttgaggagttcaccctccgacaggattctaacacattctattccgataaggtaattttcttctttatctgtcgtatttcgtaatcaaatgatacattgtcgtatataatcaggtatatggtattgcggtattccatgaatccatgtataggaggtatgtcttatccttgacactgacataattaaataaaaaagacagattcaagggaaatttttctaaagttgtagcttttacgaattttcctccaaaatctatgtagtattttccctagaaaaaagatctctgtagtatcgtccattatattagagtttcaatggaaaggagatgatttaattatttgtttcaaatatgcttttaggaattttttttcatataaatttgaaactccctaatttttctgtcttttttctgttcgagcctgattgatcttgaccatgtcgtgaactactgttctccctgctctcaggatacagagagatgttgtgcagggctcattttgagttttcgactgtatatatatcgagatatatatgtttttcagctgtatttagcagcttaaacttgagcctgcattggttggtgattactacaactcgaatgggactaggagatgttaaatttaagaaaggtactacatgaaattgcccactgggagatgttaaaattaagaaagatacatgataaacagccgctaaaaatatgagctaaccatcacgatttggggttggtatgataattaatgcattttactaccttagaaaagataaagtacttcttggaactccggtcataaatatttgattttgatgttaaaaattagatttgatctctgaccatagataacttctcaagtgcttaatttataaaaaaaataaaaaagtttttttttgcggggaaaaaataaaaaaaataaaaaaatatataagtttgactaaatcttatctaaaatttaatcatttatgactggagtgagtactttttatatgctaataaaaacactccctctcatcatgaaagttgaggacaaagattctatcaaacttttgaaaaatttgaacaactttatattaaacaagttatttaatctactaataagtttgtaatattatgatagcacttttcaagcaactaggaaggaagcccgcgcggatgcgcgggcattttatttattgttttatataatagtgctaaaacaagtcatatctcactatttctacgtcgtgagatagatcgtagacttcaatatacttaaattataagaacgtctcccagaattaaaaacactttgtcccaattacatataaattctatcgtaacaactcattatcactattttaaaagctcgctaactatcaatacatgaaattgcgcataataaaataagcctaatatatcattaatacactacttagctaagtgtttatgtctcacttatttccaaatccacatataaatattcttaaaaatatcactaacgggtgaagccggtcatagccgtagatactttctttctctattaccttaaaagttgggtagctgtgtcccctcaagatcagcccgaagcacatattataatttatctattatatattaataatatattaaatttcctactaacgctcctacgccatcacgtggtactctacaaacgttcctacatcaccacatgacgctataataaattagagaaaatcatagatattcggagaaaaaaataatatgtagtatttatttttacttaaattgatgggcctattattttataccattatattagatcttacttaaaaaaataaaaatgtaatttgtcttcccgtcataatccccatccacgtgcgagagaaaatgcatacgttcgtcatgttcactaggaaaaatgtatgtacataaagttcaccaggtacgtacagttcatcgggaaaaagatacagccgcaagaaaaaaaaaactca

SEQ ID NO: 10021 - DNA, 11651 bp, Oryza sativa
agcaacgataatagaatggtccccttattccagtgaagcagaacttcttcaagaggtttatgttatgttatgttgtatttatattatattattttattggttctaaatgcggatatagctgtgttttgaatgtgttcggaatagcttgttcattgtttgcagaataaaggaaagggcacagctttgcaaacaaaaacatacattaccaatgtagtaaaaccaagttactgttagattacgcgacacattgttgaacctggcatatcataaaaataaagtactgatcgttgttgctgatgtctcttcttttcttggcttagttccttaaatgattttttttctctgtactttgttaccgttgtcctcatcttcttttctgtgtgtctaatggctttataatagtacagtttagctcaatcaaggaacaagggactcggattattatatacaatctatgggagaatgaacagggagagttggagcttgattttgatactgatgtaaatgtgagtgccaactaataattaatgaagtcatatagccagcaacagaaaatgtggttaaatatgaaatttagtgatgtttgagatggcaggatattcaaattagaggtggtaaccgagatcagaaaaatatccagctggcaaagcagtttccaaactccagacatttttttacatatagacattcactgcaggtaggttccagatttactttgtctgtttgtgccaaagcaatgctctgaatgcttttttttttcttttttcctgaggaggcctctgcagttaatgtatcaaaagaaaaaggaaattttagtttcaaagagaaaaacaaaaaaatcatggtaaaaagagagagaagaaattacagggaagacaacaaaaaaagagccctctactctgaatcataattgatattaggaataccatttaatgttggatggctacttattttcttagagaacatgcaaaggcactgcatatcattttattaaggcagacttagaaatgataacaaggcttggttgattgtagtgctatttgctaatccactaattctatggtgaattttctgcagtagaaaagacagtagtaagcatatgagccataaatagttcattggaaaatttagcacacttacataaattgtgcagaggatatatgtcaacctgatgttacttcctttctgcagagctatgcatcgattttgtatcttcgagttccatctgtattccaaatgattttacgaggcaaagagattgaacatcataatattattggtgacatgatgatgaagaatcatgttatttacaaaccagtgatgactgatggatttccgagggatatcgatgtaaagattacaagttctgtacccatcgtttcttgtatagtgatgatcccttaacatattttgtgcatggttcctcatctttgcatgctagatgatgactgatgttacaattggttttgttaaagatgcaaaacatcatattcccattcaaggatttaatgtttaccacaagaaccgcttgataaaggtattcatttagttatgccacatatatattcttatgatgatgaaaataaatacatttttatttctagcttctaaaatgactgcacatccatataccaattttacaattaatggaaagtaaatagatttgggatttgcacatttatgttctatgttaaatttctctgtaactcttatgttttaagctgatctatttttggagtaaaatgcaccataggtccatatggtcctgttgtcaattgggcatcgcacttgggttcttcaagttgcgggcatgtcgctttggttcctacttgcaagctgcacatataggtctgtaattttgtaaagcagtgtcaaaaaaggtcaaaaaccttcggtagttaaagatgatatgataacttagctcaatctaaaccacaatgtgaccatgctatcacctttttttagataatggaagatgagggatacatctctggtggtctggcctatgcagaatgcacccagccaatgtttcaccatttgaagtcattgggaaactaatatttttttgtttgaataataaagtttgtttctgcgtgccgttgattttcgatgcttctaattgatggtagttggcaatagcattgtcatattttagcttaaataggattgaggtgccacatttccaattaagctcagtgtcagcttctattggtacacctacacatctaaggatctagatgtgcaatcatcacgttgaggataaatgataacgtgcccacacaagtttatggacttatcgcacaccttatttctcttattacgcttggtaatcaactgaatatttcttgttctaagcatggccatcagcctgtcttaggtgattataacagtcaggatacgagtctcatcagaagtatatatgtttttttagcctttctggagagtgtgggctctacctggaattcaagggcgtggtgttataggtaagaaatccttctataagcccctttggcacaacttcttcatgtgtggaaagctgatactggaagaagctggtgacagacagcttctccttcatagccgtaagttgctgcagaatcagattctgtcaaacagcgacacttcaacttcttagtggagaagctgatgtagaaattgtgcctaaggggtctgtaggtcccttcttcagaccatgtgtaatcattataacttgcaggtgtacttgaagtcaactttgtagaaccagctcatgataagcaggactttgaacgcacaaatagccttgcaagactcgaagcacgattaaatttaatgcagaagaaatactggtttgtcatgtcgttttgcattgtccatttgttgtctgtaggcataccagttctttgaagaattctaattagagtctaattaccatggaaaacacttacttctgtttcaggtctgataattgccatcgaataggttatggtggcaattctgctaacagaaaatctgggagagaatataaaggtaggtagtgacgcagggctccctgcttgctttatttggattacttggtttggttaatagcttaatatttgtatttttttttcaactacatagtacaaaacaagataaaccaaattggtttggaactttagatagccctgaacgcatgcatgcatacctttgaacctagcaaccttagttctttcttttctttgcgttttctttttggcagaggttttcttttacacagtttttctgcataacctgtgctaacaactgagaattttttttttgtttcattctaaggacatactattatatgttgattcaaacaaatacactggcatgcatgtcagttggcaacttcccttgtgtgttcatgtttgtacatccattgccaaacatatgtcaagacataggctaaatatgctaattatatagttgatgcatgagacaattgctttattaagtaccctattattttgttggaatagagacacctgaaaatactccacacacaggaccaacatcagatcaatctcctgaaggctgtagaagttcgaattatttgcaaagaaaaagaagttttggaagtccatattctggatcaagtaataacaatagcaaaactggaataacatccttgaacacaagtaaaataagtcttcctgagagcagattctctttaagaacaacagctcagcagacagttgagaagaccaaaaggaccttaagatatacgagaccactactgcacggtctatcacatacaagtaatgatagtgatgctcagacttcaggcaccccatcaagatcaacttctcatattctaaagacacctgaaaaatcatgccacaatgagaatactttgcctttaattccatctagtgaagcaataagaagtgaagggacaacaagatatcagtcagaggtatttgtgttcctctacatgtaataaactttgtttctgtttccaatatttgtgggtatagtggtagttaaataagctttatcatgatcttacacagtaagttgcattcataatggctgcaacatagcagatagcacaaagcttggattggtttttggtagatcctttactgttgaagtgttcgatttccttttggcctcaggaacaataagatgaatgtactctgcacaacttatctcactatgggaccaaaaaaaagaaaaagaagcaaatgataataccctaccttgttcttttcctccatcttaattacattggatgacctccttcggtcatcccgacaaaaaaaaaaaaacataccttgttctattccagtaattatgtgatggaaaatagttgacatgggatgatctctcatagttttactttcttctagatgactgtttcagtagagatgacctctcaccttaggaagacagtaacattcctcccattaaaagttaacaaagtatgtagtaccagaaaaaggaatgcagatgagtgaagtttaagtacagtgtaaattatagtaagaaaaaactgaagagcaatgagagatggtcattaaagatgtactgaatgtcctaatctatccttctttacattttgcaaattttccttggtttgttctttacatatcaagagcatttttttttccttttgagacaactgatatatatgctttacaggaaagaaatgtaacaaataatggagatggacaaactgttgataaccctgagacagttatcaaattgttgaccgatgaaaattcgtcattaaaagaaaggtagctattaccagtgcttcattcatttcttttttacgttttactggcagttgtatggacaataataggcggtaatcagttgaaatctgaaatcttaagtaatgttgagaggttaaatgttactgtagttgaatttagccaacatatgggtgtttattccaggaactttaacatttgccacatgttcctttttattcctttgttaacatcagtacccttttttgaattattaaaattgtttcctgatgtatgatcagcagaaacttgtttgtttaattcaaaattcatgtaaaatttttattttaaaatcactttatttccaaacagaagtatatgacaccatttaatatcaaacccaagatcatgaaagcttggcttagatatttggtttttcagtgttcaatatatcaaaggtcctaatccaatggattgcttgttaaaggttttccccaaatgacacttagttgttcgcatgaaataagatttggaacttagagtgacttttcctcttcattcttgtttttttccctgtgtgatagtatcatgaagatggaggaatctttgtcaagagaattacatatcgaacgggacaagaataagtctctcattgaaagggtaagcaatactaacttttacctgtggggctgttggtagtatactgtgtgcttgtcctgaaatttttactatttagcccttattcaaaacttgctgcaaaaatgaaccccgccaaaaaagttcaacaaaaaatggcccctgatctctgcaccatcggactgacactgagatcgcgatgttggcattgacccttgccacggtggtgggtggggagactggcgtggcaaagggggtcagcaccagaggtattggcgctaacctcctattggtaaaagggtaataggctattctatacaacgatgcaaaatgtggtgcagtggtgtgatgtctcatgctaccaacacatttattttcttctttatccaaatcatgcctatatatgcctaattctgaccagctaatcgaaagtatgttttatgtttagctaatgtgaactgtatatttttgcaaaagtaattagtacctttttttaaaaaaaaaaacaaagaatttgaacatgtgtgtgtatgcttaataatggtcattcaaagaagagggactcatcctaagaaggccttctttggtaaagcaacaaactactataaggccttctttgtgttgaaggtgtgcctactacatttttaagttataggaggttagtgccaaaggcctcggggctgacccctttgccacatcagtcagcgagctcccctgccaccaccgtggcagggtcggtgccagcatcgatagtgctgagtacctcagcgcgaggtcggagtcaatttgtggttaaagtttttggtggggttcatttttgcaataagttttcaaaaggagcaaaatagtcaaaacttcagcttgccatgcgttaccccaattacaggttaccagaattttattcaactttgcacctactgaggacaatttattctttttcactacagtttggtgtagtgatttatagaaacattttaggcgtcacaaaatatactgacatgacacatgcgatgcgatttactggagccaataatggcttgaagggtttgaaaggtcagactgcattatttcagtctttgtaaccaagtccttccatattttgttttccagttggagaatgttcagaagcaacttggaactgcaaacaaggagcaagaagcattggtagatatctttacagaagaaagagcgcgtcgagaccaagaggtggagaaccagcggacgaaactaaaggttagttagatcttaaaactgtagtggatttattgcgcgaatgcaccgatccaatccgccttgtcgttgaggatggcatcacggcataactaagctcctcagtcggcatagccatttttgatgtcgtctctgctgttccaggaggcgtcgtccaccatacagaacctgctggatcagctgaatgctgccaggagctgccgcaagaactagaaatggaatgaagaagatcaattacctcgttggtccattgtggctatcgccgtaaaataagtttcccttgtacatgttagaataagctatatatgtcccagatggttaattggtgctagaacagctagctgttggtatgttttatgtgcaaggtatgcagtgctgcattttccagtgctaacaaagaagggtgagtcgaccaccactctaaactcgaaaatgtgggagatcgaccatatcggtttcagaccttcagtatcattcgatgcaatactttgtctaaacttgagcagtatgtaaaactgtagttctaaaactcctatcataatgttagtctggttaatcttatatttttacgagttcaccttggtgtgtattatgtttctcggtattataattgtcttccgtgttgatacgcacatatgcttttcctatgaagtccattttttggtagtaaatttattttacaaaacattaatcatgaacttggtatatacatgatcaccaaaagcttatgtggaatatgaggtgatgaaccgaccggttaaagaaacagaattgtagatgtaggtgttgacgcagtaggtgaacgttggggtgaggaatactgaggatgttgccagagagtacgctggggtaaagctatagatggccaaaatggccgccccgcccgggggcggctgataagcgatcagccgcgcgcgcgcggtcagtcgcctccctcctccctctagtatctcatatatactactatatacattttatatatatatatatatatatatatatatatatatatatatatatatatatatatattatttgtttggtgctccatggtgcccgggcaccattgttgaaattgagtatatacccaattcaaatgagtatgaaactttttcaattacttaggtattaacattaactactttactaactagtttaaagcaagtttgaactgaatttgaacttgtttttgttagattttgattctaggtatatagcatccatacatataattagttaggtatgtaatcatggattgtgaaataaagttaaatttgagttgttttgttgataagtataggtatgaatcaaattattataactaggtatatactcacaatttgaaaattttgaaaaatttgagtgattttgtgcattagataccatggtgccccatatgagtgtcctatatatatatatatatatatatatatatatatatatatatatatatatatatatatatatatatatatatatatatatatatatatacatatatatatatataagcaatactagaaagttttacattgtgaaatagagaaagtaacagacagtgcctacttacttcctccatcatagaaaaaaataatttctgcatatgtttagatacatatatagtcagaagatgattttcttttcttacgaagggtgcatctcacagtgcaacctgtttttatatatatttgttgattggtgagagacaatttcaactccgtacttggtaccttaataggtgtagcggcctattgaaattaagtacacgtatggtttctttatttatgattgttagttggtgtgcaacgtcactatatctgtatcttaagtttgtatgcgcatgatatatatgttcatctaatgaccatcccttttatcaatatccatcgtttatcacgctatatttcatgtctagctttaaaaatgatcttattttcatgggctggcaagtttcaaatttgatccaaaatattctttgatttgctaaccatttttttcaaaaaaaaaatcaaatttctgaactttcaatccatacgtaggtttgtggtttggctttttttttttgattcaaggttccataaccattgccaagagtgccacattatattttgatcttttggccggggtcggaagaggggctttaggtgtgggatatatagaatagatctccatgttcggagggaggtggctaaccaatagcacatgagcatgcttggaagcaagcggtgcagggggatgaggtcggtaacacgtacaacaagaactcaagtggctgggaggtgttggcgtcttggcgagatgtggtgctaagtgttaacaatagtggaggcttagtggatgggaatatcttagctaaagctgcacaaaacatctggtttgaagtggggggataattagtagggaagagggaattgagtgagtgagagagagagagaggaggtggctagtgaagcatgtggatgttatcaaggcaggggttgtgtctagaggaggaagggtgacgtcatcgtgttgcaactttggataaacggaggaaagccattgacagagacagctcccaggcaggtcggacaacctcccaagctccaccgctgccatcttctttgcggattgtctttcgacattaaaaaatcacagagaaacattgttagccgtttggatttaacaacggtattggttccgcccctaaagaggacgagtacggtgagggatttttttttccttaaaaaatgaagtacaggtagacactctcatttatttttcttgaccgaaaagtttctccaatatgaatttggatttccctccgacagtagcttctagatcctaacctcgtttggatgggccaaaatcctgacgaggccacgtctatcagtgatgatttccatcggtttttctgaaatgtacagctgcaccgaaatctcggccaaacggaaaacgggagttttcaactttgtgctgaattttgtcaattgcattgtcggttatcgaattgaaactactccgaataaattctgacaattggttagaatggtttgtcaattgcgtttgttcaatatctgcgctaatcgccaaatctcccccaaaatcttacaaagcaggggtcgacgaggcggaaacgagaacgacccggacactcacaacgggcaggagtgggtctcataataagttcatatttcatgtatccgtttaacctaaaaataagttaatttttaacaattattgtattattccatgcttccaaacgtataagacttattccattcttttgtttttttaaaaaatctaagtccaatttatagttactatgtgttaaattaagttgttgattagaacccaaaagccattgagggcggctagggaatgtatcccgtctgaacgggatacttgagattgacatcaatgctgacgtcattatacgtacgcggtaccacgtatgatacctacactactacgaaaacgatttttccgtgtggtccaaaagggttttcgcgtgcggatctcccgcccatctgcattgaagtgtcagcaaaaatccgattttttcgtgcgcacgcgaaaatctaattttcacgtgcgggtggcttatgtcgcaaaaaaaaaaaaaccaaaccctaacccagccgccgccctcctcgtggtcgccgtcgtcggcggtggcgttgccgccttctgccgctaccggccgccggggccggctcccagcagcgtcgctgccgcccaccgccgaatctgggcgggagaggggcgccgccgcccactgctggtcccggccacagccagggttttaaatttcaaaatacgattttatgccagtggggggcgaaattaccgaaatttcggaaatttctagccgaaattatttgaaaatttgactgaatttgaataaaatttgaccaaattcacaaaaacttgcaaaaaaccaaaaatttcgggcgagatttgagtatgccggtgggggtgaaaattaccaaaatttttgaaatttctaaccgaaatttcaaaccctggccgcagcccacaagcgaggccgtgctaccgtcgcccgtgagagacgagagagagatagaagaaatgaggataacgatgagtaggtggagaggataagatagaaatttttgaagtggttgagaggggaaaaatacctgaggagggtatttcgcgtgcggtgctcttaagatgcccgcatgcgaaaatttattttcgtgtggtccgcttgcaaaaataggtttattttttgcgtgtggactcttaaaaggcccgcatgtgaaaaccgatttttgtgtgtggtcctcttaagggtccgcacgcaaaaatgggaggacaatttttctagatgcggtcagttatggaccatatggaatctaacgaggggctcgtacaggaaaatcgttttttagcagtgcaattagttccaagacatgatatttgtgtaacaggtcagataccctataggtatcatgtcaaggtacaaaaacatgatacttaagtaacaggttagataccctataggtattacgtcaatgctgatgtcactgtatacgtatacggtaccatatatgatacctattggtatcgaacatgatacatgagtatcaagtatgatactttatgagtaccaagtatgatacctgcatgtaccagccatggtacctgggtaccaagttggtacctgtaggtaccaagtccgatacttatatataccagacttggtacctgggtaccaggtccaatacatataggtaccaaagtattatgatactactaaagtatcatagcacactaagaaccaaaaatcatatcttaccaagacagagctcaattaaaccaacaaagaaaattgattccgggaaaaaaagtcatcatagtggtagaaacacccatagaacatgtagaacaccccaagatcaaacctcaaacccaagccaacgcaaaagctcgggggtcacgagccaagatctaaatatatggatccgcaccacaagaggccttgtcctcgatgatggtgacctcatcgacgatggccacctcctgaaacgtggtgagtagctctgtcttcgtcttgtgcttgggtacctaccccacgat

SEQ ID NO: 10022 - DNA, 5499 bp, Oryza sativa
ttggagcccgtttggatctatatgacacccatgaaaagtttggggacccaaaaatgcattttgagagtttaaggacctagatgacacatctatacaagtttaaggaccggccgcacttcactcaggaacaaataaggaaaaaagacatgcgctagaagtaagcacattcttagataatttagcattcaataatatatcacaaatagcattaacaacatggctaaaacacataccagtagcacatagaagacagcctccaagggacatccaagcttgggttgggttcctttcaaaataatagtatatatacataggattaaatgcctgtaatacagctgaaccatatgtcttcatgttataaattcctattccagcaaggcagcaaaaccatatgaacaaggcaggtccaacagcaagcgccactttgcttgacccaaatcgttgtagagtgaacaggacaataagaactgccacagttatcatgacaacttcacctgccaaagtttcacattaatagtaagtatgatgtactcgtagacagtacagacttaattcttttcctgaatcaattagtgctatgtgtcaataaactgaaattctgaggtcaccttcattaacactagatattccaacctttaagccattgacagcagacatcactgcagatttttaccaatagaaagaactggaattagttctacaggaaagagaaaacctggtctagcacaatatcactcataaaagcatatataatgatcattaaacacggtgaagagaaattcaatgagcaacgcatcagaaatatgtgaacctgacattgctggtgtgacaacaccatccgctatcaccatagaagtaccaaaaagaacaagcatcaaaagcagcttctttagcatagatgaagtctcaagacgctccttgatcttcaaagacctctccagttctactgaaggcacctggagttggaagcttgatatacgagtatcagagcgtagttggttaggaagcagactaacccttgcattcctgcatattagcgagtataaagcaaatgtccctcctgccatagatacagaacacggtttcattaaataaaaagattaaccaaaagtgctgtgttttagtctactcgtagtgacctagtagtacataatgagatataccttctccatcatcgtttccccataaagcaatgagagtatacttcagcaatggtattagaatcagagtgtatattacaagtgagagtgccccaagtacatcctccttcgaagtaatagggtacttgttgaacattacatcgaaagcatacaatggactggtaccaacgtcaccgaagacgacacctagtgtctgaacagccagcacaatactcctgcctacggtaatttcctgaaagaaaatgcatgattgagaaatcagtagagttcagatactcatgcatttagaatgaggcttgcacctcatcgtccaagcatcatatgaagtgatgatgtttggatttggagtatcaatgtccaatgagaggtacttatcaaacaacttgcatgacaacatagaaaccaaaatactgccttcattcatttctagatgttgttttagaataagtgaacctcaaaatttaattcacaaactaatttgtatttaatatgtgaaaatagcattagtagatttcacatgaaaactactttcatttagttatttgttaatacatagtgatttttgtaaatataaaagcaaaaagggcaatgataaaacaagtgcattggagattgtgtcgatgccctaaatgacaagaaaaaaagaacagagggagcagtaatcaaaattgacaaagtctctaaaatactactttggcagataatttctagtgtgataaatttgaaaaatctatgaacactatcatataatgatagacagttttcagcataaatgtactggtaatacatgtggttaattcaatttgactacattaatggtgaagaaagaaagagaaataaaataactcgtctcgctcattcatcaccagtagtttcacttaggtgactcaatgcaccacatgctgttctttccacagcatttagtttcacagaacaatttaactctgaaaagccaaaccaggagatgaaacaaaacttttcatgtcacggctccttattcacatccctaaggttctaacttctgatctcgagtagaagacgaacaatgaattgcaatagaaatcatgctccggcacatggagaggtatgcgtccattcatggaaaaaggatcagaattttgtcacatcaattatgcatgttttcgtggtgttttttgcaatattgtagtatacattttgtgttgggttcacttagactgcagaaaatggctaaataaaagaatgtctgggacagaaatagaataacagtccatgtgatctgataagcattcacaataaactaaaagccatgactgaacaaatattatatcgctaggtcgcaatatcacatcaacacggccatcgtgatattcctgtggatattgtagcttataaacttctcacatcacaacaaagaataagacatagatatgctatgctgctacaagtatcaacaaaaaatggagactagggtagtaattacaattcttcaaactgtccacaatctgcatgtaacacttacatcctcagatgtgtcacctacaaacaacaagattacgccgcaaaccaagaatttcactcatcgatcaataacccaaccatcaagagcatgcgtgtagcttgtggaccgaattgcactggttcatcagaaaagcattgcaaacacgttgcatccatacacagatggatacaacctagaagaaccacggtacatgctataaactagtatgattttgctaattcactaaccagaccaaccgaatgaaattacgcagtccacaccacaagcatatagtgagctcagtatgatgttcttacagcccaaaacccaataataccttatcggctccaaggctgcaatctcaattgagcagcagcgcaaagccgcctaatctaacactatcactagagtactagaccacgattgataagtgtcaggaacacgcaggcaatacatcgaacagttggcgcgcacaaaagtagaggcagccaattttaagcaaggccccgtgtttcccgtgggggctcgggcgggtgcgcgcacctggtggcggttcatgcctgcgacgtcctgcgcctcgacgtccagcgagtcggcgcgcgggccggtgcgcacgagccgctggcggagcatctccgcctcctcgtagttgtcgtcggagtccgagcagccgccgcgggagcccgaggcggccgccggggtgccgcccccgccgtcggagctctcgatctcgtcctcctcgtaggcgccgccagacaccacccaccgcatctccgccgactccgtcttccgcagcctcatcctgccgccgccgccgccgccgctggcgctgccgctgccgccgcttcgggtctccatttgggtcggcgcgggaggcgccggtggccggcgcgtgggtgtggggcactggctccgtgaagcggaggagaacggcagaaggggaggatcggagcgggggagaagaagacgctggagagtgatgaaacggaaactgcagtagcaggagatagctgccgtcttcgtcttttcccctcctcatttttcacccctcatttcagtgcacttaatagtcggttaatttatgtttttattttctcccacttcttttgaaaaatactccctctgtattatcttttttgttctcaaattttttaagaaaatactgccttcgtattaaattttaatgtatgtcgtcgtttacttttttatccacgtttttaccattcgtcttatttaaaatatttatgtaattatgatttattttattgtgacttcatttatcattaaatgttctttaaacatcacatataaatactcttgtatttgcacaaaaaatttgaataagatgaatggtcaaacgttggtcaagaagttaacaacgtcatacattaaaaaatgaagggagtagtttctttataaaaatataccctacactggctccggtgaaacgaaggagaacgacagaacagagggtcggagcgggagagaagaagatttaagagacttggacacctgagtgatgaaatggaaactgcagtggtaggagacagctgtcgtcttcgtcttttccccctctttctctctctatttttcacccttctttaacttttctttaacacaacagtcggttaactttctttttttcctacattttttttaaaaaaaatactccctccatattaaatttaaatgtatgtcgtcgtttactttttatcaacgtttgaccattcatcttatttaaaatatttatgtaactatcatttattttattgtgacttgatttatcatcaaatgttctttaagcatgacataaattattttgtacttgcgcaagaattttgaataagacgaacggttaaacgttggtgaaaaagtcaataacgtcatacattaaaacgtggagggagtagtttctttataaaatgtaaacaatcggttagcttataatagttggttaacatagagtttatagtacgtgcagcaacacctttataaaacataattaattcatattaagaccggcaacaaggtttttatatgttggataggaatctaggcacacatagtcaaacctaaaagagttgttaaactgcagatctcaaagttaaggatcataaaaaggttaggaaaaataagaaagcggtggccgctagtgctaccgtggtggccggttagggcaagaaattgggggaagaaggaagataggcatggacgctagtgctaccgttaacggtggccggtgaccagcgttaactagttcttggagaggatgtaaagggtgaactgaaggtttgaaagaatcgcctcccgggccacccaatggagcgacacaggagtccaagcaactagtttttgttgtaccgacatgcactaaatttatctattgtatatgttattttgctataaaatattgtgtgaagatgacaataatacaaaactctcggttctatatacccatccaagaagatactatagaacttttgattttgatttatagtgcagccatgacctgccgaaaatatgattgtatgttcaatgaaagccacgtaaccaggtgataacaatccggcccaggtggggttggccgagacccaataacttaaggttgctcggaccccaacagttcataggcacacctactcaggaaaatgcccaatctccctaaaagactagtccaataggggaagggtggctctcccttttaaggtggcttcctcctcccaaggtaagaaggtgggattattcaaaggctcacacggtcgccgcccgactttagcgtctttgccagtgggtaatagtggaggatgtcctcatcaacagggaatttcgacgttgtatatacgattgtaaagccaaaga

SEQ ID NO: 10023 - DNA, 1835 bp, Oryza sativa
tggtgttaggcgactcccactagttgttaaccaagtctgtaaggagtaccggtgctctgacccgcagatggacgcttacgtacgccaagtgcggcgtatggagcgccattttgacgggatagagcttcggcatgtgcccagacgggataacatgattgccgacgaactctcacggctcgcgtcctcgcgagcccagaccccaccgggcgcctttgaagaaaggcttacccagccgtcggcgcgacctgaccccctaggggagacgggtgtgcctgaccggcccccgaggcccgtcggagtccaggcctcgggacccgaagggagcgctccaagctcccttagattgattgcttggatcgctgagatccaagcatacctcacagataagactctacccgaggaccgcgaagggagtgaacgcgtccatcgcatatccaaacgctacgtgctggtagaagggaccctctatcggcgcgcggctaatggaatcctcctgaagtgcattccacgggaacaaggcgttgagcttcttgctgatatccatgaaggcgagtgcggagcccattccgcctcgcgcaccttggttggcaaggcctttcgtcaaggattctattggccgacagctctcaatgacgcggtcgacctggtccggcgatgcagagcgtgtcagttccacgccaagcaaatccatcagccggcccaggccctgcagatcataccactttcatggccatttgctgtctgggggctcgatatcctgggaccgtttaggcgggccccgggcgggtttgagtacctgtatgtcgcgatcgacaagttcactaagtggcccgaggcttatccggtcatcaagatcgataagcactccgcacttaaattcattaagggcatcacggcccggtttggagtgcctaaccgtattattacggataacggcacccaattcactagtgaactcttcggcgactactgcgaagacatgggcatcaagctctgcttcgcctcacctgcccaccccagaagcaatggtcaagtggagcgcgccaatgcagaaatcctcaaaggccttaaaaccaagaccttcaatattctcaagaagcacggcgattcatggatcgaggagttgccagcggtgctctgggcgaaccgaaccacaccaagccgagcaaccggagagacgccttttttcctcgtctacggcgcagaagcggttctcccatccgagctcaccctgaggtctcctcgggccaccatgtactgcgaggctgatcaagatcagcttcgcagagatgacctcggctacttggaagaacgaaggcggcgtgcggccctccgagccgcacgctaccagcagagcctgcggcgctaccatcagcgccacgttcgggcccgatcactctgcgtcgacgacctcgtcttacgccgcgtccaaacgcgtgctggattgagcaagctctcaccaatgtgggagggtccgtatcgagtgatcggtgtcccccggccgggctcggtacggctggccacgggcgacggcacggagctgccaaacccgtggaacatcgaacaccttcgtcgcttctacccctaaaggggggggggtcgggtgtcagattttggctcgggccaaccccacacccccctcgggtgtgcaggattggccgggggctaccacacatgcacatatattccctttttccttatttcagcatttcaatagaagcagtttcaattttctaaaggttgtatctgtgccgtttttccttctgaagaattttaacttgaaataaaatcactcgtgctcaaccttgccctagggggctcggttcggtcagcta

SEQ ID NO: 10024 - DNA, 698 bp, Oryza sativa
cccattggcagagagcgaccgaagtttccagtaaaaagcagtgcggatgccacacaaaatggtcgaacacatgttgaagaagatgatggtactggtactatcaaggttgagagggctacaagggatgtagtctctccttcaaggtgaatttagaaaataacttgtaagcgttatcgtgtttgtcttcctgtgccttattattattatttttttgggattctattttagtcaaggaactgttaggaaagctgctggctggaatcttccagacagatcagagggcacaggaactgttcgaggtggtttaaagccatcacaagtcacctccaccaaggatagtagatccgatgcttctcatagtccaaacacaccaaaacgtacagctgatcgagaaaatcaatggagaacatcatggacggggtctgaagagtcgatctcaacaaacccgtcgcagagagatgcacaaagtgaatatggaagactagagagttctacagaagatgtaagaccttttttagatatgctatttgtctaattgttagtgttgtttctaactaatggttatcttccagaatgaccaatctataagtgggtctggaactgttgtactgcgctcgccaagagcatctcaggtgtaccctgcagctactaaccacagttccaaggtgtgttttagattcctaatatgaatgtcatag

SEQ ID NO: 10025 - DNA, 16765 bp, Oryza sativa
ttggtttgaataaatactttttggtcttgacaaagaaaaataattttagcttcttttcagggccagaagattcagatagaggcaagctgtttaacatgccagaataaaatagtaaacacaaacaggaacagaacatagaaataatgagaattgcttatgtacaattaattaacaggaggtgttcaattgtacataattattcgagagtattattcaaacaaaattgcatagaatctggcaaaaacattaaacttctcatacatgcaaccagatatgacttgcttattaattttttttcacgtgtcaatattcaccacacatccgctcctgcctaacagacatcggacaccgatacctctcaccatatctcgcaggcccacagcgctgggtaagtgtcaatgttggctgtgccaaggccattcgatgataacaatgcatgggccaagacgttataggaagcagttgatctgcctgcatcatcagcgcagaggcaagggatgcagcgaaactgggcaaaccaacagcgtgctggcggttctggtcttggtgggggacaacaccagatcaactcaactcttttttaagacacgtcatggaactgcctaaaatcaaaaacccaagtacagaggcctctagtggtcgccggtggcgaggtacgccatcatggttgacagatttggtggtggaattgttgtacgtgagcaggagggaagtagatatagaagattggaacgagatatgttcggtggggaaggagtaactacactatacttcgctcctttgttctttttttttttactttattcgagtaattagggtattgtaataaggaataataatatattgacatgtggttagaggagtgcatggcaggcgggcagcaagggatcctttgtgaatgaaactcatggtgtgaactcaatattgggcataaatgtaattcttgatcagttgaggaatcctgtttttagctttgttaagtctagcaaaggctaccgaaaaatactatcttcaactcacaaaaaggtttgctgatggttcacctacaggcgcaggcagacaaccaaggattgccggctggcagatcaaccagtgcttttaattgaaacaacacagctcgaaactaagggtaggtttatatcttattatcagttcgcatcacatatccagcacaaattggcccagcaatgccatagctcaaagaaactaagcacaacatttggctttgtagcctagcatgcatcaactgtcacacagaagtgccttatgtccttcaagctgggcaagctttcctgggcagttataggcaagctttcccacagaagtaagatttttattgtcgttagcaaactgctgtccttgctaagctaggataagatttctcttgcctaggatccaaacataccctaaaagatgtatgcttgaacttagttctagtaccacaaactagcacatcatgggcagatatagatacagcaagataagaggtgtcatgtggcatgcatgaaccgatgacaaagaactaagcacctattatttttctcgtgcaatgaaaatattgcatgctaattctaaaattcatttttttcagaaaaagaaaaaataggaacaggaacaggaacaggaacaatcaagtaaagctatgagagaaagcaatctctttttttcttgctcagcaccactccctccaccccaatatatagggtgtacctgtattttactcaaatcccacaatataagacggcatctcctcgacagccgtttattcgcatgcaagcatttaagttttgctcgtttccattcatatgcatgcaagcattcaagacatcacctcctcggcttccgtttacaagcatgcattattgctgattagtttgcttagggcacccacaatggttatctataggctctctataagagatccatgtcagcatattttcctacttagaagagattaaatgaagagagagagcaaagctatctactaacctggagatagtctatagagaaaaacgaggcaatgtattagagagctatagatacccatgtagacatactattgagatggtttactattattctagtctattgctgagatgtacatgttttatagatagcaccttactttaccattgcgggtgctcttagagcaagtttaatagtatagccaactactagctccaaatcatctatagtcaatttaatagccaattcgtacaatagttacatactacactattaatatatggtcctacttgtcatacacactgcgtcttggagtccgtgctacagctggctacaaatctgtagctcgctgctcttctctctcctcttttatctccttaaaatatgtttatagctggcttatagcctgctattgtacctgctcttagttaaaaggcctctctctcccagcaatacgtgggcgtggcctgctgggatacacactgtgaagatcaaggtccacggatgaagcaaaacttcacgtatcggggcgaacggaacagttgaaaatccttggtctgtgcgtctagagcaggtacgccctatataatgggatggagggagtatatgcttacggtgtaaacttgatttattctatggtaggtaggtaactaccaagataccttcatttccatttttatggtgatacatgtgtaataatatggaggctttacaaaaaacatggaggcacttaaatgtggacagtaacagaagcaattaatggctataactcacaacaaaaagatcagtttccacttttggtttctatttttgatgcaccaacaaccgttagctagggtgagcatccatacatacagaattaatctcgattaacctagcagctagagagcagagcagagagacacacatcagcataacactagcaaatatcgtgagttcgcgaccaaaccctagaagccccaatttatccccccctaaccctacaagtcccgattcccctttggaagtctgtgggcgaggagggattcgaacccccgacaccgtggtctcgtagccacgtgctctaatcctctgagctacaggcccgccggaaatctccaccggatctctacccgtggaagacgaagctcgataagcaatccccataaactcacctacgcagtaccaatcgcaataatcccaaccccaatcgacgaaaccgtttcatgataaggcgacctgttcgctcgaaaccctagaaattgaatcagacccccccccccccaaccccactccacgaaaccaccaccacaccgaaattgcctagcggaacgaggacaaggaaacgagtagcgaaccaacctgatggcagcctcagcgccaccccgggatacggcggccgggctgtacggacccccaccctccccgcgcaaaatccctctcgcttcggggttaggaggcagatcgagacggaggagagacctcaggacctcaagccctacctccgccgcgcgccgccgccgccgccgcagccgcgcttcccccttctcttcgccggcgagagaggcggtggtggtggtggggaaggggaaaaaaaaaagaggagtgcgtggttgtggtggctagggttttaacgcgacggggtcggaactcggaagaggaaagaggaagcccttgacccggtccggctcgaaccgtctggctggctggctccgcggggtgctcgggacgctgacgcgcggggcccacatgggggttgcgggggagaggtgtggggcccacctggcagagggagggtggggggcgcactcgataagcttttctctctctctttctttctttcttccttcccctcccgaagattttgctcgctttctccaacctctcctccgctccgaagcggaggtcggcggcggtggcggcggcggcggcgcgtttccccggcgagtaaggtgaccggctgctcctcccgcacttcctacgcctcgttccgtcgctacagtagcggaggagggcctgcaatctcagatcaggggtacctgtaacccgtttcggttcttggtgggtgggttggtggtggtggttcttgatccatccatccagcggttttggtgcatctgtgcgagttccatggtctaggttttttttttcttttagcatttcgtagtacgtggcccgtggtagatggcttgggggagtgcaatgaaatgctgtgggaaattagcgtgcgtttagcacatagcatctgttcttagtactgttttttttctggatatgttgtggccttgagggtatagattgttgttaatttcgatcactgaatgtgtggcagcgattaatagagtgccatgggataaactttcatggaagtagagtggttcctttttttttctcttttcattgtgctggagcatcatgatggggctaagatcggatgtttttctggttgtggttatgcttgaatgtgcgggtcttctcttggtttttcaatggtctgaaaatgtgggctttgtgctggactgtttgagattttgtgtgctatctttacacggtgatttttcataaggctgaagctgtaaagccgaatgtcgattcttatgatcggcaatataatttatagggtgcactagatctaggagagatggagacaattgtttatactggttcagaccctcgacgtgagataataccctagtccagatgagtggattagatctgtattggagtgcgcagcacggcgtaggaatagcacgtggcgcttatggaagaatgagggtttcccggtgctccttatataggtgcggaggcaaccggctagatatggtagtgtagccttcataatccgggtacctaccatctatttacaagggataggattggccaacttatcccttatctctttcttagtttacaagttaaccatgtgggcctagggcactcggcccacctcatgccgcatggcccaaaacgccttgctatgggtatctgggtaccatgtaccccacactgaactgaactgaaatccatacacacttaataacaactggagctatttttttaaagtgtatcctggaacatttattgaaaataaatagttagaatatttttttctaatttatttgctggatagctagacagatattaggatgagaagggattagcattggtagatctcaactatcaattacttaggggtaaaattcataagccaatgactctgtcaaaacctctctgccactgtttacatttcttaataaaataataagagtacaatactgaagaatgtaaaaaggaaacactagaaatggatgatatttgtttttcctgctttcctttttttacccctttccttgtgttaagcgatcgaccttactatatactcttgcattttgtcattattacatggaaatatcaccataatgtagtatgatttagtgcatggcttcctattttactacatgatcttcatttgccgacagttgaggtacatagaactgccctcacatgctattttttcaagcatcacggcatcccccttttttctttgatgtgagcatcacgacattcttatccaccagactaccactagcatttatttactattagaacaggctgaacagaagccaccatattctctatcaagggctagaaattacaacgttatcaaataaaaggagaaatatcgtcactgttcatcaggatgagctcagattataatggtgaagatttattggatatattttagagctttctttactatacctgtatgaaagttacaattgtgtttctagaaataaacctaagagttatatagcaaatgcatttctactttcaatagactataatctagccctgcaaattgcatgaagaatccggctatctctttattacaagagatactgcacacttttgtgtggttagttcttatatccagctattagattggcagtaagcagaaaaataattcaacagactacctgaattcgtttgctcttgactctctttgtgctgacaactatcattatcttagcaaaatatagtaaaaaattgaacttgtcaaaataattggtcataaatggtgtgcgtgaatttacttatcatcagctatcactgatatcgtaaacaagtatgagagagcacttttttgtttttgcttcattatttatggactttgttgttctggttgtgttgatagttccttttttacacactgttttattaagtattatccacacaagttacaactgccctttttctttttttccttttttgtttaacaatggaccaagcatcatagaacaattaccttattgtccctcttatgttttccaggagaaatggaccttgcatctcaaggtgtggtaacacaacaacaaaaaccaagtggacggagaccggttggaagctcacaaatctggacggtatgtagctgcttctccctttgttttcacttggccatcgtgaacaaaattacatgcagacactcaattttccacagcgatatggtgttctgcttcccagccagcagacacggaagctaaaagaatgggttctaactgacgaacagcaacaactagttaatgctagtggtcttggacatcttgccctcaccacaggatttactattgatcgttctttgcttacagccttttgtgagagatggaacaatgaaacaaatactgcacatttcatgggatttgaaatggccccatcactccgtgatgtttcatatattcttggaattccagtgactggtcatgtggtgactgctgagccaattggtgatgaagctgtgaggcggatgtgtttgcatttcttaggagagagccctggaaatggagagcaactgtgtggcttaatcagattgacatggttgtacaggaaatttcatcaattgccagaaaatccaactatcaacgagattgcttacagcacccgggcataccttctttaccttgttggctccaccttatttcctgacacgatgaggggatttgtatcaccaagatatttacctcttctggctgattttagaaagatacgtgaatatgcctggggatctgcagcccttgctcatttgtacagaggactatctgttgctgtaacaccgaatgctactacccagtttctcggcagtgcaactttgctcatggtactgttcttgtttgaataaatttgaatgattgtcgatgatatttggtatctttgttaatgagatttattttgttctctcaaggcttggatttatgaatatcttccattaactcaaccccaacaaaagaatcagaacaccttgctgccccgggcctgtcgatggaactttggaggagcaacgcgtggacagagaaagaaagtcatggaatggagaaaagttttcgatgagcttcaattttctgatgcaagtgcaagtctacctattttatagatttataacaaagattttaactgctgttgtgttattttatattaattaattatattttcaggtcaactggaatccttacaaggacatgaatcctgcaattattccagaatattgcattgcagcagataacatctgctattctcggacatggctaatcagctttaacataaaagaggtgtatgtacctgatcggttttctaggcagtttgggagggaacaaggtcgcctccatggggtgcccatgtgggcaagaagaacttggagcaagtggaaggactggagggttgagtatgctcgtgaaatcgaggagttccatcaattggttggctgtcgtttcactcctgcagaaaccaatatcaactccctcccaattgagtctataactaaacaagatgctgcaggatgtagtcggagcacatctcagaacttctcttcaatggtaagctacaaataagaagctaatccttcatatgtttttgcttgcatagtggtccttattgtaattgctgtttgtgagatgcaggttgaagatctgaggaatgattttccagtaattgatcgttacctggagggacagttactccctgtggaagttgcaagctttctagagagagtgggtatgatgatcaagagttactccccaccacagagtagccgaaagaaagatcaagcagggcagggccaggacagcaatgtcaggtcaaagaacccaagaaagagggggaagccgtcattctttcaagatccttcaagccctccgaactcaagggcggaccgattcccagccgtgctgataccttatcaggatagcaagtgcgacatggttctggatggcaccgtccctctgctcgatggagcggaggagttcaaggaacaaggggtcatggacctctggcagaactcccacctgacgacgccgtcctgttcctcgctggactcgagctcgccggaatcaaggaagcggaggcagcaagaccgcgacgaaatccggctccccagggacaccgagaacctccgaaggagcgggcgtctctgtgtgcagctgaaaatgttcaagcacagggacggggtgggagccgaggcgaccaacccgatcttcctctgatcatccatggtttatgtacaaagtagcagaaaaacttgggctgctgacagttaactggtttatgtagcgtcgtagactttttgctggtagcgccttgccattcactgcgcagagcttgcaagctttatctccttgttaatactatctctctctagtctctaccatgtagttgggcaaaatgtagatgatgccaccaagacccttttaactgtgttgctcgtgaactggattgtgccctctcccgtttaatctgcagctcttgcaacatggtgaattggtgattttataatgatgctaagctttgactgcttgtagaatgatccaagtagagatgtagagagcctactgtgctatcacatcaattcatcagccttgtacgcttggattgtttgttgcaccagctactcctgctgctgttgatcctaaaaccagcttattgatatgctggcagtgcaccattgaaggctcctatagccatatttggcgaggcagtggctagccgaggacagtgttaccatgtgatcagtgatcattctacatgggaaagctaccagtgatgagagcgccacgtttcgccctagcagcgacctctggcacggggggccccacacgtcagcggtggaggcaaggcaaccacgaaggcaatcgccatcgcctgccctttcattgcccaaccaacgctcgcctgcatagaagaagctcttcgccttctttgctgtgctcttgttgcctctcgctcgctgctgcggctactcattgatcctggttagtttgctctctcttttctatcactctcatcgtgtgatatgatatgccagtatttttttttccttgcatctccttcgttcatggtgaatcccggatcgctttgtttgctcctgcattttggtattctttcatcatttcatccttgtgcttatgactgggaatcgcctgtgtggggtgtgtgtttctgttttcctgctgaatttttcaactgctatggatggtctccagcttctgtgtaagggttccatctcatctatggtcttcagttttttttttctcctttcccctttgttttctgtcccgatttccatatttgtggttgggttttagaggatagcggtcaattttattttgctcttcctagtcagttttagaaggaaatggatggttatcggatgtatttcttcgatattttgttccccctcttttgtgtgatgttttctatgattaaaatggtataccatcttcttgatcaagtgtatactcgttaatttagtgctggtattcttcctcatctgctgcaatattttaagatgatggaaatggctgctgttaggcgcacaaccaacttcatctacgtcatttcgattcaattttcctccagattttgtttctttatttttacagttgattagatgagtagttcagttcctgtttcacaacgtatcttttttgttcaggtaaactttgatggtttcttggctggttgctgctgtccttttgtaccttgtatgtggccaatcctggcattttgctttctccttattctgaagaaaatttaaagcagttgttcctagtgcttttgctctttgtggttgcagttctcttcctcttaagggtagagctcacgtcatctgtttaaaaacttctacagttttttggtgaactttagtgaatcaaacctggtatctacagtttttcccagccttattatcatcatgcctgatatatacagtccttttgattaccaatgtcaaagtttccagattctgtgctagttaattttttcatttccttgaggggaacaaagtctcaattacatgttcagttgctcatataagcaatagaccgctcattgaggacttgttaagttgttatcaaacttatgcaaattcttgccgtacttaacctggatgcttaaactgaaatttctctgcgagcaattcttggattgtatgcacacttaccacataacattccttctcttaatggaaccagatggaatccgcagaggcagaaccaacaaacaaaagcgtcattcaggtaattattatttatcaacaacgagcaagcgacaccaatttgctgaaccttcctttggctcttgtgatatatagtttgtacctaaatcataacattttgatgctcaaacatacagggaacccatgaactaaccgtatgccagacgacggagagactcgacacatggaagctgaatgagcagcagcaacaattggtcgatgcaagcgggctcggcaacctgatacacacagcaggcctagtcatcgatcgcatcgcgctcatggcattcttcgaactgtggagcaaggagaccaacactgctcagctcaatggctttgaaatggcaccctcactcagggacgccgcctacatactggggattccggtgacaggccgtgtggtgacaaccggagctgtgctcaacaagtcggtcgaagacctctgcttccagtatctggggcaagtgcctgattgcagggactgcaggggcagccatgtgaagctctcttggctgcaatccaagtttagccggatcccggaacgccccaccaatgatcagaccatgtatggcaccagggcatatctcctgttcttgattggatcagccttacttccagagagggacaggggctatgtctcaccaaagtatttgccacttctgtcagactttgacaaggtacaggaatatgcttggggtgctgctgctcttgctcatctctacaaggctctctccatcgccgtggcccattctgccagaaaaaggctattcggtagcgcggctttgctcatggtatgtttaacaaaaccattgtataggaaaatatcacttgaatttcgagtaggaaatgatcttccagttctatgaaactatcaaaaaactattttgattgttatgatctgttcatgttttctgaaaaggattaatgaacttcaacatgagaattgtaattgatagtaaggcataaagatgataggaaataacaaaattctccatttttgtttctcacaaaattttaccttacagaccaagtttgtgacttgtgccttcactgtgtccattgcgaaaatgttctgatatattctgaatatctgtctgtagggctggatatatgagtatattccggcattgcgccctgacatgtatgatcctccagaacacatcttcccacgagtactcaagtggacagggagcacgatctctcaaccggccaagaacgtttcagacatcaggaaagccttcggcctgcttcaagtttctgatgtaaaagtctatccatctgagttgtgattctcatcagtcatcaccacagttttgtgttcagcatttcatcctttcccttgccatttgatttgagaccatatgatgatatgaacaacaacttcaggtcaactgggagccctacaagggcgttgatcctgcatccattccgaagcattgcgctgctccggataacctctgcttctccagaacatggctggtcagcttcaacctcaaggaaatctacgccccggaccggttcgctcgccagtttgggcaagaacagcatcgcccgctcaacgatgtccccgcgttccagcggcagctgtggaacccggcagtggactggagcctgatgtacgcttcagagatcgaacggttccagcagctgatcaacgctgcagatggtggtgatcatggtcatacagcagatgccgccgccgccgccgccgcagatgttttcactccggcgaccatggcgcgagcttcccttgggctcagcctgatatccgtggtaaaactacctgtcggtgaaacacttttaatcacttaggtggacatctacccttttgctacatactatcaactaaatggttataaaaaaattaaaaaaaaaataacaaggtagattcatatgtaataatatgttatcctacaaatatgcaagctcaaattttacttatttaaattgtaataaaagtagcaaattaaattttaattagtatagatatattcgcaattaactttgttatcattgttacaacttacagaagtcgaatttgctggcatgtttgttatcaatctatcttgtcattttttttaaaaaaatcatagtcatatagctaacgtataataaacgtgtggacatgcaccgagtgattagattagaatccatctccctaacactcgtgctgaggaagctgtcacattgacgtgagcgtgtcatcgcggttcagttcgggtgattgcatcgtgcgtttcgttgttgtgatcgattggatcggttcatgcaggtggagggcgtcagggaggagctcccgaccgtcgcgcggtttctggagcaacaccgcctccccgccgagctggcgacgtccctgtccaggatccgcggtctcatcgaggcctcccctcctgctccgccgcttaagcgaggcgacgccgcgccacagccccagccccaggtgatcgcggtgatccctcccctggctgtgatgccaccgcgcgagcaggaagcgccgcatggcacgggggacgcggaggctccggggatcgtgcgcggcgacgccgacgacgacgacgccgtgccgccgaaggagcggtctgatgagcagcagcagcaggatgaggaggaggaggaggaggaggagcagaagtggcggcggcggcggcggcgggaggaggaggacggggcggcgaagggatcaggcggcggcggcggcgcggtgcggcggagcagccggagctgcgtgcaggcgaagaggttcaggcgcgtgggagggaagggctcgcagtcgtccgaccccatcgtgctgtgaatctgcggccgctgctctcatcagctttgctactagcctaccagtagtgctacctttgcagtgaactacggttgtgttcggtgtccatgtgtcatgtgtgttaggcttaggcagacggtcgaagagctctggtactggtacttactcctatgtatgtcgttgatcgttgaattcaggttatgtagcatttgatttgactactatggatttgatgactacgctagatttaaaaataaaataagcattgaatttaaatgctactccctctgtcccaaaataaaccaacttcgtactaggacgtgagacatcatgttcatttatactaggatgcgtcatattctattatgaggttagtttattttgggatggagggagtagtttgctagcgaatctcataagaatctaaaacattgtgggcttgatcgaccgggattgttgttgcgactgcatcaattgaacaccgtggtaggttatagctatttttcaactgttgcaggaacaatagttgttgataacacctgataattcaaaagatgatgtgtttgaatgactaacagaaaaataatatttgaatttggattgattctaaaggagagagagacagagagaagacgcaattgacttcttaagagcatatacaataagatgaatcagcaggctccaaaaactttaatgtcatcatattcctaggtggagggggagataattaaggaaagagaagagagcgagctataaatctggcaccgggcggtagcacaacttcacatgtcaaacaacttgcatgcagccagtactagcgattaaaaacatgttttgtgggtcccacatcacccccatttgatcccatgtgcttcgtctcacttcgcccttgtgccagatccacatgtggcgcacacaagatgggtgcccctgatgtgcgccatcctcttcgctcctctggcgtacgaaaaaaaaaaaatcgttgcctcggcttcagtagatcgacgttggacgcccgccctctcacaccgacaccggtcgtcccagctggcagttcaatgtcgctccagtcgatcccgacctccgtcattgctgtcaacaccggggcggcctcaaacccaaacccaatcaccacgccgccttgcccaacgtcacacctgtatccccccacactgtcgtgatggccggcatcgtggctctcgccttcccacatatatagctcactcgttcttgccattcttcttctagtgtgggtgtaggtgactgatcgatcaagttgctacttttcaccgtgctaactagcttctcggtcaaatagggcgacgactttagtgtggatggtggtggccacaatccctcatgttactcttccaccacagccaataagagctccactagtggtagtcatcggcactcacctacgctcgctcgttcattccggcaccccgtccgcggccggggcccacgctcgctcgttcattccggcaccccgtccgcagccggggcccatctcccgcgtcttgcagctacacaagatgtggaagagaaaacatcacaaagaaaaagtagaggatatgtttatactaggaaagctgagattagaaaaagaaaagcaatcaaaggaaaaaataaaaatgaggtttgaggtcatgggttaaattcatatggaattaacgtataggaatgtgattcaaaggaatttccatacttcaatcttacgttaacaacctagataagaaaaaattctaaggatttggattctcaaaattcatatgaaaattctttaatccaaaggtgccttaagtttgttgtatctcctcaactctttttcccttgagagggagttattttatacggttgtaatcacattaacgctgttgtacgatatacacgcacgtatgtgtcgtgcgtgtaatttacacacatttaaatattgtttgaggcacatgtactcacctaccaaacatgcatttgtgtaattactcaaagattattgatatataccggtggtaaatcggatttgaatctttataagctagatgcacaaccacgatatatagacatgaagtcatgtaatcacatcttagcttttgagtccatctcaacttgtatttggaattgttgtttgcttaccaccttataggatggattggaaaatagaaatccatcattgaaggtgcaatttatgtccagccacaaaaggaggaccattgtacaattcaaaattcaatccaactactcagtatctaaaggggttgatgataagtcagcttcactttttctttatctttgcttgaaatggtttagtttggttcatttttttttctatacaattagttgagaccaaattcagaaaggagctaaagaaccgatccagtcaaaaaatcaacaaatcttaatttgattaaaggaaatgttgttactagagcatttttaaaccaaaccaccgatcgagctagccaatcttcttcatataattttaatggatttttgtacaagcactttcggggggcaagccacctatgcctcctggtatgctaatgtttaaaatatactaatatacacattgaataattttttagagcctccatctaatatcgaacttttatactgcaagtgtaagttgtaaatttgcaagaggtagtttgagtcaaagtcacctctaattccccttaggtttggttgattatggtatttttaccaatgttcattttgaaccacccatatttaacgatattacttcaagctgtgtatgtttgtcaattttatactatgatcatccttaatccatctctcttctctaactccaattatgcagcaccaccaccatcatttacatctcatcacctcccctaagatcaagtttaatctactcatcacctcccctaagatcaagttcaagatctacctataccatacttgtagctcgagcgtctctgccagtgccacccaaggcttgagctcaagcttctccatagaggaaagcaacgacggttctcgaattttgcagccgagagtctccacaaattatggtgttgccatgttgttcctatttaattcttagatccagctggttggagttcgaaaaaggttgctgccatcctactcgcctccacatgagacatcggcgctatccacccacccatatctgtttagttggagttagagatggttgcaccacattgctcatgcttcttcatgagcttgtcattgccatcttacatttctactcatctgtcctccaaatccgctccatgcactaagattaacgacatcgatacgaccctgagctcgatctctatttgcattgcctagagtgccatctcaagctcgagctccatttatcttcaccaatgctcttgtggctcatgagtttgacttacttcttttttgacgcattttattgctgagttgctagtaggcatgatggacaaacataattaggagagaccgccactttatccatcaagctttaagcggtggaagtgggaaaccgaagttgaagaaaa

SEQ ID NO: 10026 - DNA, 1814 bp, Oryza sativa
tattttgagcaacgtttgaccattcatcttattcaatttttttttgcaaatacaaaagtatttatgtcatgcttaaagaaaaatttatgataaatcaagtcacaataaaagaaatcataattacctaagtattttatataatacgattggtcaaacgttgataaaaagtaaacgacgacatacattaaaatttaatacagaggaagtatttttttttaaaaaaatggaggcaaaaaaagataaattaactgactgttaagtgttaatagtcaatgaagaaaagctaaagaagggtgaaaaatggagagagagagagaaagagggggaaaagacgaagacgacaactgtctcctaccacagcagtttctgtttcatcactccattgtccaagtctctcaaatcttcttctcccccgctctgaccctcccttctatcgttctcctccgtttcaccggagccagtgtggggtacattttataaagatactactcccttcatgtttcaatgtatgacgttgttgacttcttgaccaacttttgaccattcatcttattcaaaatttttgtgcaaatacaaaagtatttatgtcatgcttaaagaacatttgatgataaatgaagtcacaataaaataaatcataattacataaatattttaaataatacgaatggtcaaacgttgataaaaagtaaatgacgacatttattaaaatttaatacgaagggagtatttaaaaaaataaagaaaataagttaacccactattaagtgcgctaaagaaaagcttacgaagggtgaaaaatggagagggagaaagagggggaaaagacgaagatgacagctgtctcctaccactgcagtttccgtttcatcactctccagcgtcctcttctcccctgctccgaccctcccttctttcgttctcctccatgtcaccggagccagtgtggggtacattttataaagaaactacttctttaatgttttaatgtgtgacgttgttcacttctcaagcaacgtttgaccattcatcttattcaaaacttgtgtgcaaatataaaagtatttatgtcatgcttaaagaacaaattgacgataaatcaagtaacaataaaataaattataattacataaatattttaaataagacgaatggtcaaacgttgataaaaagtaaatgacgacatacattaaaatttaatatggtgggagtattttttaaaaaaatggagaaaaaaagataatacagagggagattgtaatgtcccgccttcccccaggccgggcccgcttacatctgatagctttcataggtcataagactgccctcacagaccaacacatgtcttttctgcacactttgtcctcactcgtgtacactcgggaagaatttcccagtcggtcacccatcccaaattgccgggcccgcttacatctgatagctttcataggtcataagactgccctcacagaccaacacatgtcttttctgcacactttgtcctcactcgtgtacactcgggaagaatttcccagtcggtcacccatcccaaattgccgggcccgcttacatctgatagctttcataggtcataagactgccctcacagaccaacacatgtcttttctgcacactttgtcctcactcgtgtacactcgggaagaatttcccggtcggtcacccatcccaaattgctccaggccaagcacgcttaaccctggagttctttggagattgacttccggaaaagaagttgcaacttgttgatatgagtattctattaatcctattaagccctaggccgggatgataca

SEQ ID NO: 10027 - DNA, 21896 bp, Oryza sativa
tctccaatagtagaaatcttcacccataaactatacaaaaccatgtaatttgggtccgataatagtatagatgtttgattttgctgacataatatcgtagtcagtaaagtaaacataaaaataatatgtgcgtcccacatgtaactgaagtgagaagaaaaaatattgggcccgcgtgtcagtcccatcacctttcttctcttttcttcctaagcctgggagatggggggcagccgataggacgggagggggggaggaggaggtcggtgagcctgggagggagggagagagaccaaatgcgccggcgggagagcggggagaggaggtcggcgagtctagaagggagagaagaggataggaggttggtgagccttggagggagagagggagagaggcggtcggccgcaccggcgggaaagtggggagagacggtcggcgagcctaggagggagggggaggcaccggtggaagagggaggggagaggtgaccggtgaggttgggagtcatgttcgctgccgctaccgcaatgacgacaaagacgatgacgcacacgcgccactgcgcgcgcccaccgttccaccaccagccccgtgcacgaaggcagcgccgctcagctccagcccgtgcgccatcattgccaaggagacgaaaaccacggagcgcagctcctttccgttaagccactgcatgacgcggtcggcctccatgcccacgctaacattgccacctccccctcccccaggctcgccagctgcctctccccccctctcccactcgctgcatccccctctatcctaggcttgggaagaaaagaggaaagatgatgcggttgatacgcgtgccccacatattttcttctcatttcactaacatgtggacctcacatattatttttattttgctgactaggatgccatgttagcgaaacctagcaaggctagcatccatactactataggaatgagatctaaattgcacggttttatatagtttaaggttgaagatttttggtataggagataagagatgtcaaataaactaaacgtaaagttgagggacggcaaatggacttttttccattttaagcagcggcggtagggttggtaggtaggaagatccggcgccatgtacaaacgtcgccgtcggtcggtatcgttttccatcttcgacgtacacgttgatgttactaatacgtagtactggtaccacatggcagttagacacttaaacttggcgcctggatctggacatgccgacgtagatcggtcatcacacgttcaaaccccaccctgagttttttaaaatgaaaggtagtccctcggtttcacaatgtgactttctagcattgcccatatacatataatgaatctaaacatatatatatatatatatatatatatatatatatatatatatatatatatatatatatatatatatatatgtctagatttattaacatctaaataaatataagcaatactagaaagttttacattgtgaaatagagaaagtaacagacagtgcctacttacttcctccatcatagaaaaaaataatttctgcatatgtttagatacatatatagtcagaagatgattttcttttcttacgaagggtgcatctcacagtgcaacctgtttttatatatatttgttgattggtgagagacaatttcaactccgtacttggtaccttaataggtgtagcggcctattgaaattaagtacacgtatggttttctttatttatgattgttagttggtgtgcaacgtcactatatctgtatcttaagtttgtatgcgcatgatatatatgttcatctaatgaccatcccttttatcaatatccatcgtttatcacgctatatttcatgtctagctttaaaaatgatcttattttcatgggctggcaagtttcaaatttgatccaaaatattctttgatttgctaaccatttttttcaaaaaaaaaatcaaatttctgaactttcaatccatacgtaggtttgtggtttggctttttttttttgattcaaggttccataaccattgccaagagtgccacattatattttgatcttttggccggggtcggaagaggggctttaggtgtgggatatatagaatagatctccatgttcggagggaggtggctaaccaatagcacatgagcatgcttggaagcaagcggtgcagggggatgaggtcggtaacacgtacaacaagaactcaagtggctgggaggtgttggcgtcttggcgagatgtggtgctaagtgttaacaatagtggaggcttagtggatgggaatatcttagctaaagctgcacaaaacatctggtttgaagtggggggataattagtagggaagagggaattgagtgagtgagagagagagagaggaggtggctagtgaagcatgtggatgttatcaaggcaggggttgtgtctagaggaggaagggtgacgtcatcgtgttgcaactttggataaacggaggaaagccattgacagagacagctcccaggcaggtcggacaacctcccaagctccaccgctgccatcttctttgcggattgtctttcgacattaaaaaatcacagagaaacattgttagccgtttggatttaacaacggtattggttccgcccctaaagaggacgagtacggtgagggatttttttttccttaaaaaatgaagtacaggtagacactctcatttatttttcttgaccgaaaagtttctccaatatgaatttggatttccctccgacagtagcttctagatcctaacctcgtttggatgggccaaaatcctgacgaggccacgtctatcagtgatgatttccatcggtttttctgaaatgtacagctgcaccgaaatctcggccaaacggaaaacgggagttttcaactttgtgctgaattttgtcaattgcattgtcggttatcgaattgaaactactccgaataaattctgacaattggttagaatggtttgtcaattgcgtttgttcaatatctgcgctaatcgccaaatctcccccaaaatcttacaaagcaggggtcgacgaggcggaaacgagaacgacccggacactcacaacgggcaggagtgggtctcataataagttcatatttcatgtatccgtttaacctaaaaataagttaatttttaacaattattgtattattccatgcttccaaacgtataagacttattccattcttttgtttttttaaaaaatctaagtccaatttatagttactatgtgttaaattaagttgttgattagaacccaaaagccattgagggcggctagggaatgtatcccgtctgaacgggatacttgagattgacatcaatgctgacgtcattatacgtacgcggtaccacgtatgatacctacactactacgaaaacgatttttccgtgtggtccaaaagggttttcgcgtgcggatctcccgcccatctgcattgaagtgtcagcaaaaatccgattttttcgtgcgcacgcgaaaatctaattttcacgtgcgggtggcttatgtcgcaaaaaaaaaaaaaccaaaccctaacccaagccgccgccctcctcgtggtcgccgtcgtcggcggtggcgttgccgccttctgccgctaccggccgccgcggccggctcccagcagcgtcgctgccgcccaccgccgaatctgggcgggagaggggcgccgccgcccactgctggtcccggccacagccagggttttaaatttcaaaatacgattttatgccagtggggggcgaaattaccgaaatttcggaaatttctagccgaaattatttgaaaatttgactgaatttgaataaaatttgaccaaattcacaaaaacttgcaaaaaaccaaaaatttcgggcgagatttgagtatgccggtgggggtgaaaattaccaaaatttttgaaatttctaaccgaaatttcaaaccctggccgcagcccacaagcgaggccgtgctaccgtcgcccgtgagagacgagagagagatagaagaaatgaggataacgatgagtaggtggagaggataagatagaaatttttgaagtggttgagaggggaaaaatacctgaggagggtatttcgcgtgcggtgctcttaagatgcccgcatgcgaaaatttattttcgtgtggtccgcttgcaaaaataggtttattttttgcgtgtggactcttaaaaggcccgcatgtgaaaaccgatttttgtgtgtggtcctcttaagggtccgcacgcaaaaatgggaggacaatttttctagatgcggtcagttatggaccatatggaatctaacgaggggctcgtacaggaaaatcgttttttagcagtgcaattagttccaagacatgatatttgtgtaacaggtcagataccctataggtatcatgtcaaggtacaaaaacatgatacttaagtaacaggttagataccctataggtattacgtcaatgctgatgtcactgtatacgtatacggtaccatatatgatacctattggtatcgaacatgatacatgagtatcaagtatgatactttatgagtaccaagtatgatacctgcatgtaccagccatggtacctgggtaccaagttggtacctgtaggtaccaagtccgatacttatatataccagacttggtacctgggtaccaggtccaatacatataggtaccaaagtattatgatactactaaagtatcatagcacactaagaaccaaaaatcatatcttaccaagacagagctcaattaaaccaacaaagaaaattgattccgggaaaaaaagtcatcatagtggtagaaacacccatagaacatgtagaacaccccaagatcaaacctcaaacccaagccaacgcaaaagctcgggggtcacgagccaagatctaaatatatggatccgcaccacaagaggccttgtcctcgatgatggtgacctcatcgacgatggccacctcctgaaacgtggtgagtagctctgtcttcgtcttgtgcttgggtacctaccccacgataagcttcacgatctcctcctctacttcgcccacacctccagcgacagcagcggcgacaatggtggcggcagcttcctccactcccgacgtgccatcctgaacggccagccgtcatcgtcgcctctttgctggtggtagtcagagagagggagagagagagagagtgaaggggaagagataaaggagaggataagactgaatatgtggttggcgagcgagaggatatttacagtagtagttatcccgtacactgtcccatagtttttctgaaaggcatttgattacttattggttgcatgttcattagtttttctttaggaaactacggcgggtttgaacaccagcctgaactttattcatatggtaaataaactttacaaaggggggaggtacagagggacggggagaagaaactatcattagttttatcacattgtgaatgaattaattacttattagtcttggtgccaaaagaaataggtcttagatgctgacggagcgtggggctcctcaccgggagaccgcgcaggcccctctttgccggttcggccgggggcgctaagtgaggttcttcgccctcgatcgatctggagaatgttcgcgagagagcaagtgcacgagacacgggcgatgtagacaggttcgggccgctgagaagcgtaataccctactcctgtgttctggtggatctgtgtgtgaaggatttacagagagccggagagccagagagttcaggctccagaacccctctcgcctccttttttttctttttttttttctttctctttggtgggcaaggtcctccttttatatctcaaggggatactacatgcaccacttctacctacttttcttctgggtggggacctaccctctcttgaccaaaacttggcttacaccttcgcctggaagctaaatcacaacttgtccttgagtgaggctcagcgccgtctctcgcctgacaccggggatctccctgttaccccctcattaatgggcggagatttgccatggctgctttccaaatgaccatccgacgagatgggtcatacctacctccactccaccggaggcagatgcatcgtgggagcacggttatctgccgatgacgcgaccggcgtcagaccagtcacagatcggtcattcttgtccaccacgtgtcagtttagcatgctacacgtctgcccttcttcatacaatgacttccttgcaatggttgcgatgaagcctggaatgtatctggccggggctgacgtgccaactccaggagttcccacgccggctccggctagggacgagtgcctggaggctctcatcattccgacgggacggggcgaggcgtgtgtcaggccgcctgttgccacctaacccgcgatctgaccggtctgtgaccggtcacacactgtgacctgtcacggaccgaacgagtgtgctacgctgcattaaatgcggcgtggggcgctcgtccaacccgcaataaacgcggttaggtgagcgccgctgtgctcacctaacccacacacgtggcgccaaacccatagggggtcggggcgccccagctctcggggccgaaacgggagcggcccgacccctcggggagacagagggaggggcggccacatcaccctcgggcccgaccccccccccgagggggtcaggccacgtgggtgactgcagctgccccaaacctctagtcaagatacccccggtcccatgtcaccgacagtagcccccggcgttacgccagggcgatcgcccccctcgagggaagcgctcgggcgtgacgccactccttagacctggtgacagatggggccggtctctacaggcagcagaaacccagcggtcgcaaatcgcgcacatcggcaaggaaaaaccgaccgacaataatgagcggctttctttaagaccgctacattacttaagtagcgcgcgaaccgggacgagccagttcgtttcgcctggagatgtgatgacggtgcatcggtcggcgagcgtagttaacgcgcgcacgatatgtcccatctcgactgccacggccgcacatccgcctcgtgcgccgcaaacgggcgagcgggattagtggaggcgtgggcgcgaaagacgagggggcgaggtagtgggcgcggggatcgaggagccgggcatagcgttggcaagggtactaagacatcaaggaagggatttgtttccttcctctcgtcactcttccctttgcctttgccacttgtgctctgactctccatttccggcgccctacccttgccatactcgctcgctctcaagctcctcctccgccggcgtcatggcacggggctccgcaccgctcgagggtagcgtgctgccgccttcccgcatcgtgagcgagaggcaggccgggctgccgcgccgattcatgccggaatctgccaccggccgggaggtggtcgcgctgggcgagggacgcccggcgccgcattacctggggcggtccgtcttcttcctctctttcgcaatggcagggctggtcccgccattctcttctttcttcatggatgttctggagctttatgatctccagatggcgcacctcacccccaacgcggtaatgacgttggccatcttcgcgcacctatgcgagatgttcatcggggtgcgcccatctctccggctgttccggtggttcttcaccgtacagccggtgtcgccaccgtcggtagtcggtggctgctacttccagccgcgggggccggtgctgaaccgctacattccctgcgtccttcgcaagaagtaggacgactggaagagcgactggttctacacccctctcgccgacgaagcgcgcctccgacttccgagccagcccccggcgcaggcctccagctggcgggcgccggtagatctgggagatggctacgacgccgttcttgaccgcctggcgggtctgcgatcccaggggctcacgggggccatggtgttcggcgactaccttcgtcgccggatcgcgccactccagcggcgcgcccggggcgcctgggagtacaccgggtccgaggactacatgaggacccaccaggggggcagatgggactgggcccctgaggatttcaagatggtggtccaacgggtgctgaatctcagctccgtggaggcatccctcatcccccaaggtgtcctctccctctgcagcgatccagagcgcgccaacatcctgaccatcatgcaagcggtcggggcgtcaggggagcgggctcctcgaggccacgatggcgcgggcgggagccgcaggggggaacaatctaccccgggagggggtcgtgcttctgggccccgtgatgggggcccggggggcagccgccctgccgacgcccgggggaagaggaaacaggaggataccccctccccatctcctccccgagggggcggggcggtgcgtgccagcagcaggcgcccggagggtgctgtgccgacgtcgcagcccgagggggagcgaaaaaagaagcggctccgcaagatggggggggaccgaaccatgccggggaaacctcatctcccccccaaggtggtcgtttagccgacctcctcgcaggttcgtccccgcgcccactgcggccgtattcattctcccaaggtgagttttcacttacccgttttctttttgtcttctggtttttcttccgctttcagcgagattccgtcgcgcccccctcgccattccaagtccggccagtctgaggccgaggagacagcgaccgcggaggcccggaggcgggaagctgtccggcgagaagccgcggaccgcctccgggaagctgaggaggctgcccaggaagccgtccgggttcgccaggctgaggaggccgctcaggaggaggccagactccgccgggccgggaagtcagcccgggaggcagaggcgacacgcgcacgccaggcggcctgccaagcccccgacccgactccgcccgaggcaacgacgacttccgaggccacccacgacgaggccgcgggcgcgccgctcggacccgacccttcgggcgacgttcgggacgagccagcctcgggggacgcccctgagtccggcacgtcgattggcgggccgagccgcacagcgcccacaccaaggcagctctcccctctgccttccaccgctccactgaacacagagcccctcctgcaggccctggctgccgcgaacacgacggtgctggacgggttaggtgcctagatggaggtcctgcaagcagagcgggcggagctcgacgcggcgtgggcgcgcgtcgaagaggggcagcgctcggtggaggccatggtggaggcgggccgcaaggcataccgccggcacgcctcagagctcgaggcccgtcggagggagctggcggagatcgccagggaggtggaggaggagcgggagactgccctcatcgccaccgccgtgctcaacgaggcgcgggacgatctccgccttcaacacgggagccgggtggcggagctagagaagaaactcgacgccgcccggggagtccttgacgccgccactgcacgggaacggcgggcgacggagaacgaggcggcgtcccggcggcgcgaagtggcccttgaggctcgcgccacggcgctggaagagcgcgcccgcgcgagggagagggacctggcggaccgcgagaccgccatcgctatccgggaggcaacgctggcggcgcacgaggccgcctgcgccgaagaggagtccgcactccgcctccgcgaggatgcgctcaccgagcgggagcgatctctcgaggaggcagaggccgcggcgcagcggctggcggacagcctgtccctccgcgaggcagcgcgggaggagcaggcgcgccgtaatctggaaggcgcccgcgccgagagggccgcactggatcagcgggccgctgagctcgaggcgcgggcgaaggagctggacgcgagggcgcgcagcggcggggcggccgcgggcgacggcgatctagccgcccgcctcacagctgccgaacacaccatcgccgatctgcagggcgcgctggactcgtccgccggggaggtcgaggccctccgcttggcgggcgaggtagggcccggcatgcttcgggacgccgtctcccgtctagaccgcgccgggcggcaagcgggcctctggggcgagcggaccgcgaagtacgccgccaaccagggggggcctcgcccagcgcctctcagagatggccgggactctccagcggctccccgaggagctcgaggagacgatcaagtcatcctcgagagacctcgcccggggggtagtggagtttgtactggcaagctaccaggccagggacccggacttctccccgtgggcagcactggacgagttccctcccggaaccgaggacgacgcgcgcgcgcaggtccgggacgccgccgaccacatcgtccacagcttcgagggtacggcccctcggctcgcgttcgccctcgactccgacgaggagggcggcgacggtggtgtggacgacagcgaccacgaggccggcgacccgggagcctcgaagtgagcccccaggcccccgccaatcttaaaagtttttcctttcttcttccgaggccttcgggcccccttcttgtataaactaatttaatctgcaatcaaataaagaagaaatttctgtgtcaattttatttgttgtgtgtatgagacgaggatggtctgtgccgcggtccttctgtgtcttggcttgaacaagggctcgtgcccaggtcccagcttcaaacggcgggggtcggggctagtgcctggggagatccacgtgtcgagactagccaggccgggagcgtggtgaccgagggttatggggacccgattgtgggcctttgccgattcccccccggagttcaccactccccggggcacggctcggttctgggccccgtttggcgatttccgccggcccgggccaccgagggcagggtcgagcacgagcgtgctaattcaagccaaaactcttcaaaaggaaacaatggcacagacacagtccttaggaaatcgaaaaagcttttattgaaatacggaagagaaaaaagataagtatatgcatatgtggtagcccccggccaaccctgcacgcccgaggggggtgcggggttggcccgagcccgagacctgacacccgacccccactaggggtagaagcgacgaaggtgttcgatgttccacgggttaggcagctctgtgccgtcgcccgtggccagccgaacggagcccggccgggggacgccgatcactcgatacggaccctcccacattggtgagagcttactcagtccagcacgcgtttggacgcggcgtaggacgaggtcgtctacgcagagtgatcgggcccggacgtgacgctgatggtagcgccgcaggctctgctggtagcgcgcggctcgaagggccgcgcgccgccttcgttcttccaagtagtcgaggtcatctctgcaaagctgatcttgatcagcctcgcagtacatggtggcccgaggggacctcagggtgagctcggatgggagaaccgcctccgcgccgtagacgaggaagaaaggcgtttccccggttgctcggcttggcgtggttcggtttgcccagagcaccgctagcagctcctcgatccacgagtcgccgtgcttcttgaggaatttgaaggtcttggttttgaggcccttgaggatttctgcgttggcgcgctccacttggccattgcttctggggtgggtgggagaggcgaagcagagcttaatgcccatgtcttcgcagtagccaccgaagagctcactagtgaactgggtgccgttatccgtaatgatacggttaggcaccccaaaccgagcagtgatacccctgatgaatttaagtgcggagtgcttatcgatcttgatgaccggataagcctcgggccacttagtgaacttgtcgatagcgacatacagatactcgaacccgcccggggcccgtctaaacggacccaggatatcgagcccccagacagcaaacggccatgaaagaggtatggtctgcagggcctgggccggctgatgggtttgcttggcgtggaactggcacgccctgcaccgccggaccaggtcgaccgcatcgttgcgagccgtcggccaatagaaaccctgacgaaaggccttgccaaccaaggtgcgtgaggcagagtgggctccgcactcgccttcatggatatcggcaagaagctcgatgccttgttcccgaggaatgcacttcaggatgactccgttagccgcgtgccgatagagggtcccttccaccagcacgtagtgcttggagatgcgctggacgcgttcactcccttcgcggtcctcgggtagagtcttatctgcgaggtacgcctggatctcagcgatccaagcaatcaatctaagggagctgggagcgctcccctcgggtcccgaggcctggactccgacgggcctcgggggccgttcaggcgcgtccgtctcccctagggggtcgggtcgcgccgacggctgggcaagcctttcttcaaaggcgcctggtggggtctgggctcgcgaggaagcgagccttgagagttcgtcggcgaccgcgttatcccgtctgggcacgtgccgaagctctatcccgttaaaatggcgctccatacgccgcacctggcgcacgtaagcatccatctgcgggtcagagcactggtactccttggagacctggttaacgaccaactgagagtcgcctaacaccaggaggcggcggatccccagtccaaccgccactctgagtcccgcaaggagtccctcgtactctgccatattgttggttgcccgaaagtcgaggtggaccaggtatttaaggacatctccgctcggcgaggtcaacgtaacccccgcaccggcgccctgaagagatagggagccgtcgaattgcatcacccaataggcggtgtgaggcagctgcgaagggcccgagctgacctcggggatggagacgggctcgggagccggtgtccactctgccacaaagtcggcgagggcctggctcttgatcgcgtggcgtggttcaaagtgcaaatcgaactcagagagttcgattgcccatttcaccacccgtccagtaccctctcggttatgcaagatttggccgagggggtaggacgtaaccaccgtgacccgatgcgcctggaaataatggcgcatcgaagccatcagaatagcgtaaagcatcttctgggcctgagggtattgggtcttggcgtcccggagggcctcactaacaaagtagacgggccgctgcaccttttgtcggggccgatcctcttcgccaggggccgcatctccagggcgcttttcgtccgagaggccgcgcggggcgcactcggcttctgtgtcgacgacctcggggtcggaaggcgacaggcgcggccttcccgcagtggccccggggccatcctgggggtcgggggctcctggcaccgtcggacaagcgggcagagggccagctccggtcgtcgggggcctcgggccgccgttcggctcgggggcctctcctccctgctctctcccgggtcgagtcgatacagggtgctctttgtccgagaggccgcgcggggcgcactcggcttctgtgccgacgacctcggggtcagagggcgacaggcgcggccttcccgcagtggccttggggccatcctggggtcgggggcgcctggcaccgtcggacaagcgggcagagggccagttccggtcgttgggggcctcgggccaccgttcggctcgggggcctctcctccctgctctctcccgggtcgagtcgacacagggtggggatgcgcggagcgagggtcgtcctcgtcgcgctccacgaccaacgctgcgctgaccacctgcggagttgccgccaggtagagtagcaacggctcatctggctccgggacgaccaggactgggggagaactgaggtacgccttcaactgagtgagggcccattcagcctcctccgtccagataaacggcccagagcgtttgaggagcttaaataggggtagcgccttctctcccagcctcgatatgaaccgacttagggcggccatacagccagtgacgcattgcacatccctaagcttgctgggggggcgcatccgctctatagctcgtatcttctcggggttggcctcaatgcctcgggcagagatcaagaacccgagaagcttgcccgcaggcacgccgaacacgcacttgtcggggttcagctttatgcgggcggtgcggagactttcgaaagtttccgctagatccgagagtaaggtctcctggttgtgtgttttcacaaccaagtcatcaacataggcctcaacattacgtcctatttggctacccaaagaaattcgagtagtacgttgaaaagtaggacctgcattctttaacccgacaggcattgtcgtataacaataagttcctatgggggtaatgaatgcagttttttcctcatcctccctagccatgcgaatctgatgataaccagagtatgcatctagaaaacacaaaaggtcgcaccccgcggtggagtcgacaatctgatctatgcgtggcagggggtaagggtccttaggacatgccttgttaaggtcggtgtagtcgatgcacatccgaagcttgccgttcgccttgggaacgacgaccgggttcgccagccactccggatggatgacctctcggatgaatccggcctccagaagtcgcgccacctcctcgcggatgaaggcttgacgttccggggcctgccgccgcactttctgccggaccggccttgcgcccggccgtacggcgagacggtgctcaatcacctccctggggaccccgggcatgtccgccggtctccaggcgaagacgtcggcgtttgcccgcaggaaggagacgagcgcgtcttcctatttgtcgtccagaagaccaccgattcgtgtggtcttggacgggccgtcgcccagggcaacctgcttgatcgggacctcgtcgcacgtgatcatccgctgcctcggggcggctgggacggaggtgctgagcctctcgtcgccacccgcgggcttggatgccgcggcgaggtggtccgcgcgctgctccatgcaagcaagcgcgactttgaggtcgccatggacggtgatggggccaccggggcccggcatcttcatctggagataggcgtagtggaccgccaccatgaacttcaccaacgcgggcctccccaggaccgcgttgtagggcagactgaggtccgccacatcgaagttcacccgctccgtgcggaagttggcggaaccaccgaaggtgaccgggaggtcgatatggcctagcggccaagtgtgccccggcgtcacaccgatgatcggctgggacggccggagcaccatccccggggccttgatggcgtcaaaggcagcgggggaaaggatgttgagggctgcacccccgtcaatgaggacacgccccaacttcacattgcaaacggtgggagaaaccaccatcgcgatctgtcctccccgggcaacgcacggtgggtggtcggtctggtcgaaggtgagggcaacctccgaccaccgtgcccgccgcgtcgcctcatgggtaggggccacggccagaagctctcgcttcatggccttgaggctccggtgagaagcgtgagcacacgctcccccatcaacggtggcgacggtggcctcaggctcctggaaccctaggtcatcgtcggcatcgttgatgtcctcggcgggggccttctgcttggcctcaccacgccggttgccggcgggagccgccggggtattgccctcacggcgctcctgcctcctctcctcctcccacttcctcgtccgctcagccaaacttttgaccgcgcggcagtccacgaggtcgtggagggaggtattgtgcacggtgcaccacctgccggtcgggcgctccctactgggagcgccggcctccttctttttgtcgctcgcaggcctcccctttcgggtggcccacaaagcgccctcgacggcgaggacgtgaccctcgtcgtcggaatgggccgacctcttcttcctcctcctgtcccgccaccctgaccgagcagcggatccgggggcggccgaagctgccacaccggaaccggaggagttccaggtccaggcctcctccttgcgagccacacggtccgcgagctgaaaaagctccgcggtggtctggggctccttggaggcgatcttctcgagcatgcggttgtgccgcacaccccccctgaacgcgtagatcaccgcgtgtgcagggatgcacggtatggtgttgcggacttgacaaaaccgctgaatgtacgagcgaagagactcatcgtcccctcgctgtaccgcgtgcaagtccgcttcttcacttgggcgcggatatgtgccttggaagttcatggtgaactgctggcacaaatcctcccaagagtggaccgacgcgggtggcaagttcattagccaaccccgcgcctgtcctttcagggccatggggaagaaattcgccatgaccctgtcgtcacccccggcggcctcgatcccaatcgtgtagatctggagaaactcggcggggttgacgcttccgtcgtatttttcggtgatggtgggccggaaccttgggggccaacggacgttccgaaggctcgccacaaaggctcgacagccggcaccgccaaccggggacatggggggctggcccccgtgcccggaccgaagtggcgctccggacgaggaagcgccctccgatgcgtgggcagcacggcgatcattgcgccggcgcttgatattgaagcgggcatctggccccctacgcacatcttcttgggttggaggcgttgacgagggaatggcggacgaacggcgggtagcggccgccgctcgccgcgccctccgcctcgacgacacggagccagcagtagcaacgccagtggccttggtggcggaggaccgccagccggcgcctaggcgctgctgcgccgtcatgaccaaattggccacgtcatctagccaacgtcgggttggagtctctggatcagggatgacgggtgggtgacgcaggagtgcgcccgcagcctggagcgcgccctggggcgtgctgccatctccgtagacgaggagacgacgctccccgtctcgccgtccttctccatcgcccgcgtgcggcgaagtcgcggatctttcgacctcctcgagcgcctcctcccgcccaagacttcggcgagagagggacagtggagtacgagctcgacggcgcgggttctgctccccgtcttcaccgctagcgctcggagagagattgtgcgccactgcccgttcggccattgggctgagcgggagaagcttggcgcacacgaaagaggacgagggcttagaaaaacacacgcaccccctacctggcgcgccagatgacggagcgtggggctcctcactgggagaccgcgcaggcccccctttgccggttcggccgggggcgctaagtgaggttcttcgccctcgatcgatctggagaatgttcgcgagagagcaagtgcacgagacacgggcgatgtagacaggttcgggccgctgagaagcgtaataccctactcctgtgttctggtggatctgtgtgtgaaggatttacagagagccggagagccagagagttcaggctccagaacccctctcgcctccttttttttctttttttccctttctttggtgggcaaggtcctccttttatatctcaagggatactacatgcaccacttctacctacctttcttctgggtggggacctaccctctcttgaccaaaacttggcttgcaccttcgcctggaagctaaatcacaacttgtccttgagtgaggctcagcgccgtctctcgcctgacaccggggatctccctgttactccctcattaatgggcggagatttgccatggctgctttccaaatgaccatccgacgagatgggtcatacctacctccactccaccggaggcagatgcatcgtgggagcacggttgtctgccgatgacgcgaccggcgtcagaccagtcacagaccggtcattcttgtccaccacgtgtcagttcggcatgctacacgtctgcccttcttcatacaatgacttccttgcaatggttgcgatgaagcctggaatgtatctggccggggctgacatgccaactccaggagttcccacgccggctccggctagggacgagtgcctggaggctctcatcattccgacgggacggggcgaggcgtgtgtcaggccgcctgttgccacctaacccgcgatctgaccggtctgtgaccggtcacacactgtgacctgtcacggaccgaacgagtgtgctgcgctgcattaaatgtggcgtggggcgctcgtccaacccgcaataaacgcggttaggtgagcgccgctgtgctcacctaacccacacatgtggcgccaaacccacagggggtcggggccccccagccctcggggccgaaacgggagcggcccgacccctcggggagacagagggagggacggccacatcaccctcgggcccgaccccccccccccccccgagggggtctggccacgtgggtgactgcagctgccccaaacctctagtcaagatacccccggtcccatgtcaccgacaatccccatgtttctaattatatagttttaaaagtcacaccagttgctaccacttatgtcatctcctcctttacttgcttgctcgatctaccactatttctattcattctctttggaatttttaaaaattggatcttatagttttaaaagtttattgtcacgttgggtttcgtttttttaatttctatatgtcccgtcaaacgttgccattatactcctctatggcctgtccactatctcttctctttattatcattgagattttaaaaatcgaatataattatcgtttgggttcatttttacttctagaagtcctgccaaaccgttagcggctttgccattgtacttctctacagctcgctcgctgcctcacttttttattgtcattgagattttaaaatcgaacatgattatcattgttttttttttactttttagaagttccgaacctttaaaaattagggtttcattttttataatttttagaagtcccgtaaaatgatgccactatgcttctctatggcccgtccgccacctactctttattgtcattgtgattctagaaatcaaacataactatcgttggaatttatttttattttctagaagtcctgtcaaccgttggctgctctgcaactatactcctataaaccccgctcgttgcttctcctttttatagtcattgagattttaaaaatcgaatatgataatcaaatggggtttatttttttttactatctagaagtcctggcaaccgccttgctcgttttcttcatggcctgctggtcgtccctccttttaatcgtcattaggatctatttggtgttttatcaacagtttttatatgttgtatcaaccgtcaccactctactcttttataggtatgttacttaatttatctcgtcatgtgttttagatggtcttttctttcaatagtctttatttttatcacaaattttagttatttataaattttattcctaattgaaatcttatttttatttttccaattttagaatttatttttttttcaaattttaattaatatcatattgtgttcttttaatttttttatttttttattttcaatttcagttgtttcaaaattgtattcctagttgaactctcttttaatttttctaatttcagatattattttattttttattctgaattttcattaatcttgtattaggttcttatatggattcttctttcaatattgcttatttttaattctgaattccagctaattttaaattgtattcctacttgaaactcttcttttatttttttgctaatttcgaatttttattttatttttattcccaattttaattaatctcgtattgggttcttatatggactcttctttttaatattccttatttttaattccgaatttcaacttttttaaaattgtattcctacatgaactatcctttcttttctaattttggattttattttatttttttcaaattttgattaatctcgtattgggttcttacatggaaacttctttaaatattgcttatttttaattccgaatttcagctatttttaaattgtattttttacttagactctccttttttttctaattttggattttattttatttttatttcgaattttgattaatctcgtattgggttcttatatgaaaacttctttcaatattgcttattttaattcctaattttagctatttttaaattgtatttctacttgaactctccttttctttctttttcttttttccgattaatgtgagaatttctagctcccagagtgaacgcagtggctacttttaaagctgttttaataatataatagatagatagattcggcatattttaataaaaaacaagatactaaacatgacatgtgaataacaggaggatgatcaagtgatagtactaaacacaaacatgctaataacaagaataatatcatctagtaacatgttaacactaaagtgaatagagtgatatgcggagaacgctccggattcaaaggcgatggtgttggtgttgtcgctaccgttgccattggcgtctcctccattccattgctagtcgacgtagaggaagaccgttgctgttggcgtcttctcctccattgctgctcgacgtagaggaagaagaacctggcgtagaggaagcagtgtagagagcttattgtctatcggttccgctttctcataaaaacagaaaagacaagaaaacgagcggctggctcgccagccccgttgctccgctccgctaactcggcccggttggctcgactcggcgcacgagcgcgcggtggcagttcgaccaccatcttaaccgctcgacatgtgctctcatttagcaacttacttctcattggttccaaggtgggattaatcttttaacattaattgtgtgcctttgaaattagtatgattaaatcggggctagcccatttaattctaacaataaatatgcagattacaaaatacagaaaaataaaaaacgaatgtttgaatataatgtgtaaaagagtaggaattagaaaaaataagtgcttaaatatactgtatagaaagaaaagtaggaatttgtcgacgggctatacccgcagacgggatttgtagagtatgggaatcgttggaacctgcagacgtgagatcagatcgagcagacaaggaaaaagatttatactgatttggaccctcaaggatagtaataaccctaatctagattatatggatttatggatggaatatcaccaagattacaatgaggaatttcacgactagactaatccgccgactagaaactgtcgaggacggcccgaggagatctactcggcgaatacggctatgacttcctctggattgcttctcaatgtagctttggctatggcttgtaattcgatgcccttccctgaatacgggggtcttgtatatatatagtgtagatcatatttttccctgaataggatttgtcggtgatatgggtccaggggtatcagggccatagagaggaggctgcccccgggaggctgcccccggtagccacatggccctccccctgaggggggtcgggcccgaggcagggtggcgaccgccccctccatgccttggggtcgggttacctcgacacccttcgcacggtgccgcgtgtgctacgataggtgggcgccccca

SEQ ID NO: 10028 - DNA, 25327 bp, Oryza sativa
atcaattgttctttaagcatgacataaatacttttgtatttgcacaaaaaaattgaataagatgaatggtcaaacgttgctcaagaagtcagcaacgtcatgcattaaaacattaagggagcagtttctttataaaatgtaccctacactggctccgatgaaacggaggagaaagatagaagggagggtcggagcaggggagaagaggacgctggagagtaggccgctggagagcgatgaaacggaaactgcagtggtaggagacacctgccgtcttcgtcttttccccctctttctccctctctattttcactcttcgtaagcttttttcagcgcacttaacagtcggttaacttattttttttgtccaatttttttgttaaaaatactccctctttattatctttttttctccatttttttaaaatactccctccgtattaaattttaatgtatgtcgttgtttactttttatcaacgttagaccattcgtataatttaaaatatttatgtaattatgatttattttattgtgacttgatttatcatcaaatattgtttaagcatcacataaatatttttgtatttgcacaaaaattttgaataagatgaatggttaaacgtaggtcaaaatatcaacaatgtcatacattaaagaaggagtagtttctttataaaatgtacccaacgctggctccggtgaaacgggggagaacgacagaagcgaggatcggagaaggggagaagaagatttgagagacttggacactggagtgatgaaacagaaactgcagtggtaggagataattgtcgtcttcatcttttccccctctttctctctctccattttcacccttttttagcttttcttcactgactgttaacattagtaatatgcacgtgctaaacgctatgttgcaactcctatttatctttaataattttaaaatttttcgtggtagcaaaaaaatattattatatgaactgtgcatttgagctttaatttaatttatctcatacatcaaatatttcacatatagtataataatatgatatactaattcatgcaaatatataatacatataatccgagggcttcacgcgcttccctgtcatagcgatttgtgtccatacgtacctaatgtaataatatgattgaaaatctccatttagtcagcaataatgctcgggagtaaaattatttacacgatatgaaccatgtcagttatgttccaaaaacaccgtaatctactataaaatccataccatgcagtaaagtactattattatttttattagatacaaaatacattcgataaaaaattgtagagcagcaagcaatagaaaacgtgatccttagcacgccaacgagggatgtaactctacgtcatatcgtagttctatttggctattctttcattgcttactaaacattaaacattatccatgcccatttggagatcaacaagcaacatatattcttacatagtactaaataattgtatttgcacagtcaatcatgccatgtaaaagccaacaagatggtaaaatcacccaaatccacatcacatacttcataggatcaaacatatatcgcatacaactcttttaatgatgtttatatagtctggtagtgcagccggaaaagtttactttgcatatgaaatttatgtcaccaagtaataaataggcatgtattcaaacaacgttgtattaaaatacaagtgtgtttgaggatacaataatacacatctccatcattgtacatggtataaaataaatataaaaaaacctcaaagttgaaagagcacgtagaaaatggacacaaaaatcactctgatcatccaatgctaccggcaatacaaaattttgtgtaaaatttgtcatttaaattatcctaatcattactctgacaaaacaaagatgttatgtctaatctatatcttgaatcagtataactccagagttcctatttcgcgcagatatttaactatttgtcacttttagatgtggcaaataactatttgccactggactcacatgtcatagacacatgtagacccacacgtcattgagataggggtgacaaatagttaaatgccaaatctaaaaatggcaaatagttaaatccctaccacaccttacgctaggcgagcttgggaatcagattccattgctcccgctgttttccccaccgcatcgccacctccccattttcttcgctgcattgcctcctccaacgccacgcaacccgctcctctttccagctcctcccagcctcgcttgtacagccccctacaacagtccagcttgaggtcagacgccactcctccgcccttgttcgctgctcctctccccatccttctcctctccgtaacacgccggtgagcaccccatacctgccatccgcaaagccagctgtcgctcctatgcaactgaggcactaacacaagctcgaggtcctctttctcctcctaagctgctagcgcaggagcaccaaatagctgcctcgtataactcagaatcttcatatataattgagaaattattttgggcaagacaagaatatggtaggcacaactacgcaaaacaagcattaattagaaggcactacacaatgtactttaaatttcttactgaaaaatattgtcataaatatgctagaagctcatttaaaatttccctgcaatgaccatagaatgcatgtccaagttgcatatctagctacatcaattgaatcagacatcaattagtgtgatcatacaccagtcgctattctgtccttgcgttagatccttgcatcacgatccttgacttcgtgttatatcagaagtagagcaatcaaagcaagccgattgagacatgcaaaacataatattgatatttgtcatacagaaaattgcatgcctatacttttatcctggcattctgcaatgacaaaaaatacaatgggcaaccaatcaaactttggaaccacccatcactgcatagaaatatattgtgcatttggactccctatcaaactttttcttagttcagagaacagaatgataatacgcatgctacaatctaattcaagtgcccgaaaaaaaatctcagcaaatttggtagcaaaattcagtaaatcgataatggtcacctaattatgtttgtgcttgaactgtccaagtggaaataaaacagggaaattaactcactcatttgtcaaaatgctcaactgaaaacgataaacttgaattgccagctatatcgaaaagccaaaaacagattattcatgttagctcagcaaccaaacctatgagatacgagatttcaaacattactactaatatttaccacattagctagaaaggcgataatccatcatatttggattgattatgggaatattgaacatctgaataaaaaatgcaggattatgcgatatttggcttttgtccagacctagacaatatgtgtacaaaaaatacacctggttgaatgtgttgctccagccctcaggccctcgtgaggctcatcctgcggcaaacacacttaaattgtttgctagaagtttgttactgacagcaaaatacagagcaagcagagaccagtaggtatttcctacagggctgttttcacactccatacggccaattcatgtgaagatggtagaataaacaagctatgaatcatcaaagcatcgatcctaataccggattaaaatgtacataagtaaatttcttctgtagctgcagctatttgtcctcaatggattaacaagaaggcaaaggtgatactgaccaattatgtgataatgcaatgtatgtctgtggagtgatatgtgcaccaatattcaaccgtatcactcaatgctcagtgtcaggatttttcacgagcaccttatatttataaaactacacacaacctatatggatgcttggtgttgttcacaacagcaagcccacaaggccaaggtctgagtggttgatacggcatcatttggctttttcacatgcacagctaacagctagaccatcaatctgtagcttcagggaacgaatatataagatgtagacacagtgtagaaagcagaaaatcggaaccgtaggataaccttgaagaggaacctgtcagtcttggctgatctatactttgctgtagcacaaaatctacattgcaaaagatatggagaacacaaagatatcattcttctctcagatcaatgtgcaaactaaatttataaacactttatcatatggtatctgaaagaagatgtatgctgccccataagttgatttcaaaatacaagttgatgcttagattatcatcgatagcacgattgtaatataccctgtagctattatattccgtcttgagctgcacctccttcctcggtgcccaggaacatcttcaaaaaagcaccttccaagcccaaaaaccatagcaaactattagaatatcacaaatcccactgaaaataacaggttagacagaaaccaagaacaatcagcttatttcctactccgacaggatgtatgttgtacctgtttggaatcggcctatgacaccttgtgcgtgggtgttccggcaggggcacggaggagatcgtcaaggcggccgtcggtggcgatgcggacgggagagatcggcgcgggcagagcagatcggtgagctaccgtcggtggcgatgcggacgagagagatcagctcgggtagaagggaggatcggagtggggggagaagaagatttgagagagttggacacttgagtgatgaaacggaaactgcagtggtaggagacagctaccgtcttcgtcttcccccccccctccccccgctctccgctgactgttaacacttaacagtcggttaaattatcttttttccctctatttttttaaaaaatactcccgtcgtattaaattttaatgtatgtcgccgtttactttttataaatgtttgacaattcatcttatttaaaatatttatataattatcatttattttattgtgacttatttatcatcaaatgttatttaagcatgacataaatacttctgtatttgcacaaaaaaatttgaataagatgagtggtcaaacgttggtcaagaagtcaacaacgtcatataataaaacatgaagggagtattttatttataaaatgtaccccacactggcttcggtgaaacgaaggagaacggcagaagggaggaccggagggggggagaagaagatttgagagacttggacactggagtgatgaaacggaaactgtggtggtaggagacagctgtcgtcttcgtcttttcccctcaaaggtcccgttcatttctccaacaagagttggatgaagataacgattttcgtggcacgtttttcaaactgttaaacggtgtgtttcgttcgaaaactttcgaaagttgttctaaaaatatcatattaatctatttttcatgtttgtgataattaaaactcaattaatcatacgttaataccacctcattttgttaaaaaacttaatcttcatcttcaccttcatcttcggaagaaaagaacaccacctttttctcaccattttttctcccttctttagctttacttcagtgaccgttaacacttaacagtcggttaacttatctttttttcctccaatttttttaacatactctctccgtattaaattttaatttatggcgtcatttacttttttatcaacgtttgaccatttgtcttatttaaaatatttatgtaattatcatttattttattatgacttgatttatcatcaaatgttctttaagcatgacataaatacttttatatttgcacaaaaatattgaataagatgaatggttaaatgttggtaaaaaaatcaacaacgtcatatattaaaacatgaagggagtagtttctttataaaatgtaccccacactggctccgctgaaatggaggagaacggcagaagggaggattggagcaagggagaagaagatttgagacttggacagtggagtgatgaaacggaaactggagtggtaggagacagttgccatcttcgtcttttccccctcttttctttctctattttttcacccttctttagctttacttcagtgactattaatacttaacagtcggttaacttatctttttttcctcccattttttttaaaaatactccctccgtattaaattttaatttatgacgtcgtttactttttaatcaacgtttgaccattcatattatttaaaatatttatgtaattataatttattttattgtgacttgatttatcatcaaatgttgtttaagcatgacataaatacgtttatatttgcacaaaaaatttgaataagatgaatggctaaacgttggtcaaaaagtcaacaacgttatacattaaagcatgaagggagtagtttctttataaaatgtaccccacattggcttcggtgaaatggaggagaatggcagaagggaggatcggagcggggaagaagaagatttgagagacttagacacttgagtgataaaacgggaactgcagtggtaggagatagatgtcgtcttcggtttttccccctctttctctctctcatttttcactcttctttagcttttcttcagtgacggttaacacttaacagtcggttaacttatctttttttcctccaattttttttttaaaatgctccatccatattaaattttaatgtatgtcgttgtttactttttattaatgtttgaccattcatcttatttaaaatatttatgtaactatcatttattttattgtgacttgatttatcatcaaatgttctttaagcatgacataaattattttgtacttgcgcaagaattttgaataagacgaacggttaaacgttggtgaaaaagtcaataacgtcatacattaaaacgtggagggagtagtttctttataaaatgtaaacaatcggttagcttataatagttggttaacatagagtttatagtacgtgcagcaacacctttataaaacataattaattcatattaagaccggcaacaaggtttttatatgttggataggaatctaggcacacatagtcaaacctaaaagagttgttaaactgcagatctcaaagttaaggatcataaaaaggttaggaaaaataagaaagcggtggccgctagtgctaccgtggtggccggttagggcaagaaattgggggaagaaggaagataggcatggacgctagtgctaccgttaacggtggccggtgaccagcgttaactagttcttggagaggatgtaaagggtgaactgaaggtttgaaagaatcgcctcccgggccacccaatggagcgacacaggagtccaagcaactagtttttgttgtaccgacatgcactaaatttatctattgtatatgttattttgctataaaatattgtgtgaagatgacaataatacaaaactctcggttctatatacccatccaagaagatactatagaacttttgattttgatttatagtgcagccatgacctgccgaaaatatgattgtatgttcaatgaaagccacgtaaccaggtgataacaatccggcccaggtggggttggccgagacccaataacttaaggttgctcggaccccaacagttcataggcacacctactcaggaaaatgcccaatctccctaaaagactagtccaataggggaagggtggctctcccttttaaggtggcttcctcctcccaaggtaagcaaggtgggattattcaaaggctcacacggtcgccgcccgactttagcgtctttgccagtgggtaatagtggaggatgtcctcatcaacagggaatttcgacgttgtatatacgattgtaaagccaaagacaaaaaaaaacctcgctacaagctcaataaacatgttttcctatatgtccgtggttcggaaaatttacttctcgaaataatttttctagactattagaatatgtgtcgaatatactagttctatttggttatagttggacttgaagttgtaataagtggtagggaatagagttagagtcggactctgtaacccgacatctctcttaaatagagagcggggcaccacaatgtaaccatggcaactacaatgtagcgtacacataaggagaggatggtggcaaggccatggactcatagcgactaggtgctatattgattggggatgagcgcccataatcagaaccccggggatgtaggcttcgaatgaacctcgttaacaaatatcgtttattcctgtgtcgtcatctggcatgatttgggtgataaatgactgaagcgatcgggaaggttagtcgtcgttctgctatatcgactaacttttacaacatgtggtatcaaagcagaatgtttcaatattggatcaagaaaacatgtgggggaggaaacacgaggtgaggactgcgcatcgacaggagatcgtcagccgtggcaatgagatcgatggcgacaacgaggactttgtggaggtgacgtcctcgctcgcgatcagaccggcgatggcggaacgtgactggaagacggggcagggagtggccaaaggcgttcggagagatcggagggacggcgcccaatgcacgcggcgatcacagatccgcggaggcagggaggccagtgacggaagggcgaagccggcgagcatgtggcgcagcgcggcagacgtgcagggccgaggacgatgtgatcgtggatggtggacatgagggctgtgactgcagtacgtgcaagggcacgaacaacatatatggagtatgtgctatacacgaactagtgatacacgcgaggagctgaggtatatgttggtattttttaacgacattactaaaaatataattcccagcaatggcgcagaaatattcctagtatattatggttacagagttcatctgcaagcgcacggatataccattgtagcatttcactcgagagtattacaagggtatcgtatttatttaatcccgtgaaaagatcatagtagagagaacctgactaataacttatatgttacttgtgataatccaagggtagattgacacacatgcagggagctactcattctcatactaaaatatctaagctaagtgggaagaaaatagaaagagagtatattcatatacttctagtatacatagtatacatacatcctagttaactgacatactagctaataccctctatctgatgccctcctggtacttcgagaagccacccgtgactgccaagttccttacgacagcccgtcatgaccatacaaccgaggataaatacggaggagtaccctccccaggaaattaacttagaactatatacacgcgtggaggaatacccgtactgagctgtcaccattagcggcccacatctcatccgcagcatataaccccaaataatgatatcccgtaatctagacaccacgcctaaagtaccagatactactctaatatcatcgtcatgacatagagtaattgcataagaaaacactatactcataccaatacatctcccagataagctagcagtataatcagtataacatgaacataatgtaaagttggcattcatatactcggaaagtattccaataccataaatgtataaagaagagtattctaacaaaagtacaaagcttacgaaagaaaagagaagagctactggagccatacccgaactcttccgaaggcttccggactccgatttctactctattcctactccactagcttgagaacactaaactagcttgagagaatatgatagaactttgcttgaggtgtgtgagtgaagtgagaaagtgaagtccttaaataggcaggtatgacggttgtaactgttgcgaaatatctaaagtatcccgcaaccgtcatcaggagaagatctagagcgtccctaccaaaccccacatccaacggtagagaggtgggttcagctaaacccggttcggccgaaccaggggccggcccaaccagcccacaatttggctggtggtctcctggacttctcttccccgcagacttgtaaattttagcctaattggtcgcgtcatttctgagtttttggcccattcatacataagtttgattctcgacatcgtccgattgatttatcgtctggtttgacgatgttgattcttctccacttttatggttattctctgtaaaaggttagtgaaccaaatactagtgaaatattattattctaacatggatacgcattgcaagcataactagttctctattttagtaatatttacggtcgaaactaatattattctaacatggacgtgcgcgccatatgctggaagatcaccaactggtacctgcaaattatgtgcctgaacatgcatgctggtctgttgatgcacataaacgtgcatgtgcatgtgctatgatcagggagggcatctgttcatgcattgagaaggacgtgtccgggtggtgcatatgcatgtgtgggcaacgtttgctcgtatacttgatgagaagccaagcagcatgttcggtacaagacgggggtgtcacgtggagactgaggccgactcggtcctagcctcacaggtcaccggtgcaagaatacggaccgtattccaacagggtcaactatccaaactcgggtactgattggttgaacggtcttaagacctcacggctatggaagcttgaagggcaactgtgcgtcccgacggagaccgatcaagggctaagctaaggtggctcaaggcgaaagtatgcaggcatgggtggccggatagatcaagccgacagggcagagaaacaggtgctggactagttggattgcagagtttggctgatcagaccagttcaacagagtgatggtttcgatcaaacgaggatgggccgaacggttcgatcagatttggctggttagacccaggggcaaagccggtcggattgatacgtggggcgagtagactggtggcaacaggctagtcagatcgcatatgaaattatctggcggaacataatatatctgggactcgatgaaaggttgagatatatggagttggtccagaattgaagaaaaggtcttgggcaacagcgggtgaaaatcgttgagggcgtcaacggcctgtttagcagtacatgatatatctagaatctgcggggtttgcatgatggggatatatgaaaatctacgtcactaaaaaggaagagcgaaggttgtcattgtaattctttaagagattcgaggcaacagtgaacttctcaatttatcatggagctcagtctaaggatgcggaaaaagcgtggatggatttattagctcagttcataaaactaaaagaaagaaagggtttctttatcagtctggtgagtttgatttgtctatttggtgatgacgggggttgtttggctatggattatgtcaagtcaaatttaagatggtagatggagttgaatatggtctttgagaagtctatgatgtgacagctaggaaaggtctaatttcgcttggcaagacggctgtgatgataggagagaatgtgaagcactgttgcaggtggagtccatctaaacaaattgcagggatagcggagtctgttgaaagcggtgggtctggcacagactcgtcgagcggctcatggtgaagctgcgaaaaagaagacaacccaagtctggaggaccggtggatcggcatggtgattctactacttctaggtgacgtatattcgccaaggtagaataggtgtcgaatatactagttctatttggttacggttggacttggagttataataggtggtaggggatggagttagagtcggactctataacccagaatctctcttaaataatgagggggcactacaatgtaatcatggagactacaatgtagcgtagacacgcagggagaggatggtggcaaggccatggactcgtagcggctaggtgctatattgattggggaggagggcccataatcagagctctggggatgtaggctttggctgaaccccgttaacaaatatggtgtgttactgtgtcgtcgtagacatgttttgggtgattaatgactgaagtgatcggaaaggttagtcgccgttccgctatatcgactaacttttatagcatagaccgcgaagattctactctaccaaatgaccttctcacaatcacaaaaatcatcatcagttgcgtcaacacacaacacaagtacacacacaaccgttctgtagccgcaggggagggcaaagcagccgcgacccgcgagcagctgttgcttgagccgaaccaaaaccaaaccggacatgaagcgggccgtctccagcatccgcagccgcgacgtggcccacctcgccgccgccgccaccgccccctcgccagcggcggcggaggcgtgggacgggcggttccggctgcacaagccgcgggggcagcacctgctcaccaacccgcgcgtcctcgacgccatcgtccgccgcgccgcgctgcgcccgggcgacgccgtcctcgaggtcggcccgggcaccggcaacctcaccgtccgcctcctcgagtcccccgccgcccgcgtgtccgccgtcgagatcgatccgcgcatggtcgacgccgtcaccgcccgcgtcgacgccctcggcctcgcgcacaagctcacggttcgtctcgccgtgcccaccatccgctcgatcaaatgcctccaagaaagctaacggggcccctcctctcctttttgccaggtgatcagggcggatgccgtggaggccgagttcccggagttcgacgtgtgcgtggccaacatcccctacgggatctcctcgccgctcatcgcgaagctgctgttcggcccctaccggttccgcgcggcgacgctgctgctgcagaaggagttcgcgcggcggctcgtggccgcgccgggggactcggagtacaaccgcctggcggcgaacgtgcggatggtcgccgacgcgaggctgctcatggacgtgagcaagagggacttcgtgcccatgcccaaggtggactcctccctcgtcgagatccggccgagggcggtcgagcccaacgtcgacctcgccgagtggctggccttcacgcggtcgtgcttcggccagaagaacaagaccctcggcgcgatcttcaagcagaagaggaaggtcttggagctcttcaggagatcccggtgcgcggaggaacgctgcgacggcaatgccaatgccggtggcggcagcagactcatcgcacttggcggtggcgacgacgacggtgacatgagcgacggcgacagcaatgaaggccacgacggagcacccagcttcagtgaggaagaggtcgccgtgttcaaggcgaagatcaccggtgcgttggagtcctgtgagctcgccggcaagaggccctccaagctgtcgaacgacgagctcctgcgtttgctcaagttgctcaatgaacaaggggtacggtttcagtagcacttatatccgatcattgctcgccgtttttctacctcagcgagcagtagagccaagaacaagaagatgaaggttggcatgttgcagctgaggtcaggtctcctgccatccatggcggccggttgccacatcaatacatcatgttcatgtcagccgtcactggcagctcgtcagccacaggacgccagattacttcaagtatgctcgtcaaccggtcgatagatgtgttcggagatgtggagaaaatgcttcaagtctcaagcattacatgcatgcaactgtaaaagcagtgtgctactgagagagacatcttggatgctagaggagcattatccatggtttccacatgattgagcactatttgccaaggtgaagttggcataacatttttatgatgtagcacatgttagtaatatcgccagttttcatcgaaatcaagcaacagttcatggtaatgaccgagcagatcattgcgtatggacagtttataatcagatgctcgattctctgcaattctgcatactttctgtagaaatacctcatccgcgttactagccaaggcacagaaagcatgaccagtgaaatcataggtcataacatacgagtctggcattaaagtttgtttctctattgtttcctttatccgatgcaaccattgtcaatttgtcctatttctagaaaagaaaagaggttgttttcagctgttgtgtactgtgctactatgatattatcatgccaatatgccatcaaaagcttatacactgttacacatttctactaggtgtataaaaagctcttactatcatgttatcaaatacttggtgagtggaaatgctagttagtttaacccacaaaaagataacacttctgcaaaagatggaaatgaaagaaacatgtaaaatcaattgattttcaaaaccctgtagcatccatcatcatcatcacacccctgaggcacatgatgatcaatttacattcgtaggtaggctggtggcattacaatgatccaataaaaagcggacagatggaattagattttaaagctaagctggtatctgaccgacagcagaattccagctgaacattccattggaattgcgaatcaaaattcacaaaagtgaaccaatgagtattacattctattcccagactgaaggcagaagcatcagattcagaaaagcaaaattcttatcattatcatggatcatcatcacagcccacattttcttagttaatacacaccgaaattatacaattttacacgctaaaaatgctagctgcattcaagtaaaacctagccatagaattgtgacaaaaagaggaaaagctaaaaggccaaaaaaaaaagtgataagaaagtttagtcctataccatccacaaactccttatcatcgtggcggcagagacgagaggaggaagaaaggaaggaaagcattcacctcatcatcccgacgacggcgacgaggggaaggcgtccttgacggcggaggcggcggtgaggtagttgagcgtgttgcggagcgtgtcccgctcgcggcgcagcctggcggcggtgtcctcaagctcgaggagcgcctgctgctcccgcggcgcgccctcgaaggtgttgccgacgtagaaggagaaaggggtggggaagaggccccgccgcaggtccccgacgtccttctcgggcttgccgttgaggcggttggcgatgcgtatgacgtcccgcatgagggcctcgacgtcggtggcgagcgcctcggcgtcgtcccccggcgcgggggtctcggcgggcgggcggtcctcgagccactgcacggcggcgacgaggtagggcttggtgcgcacgacccgcgcgacgcggaaccgctcctgccccttgcagatgaggaagaagcggtcgtcggcgaggcgctcgtgcttgacgacctccccgacgcacccgacgtcggcggcgcccccggcgccggacccggcgaacaccaccccgaagcggaggtcggtctggagcacggtgtgcatcatgatgcggtagcggaactcgaagatgtgcagcgcgtgggtcgcgtccgggaacagcacgagcggcagcgggaacagcggcagctccaccagcccgtcgtccgactccgccggctggtacggctccggcgacgacggcgacgaccccgaccccgaccccgacgcgctcgccgcggtggcgaggcgggcccctcgcccgcgtcgggccggggcggaggagtggaggcggggcgccgggcggaatgcgctgttgggggaggcggccgcggcggcgaggcgcggggaggggaggatttgggggaggagcaccattggaggatctctctatcccccgcggcggcgaggcgaggggaggggaatggttgggggggttggattttgcggggtgatttctcaccgggggttttgggggaagaggcgagccatgggaaaacgcgatggatttttttttctgttcgatttcttcttggaaggatggatttttgttctggggcccacgtggaagttggagaattgattgataatgcggtgggggtgatggcgtggaggagtccacgttgggggcttatccacctgtagctgggtgaggctacgagaaagcctagaactggcaaacgggctgtcccgttattgggccgaaagaactagcaaggaaacaagctcactttagatccctcaatttgtcttccaatctggaattggtccccaaagttataaaaccgaatacaacgcttttccaacttacaaaaccagtgcaaatgtccccggttttaactgacgtgacgcctacatggctcctttgactagatcttcgtcccatgtgcaagggcggatccaacgtgggtgcaatggagactcgagtcccccctacacccacaagactcatggatacccccggagcatccccttcgatttttttcaccataaataataagctaaaggtctctagatggttagaggttgaagaaactatgtaattgagccccccctccaattttttgttcctggatccgcccctgccctgtggcaatgacgtggcgcttatgtgacaatttgataaaaaaaataaaagactaaaaagttaaaacaaaatatgtgggacccacataccagtcaaacaaaaagataaaaataatgggacccatatgtcagtgggttcaatttcctccacctcaccctctctacctctatctcctctcttcaccggtgagccgaagccaggcggagagggaggaggtagggaggctggacgcaggtggcgaagagaagggcgacgacgagtgtcaactgatcgggacagagatatggctgggcatgaaaatggtagggcaccgacaacttcttggccctcttactccatcaccaacatcctcgtcacctccatcctcctcctcgccatcccctccacggtaaggtagtagtggcggtgggcagccagcgaggaggagggacgcagcgatccgtggcgaggaaatgggaggcaagggaactggagagatcgagatcgccattcccttcatgtaaggtggcaacaacgaggaggggcccaggagtggtgttggcgacggtgcggtggcagtgttggtgatagtgtgggagtcgaagatggaggagaattgtcgtcgggatggaggagaaccgccaccaccagcgctttgtgacgtcatgcgctgcacgtagcacctactccgcatcaccgacaccctcctcccacgggggcaccaactccctgctcctgccgatgctgacaccctcgtctattcctatattttccccatattaaggacgacaaccaatgggagaagggcggcacacgatgggttccggtggccaatgggagaaaagtcgtgcggcgcgcagcgtcggtgtttagagggctcttgagcatgcggtcgccgccctcgcgctaacgcacggagaaggacacgacatcgcactcctagcaaaggagcccgtgcggcgggacccagcccctgctcccgtgaccctcctcgtcctcgctccccctgcggcggaagaggagccgagcagcgtgtgacggtagcgtcgagcgggaccttgggcgtgcggccataaccctcgcgcatgaagaaggacgcagcggcgcactcccagcaaaggaggagctcgtgcagcgggaccgaaccctgtccccgtggccctcaaccggagggataggactccgcctcggcctcctcctctcccatagcacattgctcctgatatgtggggtccaccatttgttttgttttggctgaattgccttgatatgtgggtcccacgctgactcaaccatcgtatcagccaaaaccgtacattatactaccttgggacctctagtacaccgctttcacaaattaagggacacagtatacctagtattgcacttaggggatgaaatttagacttggcgacacagtgagggacctaaagtgagctttttccgctagcaagcctggtgagtagagcgtagttcaattcacgggctaacggcctgcttggatacgaattccatatatatatatatataaacttcatccccactaaatgtatctaaaaccgaactttggcttgggccttgtaatagactaacccatctcggaactgtcttcctccacctcccacgaatcagctcttaactctaaaaaaacaattgggttttatttagttaaattttgctaagtgtcattcaccttgtctttagttctcgctcgattagtcggtgactatagattcagagcccttaatagtcggtgtgttgatttgctgggttgattagatctaccacttcaattgtaacttttttttatgcttaatcacctattcacaaaatttagattgcatttatcttcttcgtataatgttccctcgattgcattgattgcactgtaaggatcattaaccgtgtgttatttttttatgcttaatcacctattcacaaaatttagattgcatcttatcctgttcgtacattgttccctcgattgcattgcaaggatcattaactgtgcgtcacggttggtacgacattgtttgtggtgtagcgattgcatggcgtcttggatttgttctggttgatagccacgtcgcaagcgtcaaactcgatcaaaacgagagttatgtactcataagaagattaggccatgagagagaacatcatcactatcttaagttagtttgttagattgcgtctattgaattagctgatccataggccaagggacgaagttttgcttgttaatttgctgccagcacctatccacaattataacatgacaaaaagctccataaccaaaattttttatttaaatttacccttacaatcctctgttattactagctacaagtacacacgacgacccaaattaccctcttcctccgaaagaagagaagctttccaggattaacccgcagtagcagcaaaagctatagatgcagcaactgcatctgaaccctgaccccgaccccttcctctgacctccccgattcccaacttaacccatctcaccctaatactaatacaccggatcatggtcgtcgccaagtcgattgccattggatgccaagaacaaatgatggctgtgccgatcgggtctctccctcatcggaggctgttgacgaaggcgaggagcgagtcgacgtcccgcttctccgacgggtacttgatcggcctcgcggtgcggctcgggaagaggaggatggtcgggaagctctgcagctgcagctcctgctgcgcgaacgccttctgctcgccgtcggcgcggaacttgcccaccttcacgccgccgcccgcgccgcccagcctctcggcgagctccaggtaggacgcctccatggcctggcagaaggggcaccacggcgcgtacagcaccaccagccacggctccgcgcggctctccaggcggagcaggttctcgacgccggcgcgggtgaggctcaccacgccgctgctctcgaagatgtccggcgcgccggccgacccgttgccgttggcgccgccggccttgtgcgccgccgccgccgccgccccaccctggtcgtcgatgttccccttgtggaggccgcactccttggccttggcgtcctcccaccaccaccgcccttcccgctcgtgctggccgggaagcacgggcctggtgcacggctcgcacccgatcgagacgtacccctgggcgtgcagggcgttgacggggacatccatggcgcggaggaaggtccacacgtccttgccgtcgacgttggcgacggggttccacttgacgaggctgccggcgccgccagcgaggccctcgaaggaggggtcgacctggacgacggggatggcggcgcgggtgcccggggactggtccttgcgctggccggtgatccaggccctgaggccgcggagcgcgcggcggagcgggcgcaccttgcgggcgcggcagcactcctggtggccgtcctcgtagaaggagaagaggcccttggcgcgcaccagcgcctgcacctcgccggcgtccgggaacatgtactcgatccggatcccgtagtgcttctccaccttgtcgaacagctggtacgtctccgggttcagccgccccgtgtccaggctgaacacgcggaacggacgccccgtcagcttcgcgtactcgatcagcgccacgtcctccgccccgctgcaaaaaaaaaaaaaaacgcgacgagatctcgatcagttttcattttcaaataccaccacactcccagttgtgggtttatatgtttaatatttaaccgattattttttatcatcaatacttttatagttattagatgataaaatatttatagtattttatgcgtgatttattttttaaaatttttataaacttttcaaatatgacggatgattaaatgttgaataccgaaactcacaaatacacataaaatatgaataaggcgaccgatcaaatattaaacacataaatttataactacacttaaaatttgtgcgaatttatgctccatttgattaatcctgcatcagaagttgcctacacggctaggcgacaagttaaaagttgcggtatacaatttgtttggaatctcctaaagggtcaaagcataaattatcgtgtggtagtggagcaaactattctgtctgcttgtgcgtggttggtgggccatgattctagaaacaacgtggcgaaggagatacagtgaacctggacacgggcataatctgatgttttgctcgaaggtgacctatgtccaggttcattgaaccgggcacttataacgggttttgcatttcctttaccatcacccacgaatccaacgtgaccggttttagatttgtagtactcctattttagataggacacgaaatttaatgataaatctaagttggaagcaagaagcaactatcgtatgatacactcactgtcgttcaaatcatattgaacatatttatacatctgcggctgaattttttcgaaacaaaaagttatatactcctactatttatccctaatataataatcctagtcccatgtgatggaaattttcttattttcctaaatcggaaatattagctgatgtatgacaataacactataaaccgaaacgtcgtccaactacctgtcagcaaatgggtcccacttgccagggacaccgtaatgatacaaaatactcctatgaaactaggaatcttcaggaccacccgttggatttcggaagataccgtgatgctgcaggactaacgggattaggcgctcagcaagaaagcgcctagccccagtgcaccgtgagcctaacgggttaacgggcgaaattaacgggtacggatccatccggcaacgagtaatgtagtacctgaaggcgatggcgatgtcggatccgaacatggcgagtgcccgatccatgatctccagcggcgacgcgccctgcagctcctgggccagggcctcgtagtccacggccggagcaggggcgtcgacggcggcggcggcggcgtcctccgccacgggcgcggcggccggcgccgccgccgcggaggcggagacgggctgcctcgccggctccgccgcgcgcagcgggcgcaccgccctcgcgcgctgggccctcgccgccgccgtgcccgccgccggggccgcggccacctgctgcttcacggctccaatcctcgcagctgcacagccaaaaaaaaaaaacggaatacagagaggaatttttataagcaaataattctcgcctcaaatgaggatgaatccccagagaaaacaacgcatttcgctgggagaaatttttgaacgagcaaatcagcagttaattcccgattttttggacgatattggagctcatcagagtaatcctcaagcttgcaaacttcaattccacagtaaacactcaaattcggctaaatttttacgaacggcgagcttggatgcgcgagggagcggagatcgagagcaagaaattctcacctttgaggtcgcggagggcgacggagtgggacgagatggaagcggtagcggaagccatcaccacctccgaatccttcctcttcccttcaaaattccgacaaaatttggaagcaggaaatgtttttttttcttggttttccctcacttctgcgagttttctgtggcgtacgggggctaaagaggagggcgggttacatatagctcgcgcgggaggctgggttcaatgcacctggacggaatcgggagcggcggacgggagggacacgtgtcacggcttcattggctggccgcacggggagggggcgatcgaagcagtggcgtcacgcggagccacaggaagggccgcccagccaagccaggccagccccggtgggggccacgtggcagcgtggagcgctgagctggccgggtgtgtggctgcctcgctccggttgcgaccaagccggccagccacctcacatgccagatgccacgcttggcattggtaatctttggttaaatgataaagggaaatcatgttcgttcgtttcttattaacaatactactgcctctctctgtaccaaataatttcaaataatttaatttatgacatgatgtttctagtttaattaagtttataaacaaatatagtaatatttataatactaaattagtttcatcaaatcaacaattgaatatattttcatagtaaattcgttttgagttaaaaatgttactattttttattataaatttgatcaaatttaaagcagttaaaatttgacaagagtcaaaacgtcttataaactgaaacgaagggagtaatagttaaagctcaattaattatgcgtgtagctttattatttttcatactctaaacttcattatctaagatattttttgggagggtatatggagattggagaataggttatttttgttggaatgttgggttggcaggcagccacgcaggcggaagagtaaagccacctaatacatgctaacggcatgactagtttagaaatgatgtacaaaaacaaatatgccaacgaaagaaaggatgtaagacgccaagaaaataagaaataattatcatttaagttaatggaaagatagcgtgaggtactaggagaagcagcaaaagtgtgatggtaggatgccaagtgtatggctcatctttcgtacaataaaaaggttttattgtgagacacttctaattctgtttagaaataaatatacttaatctctactattataaaaattgaagatgtttttttttagtattttggtacgtcatccgtatatgagtcggtttttaagttcgttcacttttgaaaaatacatatttgtatttgagtcgacttttaagtccattcgcttttagaaatacataacgagtcatataaaaaatcttttaaaaaaaactcccgtgctaacttgagacgaacaaactcctaactgcaactcatgattttttaaaaatatataaatattcaagtgaattctcatagtaaatttttaccttaactaaaccatataacaatataagattaaaatagcctttatgctcacagtaaatttttactttaactaaaccatataacaataataagattaaaatagccttcatcacgagtattttttttctagttattacataaatacgaagatattgatcaatctgggttgcataaataattgccttttaagaaagttgactgattagcatcatggtgaaaatcatggtaacattttattatcccacacaaaactttacctgattggtggacacctaaaaaatatcattttttaccgggcatatttaatattttaaagactaacaatcagttcatactagtaaggacgacggtgtaattaggcattaatcaacttgcatacgtatatctctactctacgcacctagccatggctttacttatctgtttctatttttatctcaaaacgtcaaggtcttctttctcatcacaatatttcctctcttttttatttttcaattcgcgtagacgtctcagtgtcacccacacatacatacactctgacgacactaggagatcactccattgtgtttacatacaagctgacgacactgaagtcactaatcatgttaattacgatcgagtcgcaccggaacattattaattgcatccatcactgtcacggcatgcgttaattaaactttagcaaagatgcgaagattcgttgcagctgggagaagccgaggtggatggagccgtcgcaaactcgcacatcatatatcattgcgagacttttggacctttttggatcgtcaaaatttagcagccatgaaaaaaaaaatccaaaggatagatttcttttgcctgtggatgcagtatgacgcctccttccgatctctcgctgacaggtgggccccaaaagtgacgatttgccaattggtagggacggctctgggtgggatgcgagtgattgtctttgcttgcgttggatggctcttgattggtctccgggggcgtaggtctctttggggtcaaatatggccggtacaactttagtagtactccactagttgtaacttgtggagatccacaagtaattataatttcttttcctttctgggttttctttaagttgttatccctctcaccagttaacaccacttacaagaaaaaaacacttttgtgatgcataaagatgcagacgaaagaaaaagacaaattaagggatcgtagagttaataaaagtgtggcattgctcagcgttcatggtcgttttcttatacggatattgagatggcaacttgagtgcctagttgcaatataagaatctgtttaggttgatgtaattttgaaccatactattttttaaaattaataaacatgtggattcatcattcatttagtttgttcgtaaatataggcattgcttaaagaattttggtaacaatatatttactataatttaccaaaatataacaatgttgtcaacttaccaaaattttggtagggcccctttgaatcaaaggaatgaagaaacggaggaataggaaaaatataggattctgacaggaatgtaagaccccctttgattcaaaggaaattcataggaattttaaaggattctattactataggaatttttcatacaaagccttttgaatcaaaggaatgaaccctatggaatcctatgaaattcctatggaatgcctcttcccatacaagttttggaggaattttaactacaggtagaactcatggaagaaatcctttgagtctttatctctcctcaaattcctgtatttttcctgtggtccaatcaaacggtcattcctatgtttttcctgtgttttgcaatcctctgttttacactttcattcctgtcagaatcctaagtttttcctattctccgtttttttcattcctgtgattcaaaggggccctaagtgtaaaacaga

SEQ ID NO: 10029 - DNA, 6555 bp, Oryza sativa
cccccccccggcgcgcgtccagccccccagatgaacaaacaacagcaaaccaagcgcgacgcgagacggaaatggggcggagagagtagcgcgtaacccgcaagctccacgccaccaccaccctccccgaatccaatccaagccctagcgccaaccgccgccgacgaggacgccaaatccctcgatctcctcctcctcctccgccttccgcccccccaaaaccctagccccggcgggaggaggcggcggcggcggcgggggtgcagatcttaggatgtcggactccgcgtccatggccgccgccatcgaggcgcggttcagcggccgcgacctcatcggccgcggctccttcggcgacgtctacaaagggttggttcgcggatttaccttcctctccctctctctctcgtgtttcacgctcgcggatttcgggacgatgatgtgtgttggggggaggaggtggggaggggcgacggtggcgtcttgtttcgctctcggggcgagcggcattgggcgtttcgagcgttggggtgcttcgagacggtgtagcattctgcatttctccgcatttcatgggggggaatttgggtgtcgcggctagttaggtgccattggttgttcgatcaggatctgcgaggaaaggtatgcggttcgagtgtgtggcagggaaacaaaagaaatgctagtttagtgccttaatgagataaatctgttttaatttctccgtgttagctgagtggcagggttcgtgccatgagttctataccttgattttgtggtttatatctggtgcaaaaagatgtccgcgtagggaatatgctacggcagttccttccacttgaccggaacttgttttttttttccagcctcgtggaaagtttgtattttctggtggtaaaactggtcagaatcttattagtaacgaggaactagactagatagcttaggtatactaatctgtatcatgactatgtgttattatgatccggctgtataatcatccgtttatatgtacacggaaaggaaagtatcacatacatgtaactgggtatggttttttgctatacaaacgttaaaacgactggctggaccgattaattggtcaattaatggttaattatctgattgagctgctcaatcttgtgttaataccaacaaatcttctctagtttgcatgtgcccgtagcttgcagttggcccaattaagttcatgcttgcagatacgttgcttccatgtctagtttgcactttgtttcaggtatatggtgctgcttttgagtttccactttgtatgctagtatgcgatgatagcatgatgtgtagcagacacttgtttatgaattttgcagttgagaaggttgcaaagctaatgtatgatccacatgtctacctactgaaaccatcattagttacatattaaagatgatatttccttatttgatttgtcaccgtacaaatgtatagttcaacccaatgtttttaaatatctccaaaaatgaacaactgggcacatatatatttttatttgtactagataaatacctgtgctttgctataaataaaataaaataaactataattttccctaaaataaatatatattttctatgaaatgtgctacccaactttttgctgagggaatactgacgttaatttgattttatatgtgactatccgtttagatttgatttttctaatattaagaagtccaaggggtattcaagggggtaatttgcaaaatttacaatcggagtagatggggtggcatattcactgccaccaccactcctcttcttttaaaggagtatagatgaatgttaaatttcggtataattccgaataattatctgtattatgactaattgcttagtggtaccttgcccgttggacaccagtattccgacttatacaacactgattattattgtttgagacacagatctccatgatacttatgccaaatatcatatggattatcctgaaaaatttgttattcgcatgatgcttgggctaagataggtatgtggccaagtttatatgctatttaatttaagtacataaatctggtatgggacgaactaaaaaaaaatctctttcctgagttgtaagcatctcaaagtaagaaacttgtgttggtaccacagtgcacacatagagggttacatctgagatgcacttaaatctttatctcttccacatatcagttgataccgggatcaattccatgccttgctgatgtaatttgtttgtgcaatttagcgtggaaagtttcaatcacacaatatacttggaactttagttttctcgtttttatagaaagtactagcttataggatgtttgatttactgacatatttttatagtcgttacataggatttgttgagtacatttctttctgcactcccaattgttgtgttcgaatccaacgatcaggagtgaatgtgatgatgatgctctaactcatgcctcattttgtgcatggcttttttaaagattaaagatttaccttatattttctccatgacctttcttctaatctaacctctttttctgtgacagtaaagttcagttcttactttatgttttcttgtcatttattctataggtttgacaaggaactgcataaggaagttgcaataaaagttatcgatttagaagaagcgtgagtctcttcactgaagttccctctgactccttatttaccatattatatcaggttttatggcatataagccaacatgtttcttgccatttgcaatcatgatatcctttttttattggcttattgcaagaagaaaaggtgtattgtgtactggtgctaatatatttcttgtaccagtaacaaagtggtgtattctgtttgctcttttagatttgcctggttcttttgatatagttttctacactaccagaattttatattagttacttatatgtcctttaattctatgcagtgaggatgacattgaagacatccaaaaggttgttctttcgccttatacgctgtatcaattacaggatatgatgagatcaaattgaatgtggataatttatttcctaattcctaataggattaatttcatgttgcaggagatatctgttttgtcacaatgccgttgtccatatataactgactattatggctcatatcttcatcaaacgaaactgtggatagtaatggaatatatggctggtggttctgtcgctgacctagtatgtgtttattttttatattttatttgacacggcaaaatcttatattatctacatacaagttaataaatcatttcagtttcaagaatcattcaattggttcaaaatttgaagttggtatgatttctgttttcatctgtagctccaaactggccctcctctagatgaattgtctattgcatgcattctgagggacttgttacatgcagttgaatatcttcattcagaaggaaagattcaccgtgacattaaaggtcttgattatttctctccctttccctttttattgctggatttatattgaatatgagcatttaataaagcatttgggtcatcaaactggaaaaattggggccatgtaacatgtcctgaagaactctacagtctatacctccctttgtacagcatttgttatcatactggtatattctgactgcagtacctcaacccctggttggttgtgctgtgttcctaataactacgggccagataaccctcatatctactgtcctgtccaccaagtacaatatccacaaaaccattataaaggaggctttctggacagggctaacactcctttctttgagaactaatgcgttaataccaattgcacatttatctttattgtcagaactcaaaagatgttgataaaggtcaattatatcatgttactagtattatactattattcttgatttatcccatctttaagttggatggtttagtaggatgtggttcaagaggcgacacctctttctcaccccatccactattgttacgttgcatacttacacctattattttctatcaagataaatcgtcactcactgtttttttattaaagtgaagtttctttttcactaacttgggaatcctcagatacacagaacaattagatatttgctgttgtttaattaaaatctggcagattaagatgtaagggctggtgaaaaccttcatttgccattgcattagtattggcgctagatgaattgaaaagtttagtgttgctggtggatatggagggagaacaaaaccccagcaaaccttgcataatcttaaacataagattgagttctggaaagtctgcaatgcctttccacacttccacaggtacaatgatgtggaagatcactgtcaaatagggtcaaataggtctaccattagagtctgtatgaaaagataatggagagttagcaggcagttgtatgggttgcacatttaaattgttcttcactacacagaagtaacataccaatacatttgatgctagtattttcatagcatttgattgaacataaacgaatgaccccactattgtgtgactactgattagtcctgatatattgatgatctttgactcatttattttctttcctattttactaatgtgaacctgtgaagtataccacacattctaatatacacattctgtgatattttgcagcggcaaatatcctcctgactgaaagtggagatgtgaaggtataacctttctacgatttctcaatgattttatgttccattgtcaggatggtcctgagttctgttattaattcttagcttacaatatctatgcaaacgtttatatttttattccataggttgcagactttggtgtttctgcgcagctgactaaaacaatgtcaaggagaaaggtgcgatcttaaccatgattcttcaatgtcaagttactcgatattgctgtatatgtgcaccaggaacctagtgactcatctacaatcatattttggctatatgcatacgttacttgtactcaaatggaaaacttttggagggtgataaatctaatcaagcatatcacaagattattatttatgctttagcgcaattcaaaatttgaattatacagccataagcacttatcagtattaattaagatggaagctccctgttctgctagtatcattcggtagtgtttttagctcaaggacaaacctttgcttttggaaggtaatattgctaatggcttttaattttgaattgtgtagacatttgttggaactcccttttggatggcacctgaggttattcaaaactctgacgggtacaatgaaaaggtagctgtgcgtttttctttaaacagtttgctgcttactgaactttttacccaagtctgtgtcctgatgcaggcagatatctggtcgttaggtataactgctattgaaatggcaaaaggtgaaccccctttggcagatatccatcccatgagagttcttttcatgatacctcgtgaaaatcctcctcaggtcacttggttaatcttcaatccctgttctttaatgcttaattgcaatatacgcaaagcatttgctttgatccactagaatatagtatattaatttttaaaaaatgcagcttgatgagcatttctctaaaccgatgaaggagtttgtgtcactatgtttaaagaagaatccagcagaggtaatattcttctttcatgcttctacctgttccattaatcacgtcatttgctcttgtttcccaaagatattcatgaaaacaagaatgttgatgccaactgtttcctgatttgccttaccgttgctgcctttgctccactccattgcatcttctgcccatagtcaagtcgtgctccctgactgactttaggactagtcgtaggacttgattacagtgaaacatacacagtatcgatgttttccttttgatactaaattaaatttggacttccacctgtcatagttgagatcatgatttgtgactagaaggggaacagaaataaaatcttatgatatgttgtacagaatgagtatcagggacagtacaacagctttctggatatttaacatgctattgtggacaaaacatcatatgcccgtttttccaacaaatttggcatattgtaatgttgggggaaattttaatgctttatgctttttttatcaatcgcatttgataattattgatgtctaacctgcaaaaaattgtgttttaagtccttgcccttaacgccttccctttataactttctcacagaggctaagtgccaaggatcttcttaagcaccgctttgtaagaaatgctagaaaatctccaaagcttctggatagaataaggtatgtggtatagtacttctgttcataacagagagaagagttaaaagcagtcttttgctgataattgagacatctcaacacctatctgattcccttgttcctcaattgctgttattggcagagagcgaccgaagtttccagtaaaaagcagtgcggatgccacacaaaatggtcgaacacatgttgaagaagatgatggtactggtactatcaaggttgagagggctacaagggatg

SEQ ID NO: 10030 - DNA, 40948 bp, Oryza sativa
ctgaattttgtgatgatgaaaatcaccatggtgtacatgttcactgctagcattgtgtggtttgtattaatgctacaaaatgccttgctgctcatgaactgcttgacaaaatgcctctcaatgttctatctaaaattctgagcatgttaatatgtgtctccccgtaagtttagatggtcataatttgtgctggttaaatatcctaaaagagttcttaaaaactgatatttgatcaaatattttagtgattctatcgtgcatattaattccctgtagaaatattatatacatattagtagagtagattatggagagttgctaaaaattgatcgccaaccgtttgaagctcactttgaagatctactgcgaaagatggcttcatgttaccagaagacaaggcaaggcatcaccacgtaacagaaagaagagtagagaaaaagaatgatatcaaccgccatttcggctgtgtttagtttctaaaattgatgagaagtttggagaaagttggtagtttggaaaaaaagttaggagttcatgtgtgtagaaaaattttggataacactaacgatgtccagcttcttctcattatgacagcaggagggaacacagatgctttttgtgtatttagtcaataactcagcttactggatgcttatattttatattctgcaatgtaaagagtagatagcatacttgagaatcattggtcgtcactgcattataattgtacatcatatatcctaggaaatattggatcaattgcaaggacatgtgtgcagcgtgagcagttggtgtgcatcttatcggggttaaggttagtgtttattgaaaaatacattgaattatgtttcttccttttctttgttatgttattcatctggtactacatgtgaacggcaaatttactttgtaagcattttcagccattgggtttaaaggtagacaacacaaagctctgtgtgctgtattgggttattgggcatatcctatggttttatgccagatatgccaaatttccctcttctgtgcattaatatagttaccaaatatgcatgaattttgaaccactgtttttttctctacatcaggatggagaaaaatggttatataagcaactaagcaatgtatttttggtagtgaagtgtacataatggatacagcatcacttgttatcctgatatatttatttaagatggttttcttgcatgtttggtagtgcaaatggacaccatcaaattgccaatttgccatgatcttggtgcgtgtatggaatcaagtagaatggtagtctcctgcaattgctccacgatgactgaatccacgcggaaggctgtccatttttggcagttcagacttagagagaggttagcattggcctattctttggataggtttaggtcatttatgtgttgagtaaaatttggctaagaagctacggcatatctgttttacgaatggaaaaaatgtagctattttttcatgtgtccttgttgcttgattggtcaggcaagttgccaagttattgctccgtattgcaaattcatcttggtaccatattaactttgacaatctgctttttttggtgtatcaataaatcaagtaaataatgatgcaatgaactcttctgatggacaagcaacagaaaatttacttgataactatattgtttggacgtatgttctggccaataatcttgattccttcttatatcagtccatccttatccttgacgccttatcagtacactgtaatgctcatactgattgtgctggctgagacctaggcgggggccaaggccttcatttaggtcagtacacaccgcctcaggaggtttattccttgtccggtacatatggttgggatgttggatccatttcatttatttctgcaggatgagattgtgaacaatggattatctgttattaggcttgggatgctggtctgatgcaaattactgtagattattcaagtcaaagttactatagtttttttttactgttggagttctgtttcagtgccaaatattcgctgagcatgatgttgtgttgcagtggtgccctaattgcgatttcaatgggatgttctagacagatgtgtggagtggggtggaggagaagcgtagtcgatgatggtgaaacacagcgtgtttgaggaacaaggtgatcgacttgaagggcgttgccagcaaccaggctgcttctttgaacaccttggttaggtaatatattcaagctatgttagatggaaattacttttatggaaataggtgcatttgtgatagcccatatattatttctttatagttattagtgcaattacaattatttagcatgcaagctaatagtacttctaatgaggctacaaatgcatatcatacttatatatgtttgtccataacgtgttgtttagaacagcttaaacaaaccaagcaggaataatttttatttatgtttcctgatcaattaggaagtatatttacaaacgatggcatatgggataagaggatttcctttctttttgtgctatgaatcccatcaaatttctgctatttttagttcacgcaggagaagcaggagaagagtatacaccgtgcttttgctctcagtattgcgaaccagctcacaaatatattccgtgaccgagagaagtgccaatacaatagttttaggaagttgtgttcgatgatcagttctgagcaactgagccccttgtagagttgtccccattgcagtggataaaattaccaagtgcctaacacacattccatcagaagtacaacttgggttttgaaagacaaaaaaattgctatgtaattaacaatgtataaaaattctatattgttctttttttcaatcaatcttgagtatatatctcattctcaaacatatatctttttctattatttgatttgaattatcaaatactgtcgtagcgttagcacatgcatattactttgctatgtaattaacaatgtataaaaattctatattgttccttttttcaatcaaacttgagtatatatctcattctcaaacatatatcgttttctattatttgatttgaattatctaatactgccgtagcgttagcacgtgtatgttactagtatttaaggatggagaaagtacttgttctttgtaacatatggattttgtagtatttttgtgttttaaagagatctatttaaacggaaacaatttgcattgagcattcgacgcgagacgaaacatcgggcggttacgccatgtgggcccgcatcgatttaaccataacggctcgaccttttcatcttccttaatcctaattattctcacattttctcttaccttcctagctattgaacaggttcatcgggatattggcagaaccgccgttgctggtggccacgactgcaacaatggtagcagggtgttcttgatctggtcagacgctagcttccggaaccacacgattgagcacgtattgtcgagggtggcagcgatgaggttgacatttgtaggggaggtggagctggcaccagaacctaccttaggagcactcctcccgatgctagtggctgtcgcccttccactcctcctgtagtcgccaagctgtcgcatccggttctacgccaccttcatccgcatgtcctccttcctcatctccggcaagtcaacaataatctcgtgcgcgtagctagccagcatcgtcggtctgattcgagagttacattttgttttgattcaatgttctgatttgagtgtttcattttgttttgttttcatgtttcatccattgatttcttggtgttgcaattagtatggatgttgtatctgactgaaatactttcgatcaagcgatgaaatattttttcctacttgatgaaacatctgaaatttttttgttgaaacatttttttatcgagtagtgcaacatgtgaaacaatatagtgcaataccatgtgatgttctatgaaatatcctacatccaattttgtagtgcttcccttatttatactccctccatctatttttgatagtcaaaatctgaaaaatttatttttgatagacatatttcaatccaacaacctatcatcttaatgactttctcggattttatgcgtgactctccattcttccacacaatattggctatatgggcatcgagaaatgtaaatattaatgaatcgcttgtttacgataaatgactagtagcatgtttaaatagatgataaatagaattacttatcattgatttatgtaccaagatgaaatacaatactatcaaggagctctccttttaatcgaaaagaaaaaaaagtacctctcttttgctgggccccacgaagaaagggagccgcttctgctgcccatggcaatggtggcagtggcgaccggccggcctgcaacccggcggcgtcgtctcgtgctgcgacgcgagatgtatgtatgcatcctccaaagtcttttttcgcggcatgcaatcctgaaaagtaatacctctgtctcacaataaatattcgtgcccaacatttgaccgtccgtcttattagaaaattttgtgaaaaatttgaaaatatttagttacacataaagtactattcatattttatcatctaatagcaataaaaataataattattaaaaaattttaaataagatgaacaatcaaatattaaacgtgaatatataaaactatatttattttgggacggatggagtagtctgttggctcgcgccttgatggcatggcatctttttctctcttgtgctgatgctgaccaagacggcacatgtgctgatgtgcctgcgtgcagtagtttctttggctggctgctggttttggctacatcaggccgtgtaatggcacatcatgcacacgcacgaatctgatggatacagagccgctagtccaagcagtactgctaatagcgggcctatctcccgtgctttcgtagctcctccctcctactactactgtgtaggagtagtgtgtggatggataggatacggatcgatggcactgtgcctgtctgttctgcacgacggaggacaagttgtgggttgcgtttccgcgtcatactccgtctctgccaaaataaatgtagtttttcatatcttacgttttcgtttgaccgtttattttatttgcaatttttttacgattaatatttttattgttatttgatgataaaatataaatagcactttatatgtgactaatttattttaattttctcataaaatttttaaataagacggatggtcaaacgttggatacggattcccataactgcacttattttgaaacagagatagtacgtacctagctagagtaagggcagttaggccttgcagtgagcggacattggttttggttcgttgtcataccggagctaggtcaatttatcatacccattcccccgcgaggctcctcatgccttagcaacaagctaagatagaggcacggtttgcgagccgtgttgggcgaggccatgtctctgtgacatggtctcgcccttcttattatgaagcttataatgatgtcagcttaattcgtcagatctaaaatgatggcgcaatggatgaaatcaggaaaaacggaacatgtatggtggagaagaaagatggacctaccaccacggatatcaccacatgaatgcaaaggagaaagaagatggatctaccaccacaggacactccacaacctccttctccctcctcacccctacccccaccagccggaaaagaagaaatataaaatgtcaggggctgacatgaaaaattaaagctaccacttaaaaccaatttgtcttatattcgctcaataaaaaaaccatttctaggatggagggtttttttaagacggagggagtagaagagatatggtactaacctacgtggtgcacactctcttctcagtggccactcataggagtagcctcgtgtagttatctctagagagatggtatagattgctcccatagtgcaaatatagcttgagcccgtaggaagatttttatttcactttgtttatttgcccatcaatccttccgttgattttatttacaaccttatccaaaattgtgctgttagcacccttaattagacaaaataatttataaaaacctctaaaataaaaataatccacattcttactagtcattcttgctcccctattccatcatctttggccaccctagctcgttgtcgctggctcctcctcctcgcctccatcatatctacgcaccactattccaccaccacttccccgtctacggtcgttgtcgctttcccctcttattaggcagcaaattggatggacaagcttcgtggctgcacaaatcaggagtagcttgggtcgacaagctctgccgagttgggggcaactacagctaatggatttggcgttgttatagattggaagcggttcggactaacaagctccacggttggagggagttacgaccaatgggatttagcaatggcttgggccaacgagctccacaaaggcttcaaccaatgatgtctttggcggcaagggccagtggcggagccagaatttttccaaacctagggctcaattagttgaatgtatataattttgcctttatcttctagcttttgaagttttaaaatggaatttcaatgaatacttaggatcaggagtagggctgcagccctagctgccctactcttgtctccgcccctagcaagggccaaatatagttcttagatcttggcattgcctatccacaaatcgccaccgtctttagcaagcttgggcacttgcgacgtcgtcctattggtggcgacaacctcttctcaacagcgacggtggtcggcggaccttcctaatcatacgcgcattagaggtggcttattcctagtcttcattctcttctcctccatccctgtttgggacataacttttttcatggaaaacttgtggcttgtagaaggtactcttgttgtcttacactttgtaaacaaacttcaaagtcagtccctttcctccatgatggcatccgagcctacgtgactagtggggttactcctcttaggccatacacagtaaacgctctaatgtttacaggatgtctggatctaagattttctaatttttagagatttttttattttactttcaatgaaaacatcacctatctcatcgtgcacttattcgttcatcggctacatccaaaatttaggttttaaaaattaattttaagctaatttgaagctttctattacaatctatttttcatacttgacttttgaaccgtgaatactatcgatatggaagtcttacatataaattatttttattgcttagttggttttacaaaccgtagtctaatcaaggactcctttaatcaatcatcatagccgaattcgttggttgaagttttcccaatcatccttttatggaacgtttctttttctaaaaattctcacggctccaaatagaggtccttgtagaaaattgaatgtgttgttgcttgttgttggactgggatactatagagctcaaagcctcaaattacgtgcaagacgacgttcctactcctgcgtaccgctcgatgttggttggcctacgatgttttcgtgtcaaacttggtggcgcacgcacacgcacaccaagtcgatctctcgctgtcctacatggtcgatcggatactgtcagttttctttgtcctctacgcacaccaaagtcgcctactgctgcgcgatatacactgccaacgtactgcaaggatcccgaatcgatattggagtatgggctagcagtggcactgtggcagctcccggccggccctagctagcgtatgtcatgtcgttttacaccatataatttccaacttgtcactaagtgccggtgcatgacgtacctgcatgcagaggtttatactgtactgtactattcctatgtacggatccctccgttaaaaaaaaacgaatataggacataactgtattatttagaccttcaactccaaatttcaactttcgtttttcgttagcacactttttaaactgctgagcgatatatattttttaaaaaaatttcatatagaaattgtttaaaaaatcaaataaatttattttttaaggttacaataattaatacttagttaatcatgtgtaagtggtctttcttgttttgcgtgccctgaaaaattttcttcctacccatgaaacgaacgaagcgtaataattaatacattcgccttaaaatatcaactctagttcactacgaccatgaaaccccttttacactattaacctttttctttttttttgcaccattggattatagagatatgtggacatttttcaaataactgcccgcctatcaatgtattttttgttttggtccaagggctcgtcttcttctctctgtatcatccctctctcgtactgagtaaaaaaaacactcatgcttaacattaggagtatttacttatcacttaaaaccaagagtaaagtttttactctctgtggattttgagagtaaaaatattacaaacggttgaatcttatcagtaaaaaattacaagtggttaaatttaagagtaaacaaaatacacacaaaaaaaagtaggtggcagcaaggtcacaacttggcgaggtagctgcggcacatccacctgcgatctcgatgacagtttggtaagggataaccgagaagacaatgctaagaggtactgtggcgttgcgactagcgggagctagcttccgagccaacttcggtggcacatgggcgagtggatctggggtggcgcagcatgcgacgaggagcaggacaggtggggtgaggaccaggagctctcaattcagtgtccgggatgatgaggtggccgctgcttgcacatcttgccggtcaccggcgctgcattggtcattgctgctgccaccgctcgcatgcctcgctagtggccctaattccttgtgttgcctctcgcatgccttgctgttgtctcggtggcgaaaggaggtgggagagcgagagatgcagcgtgagagggagaatgggtgccagggactaaatgcaaaaaatggtgagaaaggaggatgtcatctggtgcacatatgttagatctaacggtgaagatgggggttgcgtgtttccacccaaatgagaggttgcatctgaaactttccgcaattacaatggatgccaagtataattttgttttggttagtttagttggtaacatataacatatgaagaaatcacaaatcccagtcattgggagtggaggatgcgcggccagtgcccatataccaccatcaccgtcatcacggttgcatttgctgtggacgttggtggcagccggtacggagctgtgctggtgggtcgatggtgggctacaaaggtagagtacgtgcgagcggcggtgcggctaagcattgagccctacagtttgcggacgtccgcgcagcggtgcagtacctgcctctgcggctctacctagggtgcgggaattgtgtattactttgcatcattcgaccatttcggtaaactgatatagactatcaactgtcctattacctctgttttatagtgttttatatcataagccgctttgatttttttcatagtcaaacttttaagtttgacttagtttattaaaaaaaatatagcaatactttcaatgcaaaacaagcatattatcaaaatatatttaatattgtgtttaataagatatacatgttactaaattttttatatgaacttgtttaaatttaaataaattcaattagaaaaaaattcaactgcgacaatatgaaacagagggagttcagttactgcgagtcgataaccaaacttttttggtctcggtcatttccacgttttggtgtgagtttgtttggttcggttatttttagccagccctatatgtatagagcaatagttaatgaacgcatgcacgtattaaccacaccctaacgttggaaatattaataggcctgatgcatgacaaattgcatgcgcgcacctgtgccggggtcgttgcacgtattctcgcgatcattgccgaacagtcaatgtcaattatatcgacggccggtttgcgttagcgtttgcttaactagtgtactagtactaaatagaagtattgtactactagtatatgtagcgtattcatcgtgaggtaatgatatgatgtcgatcgatcgatcgatctaccgacctgttgatcatcagtgactgaatttaaagctgctttttatttgaaaaccattgctatcttccgtccaagttacgtatgtaccactgccgagcagttattttgcttttttctaagaaaaataaaaaataatatgattttttattgttttagtttctagtaatatgtaaaatttactagctcttctacgtcgtattaaagttgctagtcacattcatagtatgaaaaatttctaaccatgccgatatcattttcaataataaaaagtactttttagaaatttacaaaaatcaccctataagctagaagtttgatgtttcaccccataaattattttgttgaaaatgcctgcccacctacttagttttgtatcaaaaccacctcggtatgcacgtgtttaaccgaatcaacgtgttttcataaattatgagccatcaatgtagtctttaccaaatttaaatacttcaataatatggtcttaatactttttagagattccataaataatgagagcttaaatattgttgaaccaagtttcacaatatgcataaaatagtttaataaaacatgaagaataaatataatgtaagtacttggataagattgactcgattagcatggcgtgtggtatatctatatcaacgataataggctgatttggttaagtacgtgcgtcctaacatgacttttacaccaaaacttagtaaaggtgtgtatttgtaacaaaaataacctatgggatggtttctgtaattttctcttttttctcgaccgttttcatccctgaatacacaggatacagacgatgaaaaatattacgccatcgatcgatctcctgtgtcctgtccaattaaaactcgcgggaagccggcccaatacaggtgttggcagactggcagcacgcggcccacgtacccttcatgcatgaacggaacggctcccacttttgagtcttttgatccaccacaattttaagcacaatatgtcaataaggttgggttcttccttccattttcccaacccacctctctccattttcacgcgcacacttttcaaactggtaaaaagtatgatttatacaaaaactttgtatatgaaagttgttttaaaaaacatattaatctattttttttaaaaaaatagttaatacttaattaatcatgaaataatacgagcttcgttttacgtgccgggggagaaggagttcccaacccatcctcccgaacacaaccttagtccacttgctatacctcaacctcgattctacgtcgagtttgtttgaagccccttatctccaatagtagaaatcttcacccataaactatacaaaaccatgtaatttgggtccgataatagtatagatgtttgattttgctgacataatatcgtagtcagtaaagtaaacataaaaataatatgtgcgtcccacatgtaactgaagtgagaagaaaaaatattgggcccgcgtgtcagtcccatcacctttcttctcttttcttcctaagcctgggagatggggggcagccgataggacgggagggggggaggaggaggtcggtgagcctgggagggagggagagagaccaaatgcgccggcgggagagcggggagaggaggtcggcgagtctagaagggagagaagaggataggaggttggtgagccttggagggagagagggagagaggcggtcggccgcaccggcgggaaagtggggagagacggtcggcgagcctaggagggagggggaggcaccggtggaagagggaggggagaggtgaccggtgaggttgggagtcatgttcgctgccgctaccgcaatgacgacaaagacgatgacgcacacgcgccactgcgcgcgcccaccgttccaccaccagccccgtgcacgaaggcagcgccgctcagctccagcccgtgcgccatcattgccaaggagacgaaaaccacggagcgcagctcctttccgttaagccactgcatgacgcggtcggcctccatgcccacgctaacattgccacctccccctcccccaggctcgccagctgcctctccccccctctcccactcgctgcatccccctctatcctaggcttgggaagaaaagaggaaagatgatgcggttgatacgcgtgccccacatattttcttctcatttcactaacatgtggacctcacatattatttttattttgctgactaggatgccatgttagcgaaacctagcaaggctagcatccatactactataggaatgagatctaaattgcacggttttatatagtttaaggttgaagatttttggtataggagataagagatgtcaaataaactaaacgtaaagttgagggacggcaaatggacttttttccattttaagcagcggcggtagggttggtaggtaggaagatccggcgccatgtacaaacgtcgccgtcggtcggtatcgttttccatcttcgacgtacacgttgatgttactaatacgtagtactggtaccacatggcagttagacacttaaacttggcgcctggatctggacatgccgacgtagatcggtcatcacacgttcaaaccccaccctgagttttttaaaatgaaaggtagtccctcggtttcacaatgtgactttctagcattgcccatatacatataatgaatctaaacatatatatatatatatatatatatatatatatatatatatatatatatatatatatatatatatatatatgtctagatttattaacatctaaataaatataagcaatactagaaagttttacattgtgaaatagagaaagtaacagacagtgcctacttacttcctccatcatagaaaaaaataatttctgcatatgtttagatacatatatagtcagaagatgattttcttttcttacgaagggtgcatctcacagtgcaacctgtttttatatatatttgttgattggtgagagacaatttcaactccgtacttggtaccttaataggtgtagcggcctattgaaattaagtacacgtatggttttctttatttatgattgttagttggtgtgcaacgtcactatatctgtatcttaagtttgtatgcgcatgatatatatgttcatctaatgaccatcccttttatcaatatccatcgtttatcacgctatatttcatgtctagctttaaaaatgatcttattttcatgggctggcaagtttcaaatttgatccaaaatattctttgatttgctaaccatttttttcaaaaaaaaaatcaaatttctgaactttcaatccatacgtaggtttgtggtttggctttttttttttgattcaaggttccataaccattgccaagagtgccacattatattttgatcttttggccggggtcggaagaggggctttaggtgtgggatatatagaatagatctccatgttcggagggaggtggctaaccaatagcacatgagcatgcttggaagcaagcggtgcagggggatgaggtcggtaacacgtacaacaagaactcaagtggctgggaggtgttggcgtcttggcgagatgtggtgctaagtgttaacaatagtggaggcttagtggatgggaatatcttagctaaagctgcacaaaacatctggtttgaagtggggggataattagtagggaagagggaattgagtgagtgagagagagagagaggaggtggctagtgaagcatgtggatgttatcaaggcaggggttgtgtctagaggaggaagggtgacgtcatcgtgttgcaactttggataaacggaggaaagccattgacagagacagctcccaggcaggtcggacaacctcccaagctccaccgctgccatcttctttgcggattgtctttcgacattaaaaaatcacagagaaacattgttagccgtttggatttaacaacggtattggttccgcccctaaagaggacgagtacggtgagggatttttttttccttaaaaaatgaagtacaggtagacactctcatttatttttcttgaccgaaaagtttctccaatatgaatttggatttccctccgacagtagcttctagatcctaacctcgtttggatgggccaaaatcctgacgaggccacgtctatcagtgatgatttccatcggtttttctgaaatgtacagctgcaccgaaatctcggccaaacggaaaacgggagttttcaactttgtgctgaattttgtcaattgcattgtcggttatcgaattgaaactactccgaataaattctgacaattggttagaatggtttgtcaattgcgtttgttcaatatctgcgctaatcgccaaatctcccccaaaatcttacaaagcaggggtcgacgaggcggaaacgagaacgacccggacactcacaacgggcaggagtgggtctcataataagttcatatttcatgtatccgtttaacctaaaaataagttaatttttaacaattattgtattattccatgcttccaaacgtataagacttattccattcttttgtttttttaaaaaatctaagtccaatttatagttactatgtgttaaattaagttgttgattagaacccaaaagccattgagggcggctagggaatgtatcccgtctgaacgggatacttgagattgacatcaatgctgacgtcattatacgtacgcggtaccacgtatgatacctacactactacgaaaacgatttttccgtgtggtccaaaagggttttcgcgtgcggatctcccgcccatctgcattgaagtgtcagcaaaaatccgattttttcgtgcgcacgcgaaaatctaattttcacgtgcgggtggcttatgtcgcaaaaaaaaaaaaaccaaaccctaacccaagccgccgccctcctcgtggtcgccgtcgtcggcggtggcgttgccgccttctgccgctaccggccgccgcggccggctcccagcagcgtcgctgccgcccaccgccgaatctgggcgggagaggggcgccgccgcccactgctggtcccggccacagccagggttttaaatttcaaaatacgattttatgccagtggggggcgaaattaccgaaatttcggaaatttctagccgaaattatttgaaaatttgactgaatttgaataaaatttgaccaaattcacaaaaacttgcaaaaaaccaaaaatttcgggcgagatttgagtatgccggtgggggtgaaaattaccaaaatttttgaaatttctaaccgaaatttcaaaccctggccgcagcccacaagcgaggccgtgctaccgtcgcccgtgagagacgagagagagatagaagaaatgaggataacgatgagtaggtggagaggataagatagaaatttttgaagtggttgagaggggaaaaatacctgaggagggtatttcgcgtgcggtgctcttaagatgcccgcatgcgaaaatttattttcgtgtggtccgcttgcaaaaataggtttattttttgcgtgtggactcttaaaaggcccgcatgtgaaaaccgatttttgtgtgtggtcctcttaagggtccgcacgcaaaaatgggaggacaatttttctagatgcggtcagttatggaccatatggaatctaacgaggggctcgtacaggaaaatcgttttttagcagtgcaattagttccaagacatgatatttgtgtaacaggtcagataccctataggtatcatgtcaaggtacaaaaacatgatacttaagtaacaggttagataccctataggtattacgtcaatgctgatgtcactgtatacgtatacggtaccatatatgatacctattggtatcgaacatgatacatgagtatcaagtatgatactttatgagtaccaagtatgatacctgcatgtaccagccatggtacctgggtaccaagttggtacctgtaggtaccaagtccgatacttatatataccagacttggtacctgggtaccaggtccaatacatataggtaccaaagtattatgatactactaaagtatcatagcacactaagaaccaaaaatcatatcttaccaagacagagctcaattaaaccaacaaagaaaattgattccgggaaaaaaagtcatcatagtggtagaaacacccatagaacatgtagaacaccccaagatcaaacctcaaacccaagccaacgcaaaagctcgggggtcacgagccaagatctaaatatatggatccgcaccacaagaggccttgtcctcgatgatggtgacctcatcgacgatggccacctcctgaaacgtggtgagtagctctgtcttcgtcttgtgcttgggtacctaccccacgataagcttcacgatctcctcctctacttcgcccacacctccagcgacagcagcggcgacaatggtggcggcagcttcctccactcccgacgtgccatcctgaacggccagccgtcatcgtcgcctctttgctggtggtagtcagagagagggagagagagagagagtgaaggggaagagataaaggagaggataagactgaatatgtggttggcgagcgagaggatatttacagtagtagttatcccgtacactgtcccatagtttttctgaaaggcatttgattacttattggttgcatgttcattagtttttctttaggaaactacggcgggtttgaacaccagcctgaactttattcatatggtaaataaactttacaaaggggggaggtacagagggacggggagaagaaactatcattagttttatcacattgtgaatgaattaattacttattagtcttggtgccaaaagaaataggtcttagatgctgacggagcgtggggctcctcaccgggagaccgcgcaggcccctctttgccggttcggccgggggcgctaagtgaggttcttcgccctcgatcgatctggagaatgttcgcgagagagcaagtgcacgagacacgggcgatgtagacaggttcgggccgctgagaagcgtaataccctactcctgtgttctggtggatctgtgtgtgaaggatttacagagagccggagagccagagagttcaggctccagaacccctctcgcctccttttttttctttttttttttctttctctttggtgggcaaggtcctccttttatatctcaaggggatactacatgcaccacttctacctacttttcttctgggtggggacctaccctctcttgaccaaaacttggcttacaccttcgcctggaagctaaatcacaacttgtccttgagtgaggctcagcgccgtctctcgcctgacaccggggatctccctgttaccccctcattaatgggcggagatttgccatggctgctttccaaatgaccatccgacgagatgggtcatacctacctccactccaccggaggcagatgcatcgtgggagcacggttgtctgccgatgacgcgaccggcgtcagaccagtcacagaccggtcattcttgtccaccacgtgtcagttcggcatgctacacgtctgcccttcttcatacaatgacttccttgcaatggttgcgatgaagcctggaatgtatctggccggggctgacatgccaactccaggagttcccacgccggctccggctagggacgagtgcctggaggctctcatcattccgacgggacggggcgaggcgtgtgtcaggccgcctgttgccacctaacccgcgatctgaccggtctgtgaccggtcacacactgtgacctgtcacggaccgaacgagtgtgctgcgctgcattaaatgcggcgtggggcgctcgtccaacccgcaataaacgcggttaggtgagcgccgctgtgctcacctaacccacacacgtggcgccaaacccatagggggtcggggcgccccagccctcggggccgaaacgggagcggcccgacccctcgggaagacagagggaggggcggccacatcaccctcgggcccgacccccccgagggggtcaggccacgtgggtgactgcagctgctccaaacctctagtcaagatacccccggtcccatgtcactgacagtagcccccggcgttacgccagggcgatcgcccccccccccccgagggaagcgctcgggcatgacgccactccttagacctggtgacaggtggggccggtctccacaggcggcagaaacccagcggtcgcaaatcgcgcacatcgtcaaggaaaaaaccgaccgataataatgagcggcttccttcaagaccactacattacttaagtagcgcgcgaaccgggacgagccggttcgtttcgtctggagatgtgatgacggtgcatcggtcggcgagcgtagttaacgcgcgcacgattagtcccatctcaactgccacggccgcacatccgcctcgtgcgccgcaaacgggcgagcgggattagtggaggcgcgggcgcgagagacgagggggcgaggtagtgggcgcggggatcgaggagccgggcatagcgttggcaagggtactaagacatcaaggaagggacttgtttccttcctctcgtcactcttccctttgcctttgccacttgtgctctgactctccatttccggcgccctacccttgccatactcgctcgctctcaagctcctcctccgccggcgtcatggcacggggctccgcaccgctcgagggtagcgtgctgccgccttcccgcatcgtgagcgagaggcaggccgggctgccgcgccgattcatgccggaatctgccaccggccgggaggtggtcgcgctgggcgagggacgcccggcgccgcattacccggggcggtccgtcttcttcctctctttcgcaatggcagggctggtcccgccattctcttctttcttcatggatgttctggagctttatgatctccagatggcgcacctcacccccaacgcggtaatgacgttggccatcttcgcgcacctatgcgagatgttcatcggggtgcgcccatctctccggctgttccggtggttcttcaccgtacagccggtgtcgccaccgtcggtagtcggtggctgctacttccagccgcgggggccggtgctgaaccgctacattccctgcgtccttcgcaagaagtaggacgactggaagagcgactggttctacacccctctcgccgacgaagcgcgcctccgacttccgagccagcccccggcgcaggcctccagctggcgggcgccggtagatctgggagatggctacgacgccgttcttgaccgcctggcgggtctgcgatcccaggggctcacgggggccatggtgttcggcgactaccttcgtcgccggatcgcgccactccagcggcgcgcccggggcgcctgggagtacaccgggtccgaggactacatgaggacccaccaggggggcagatgggactgggcccctgaggatttcaagatggtggtccaacgggtgctgaatctcagctccgtggaggcatccctcatcccccaaggtgtcctctccctctgcagcgatccagagcgcgccaacatcctgaccatcatgcaagcggtcggggcgtcaggggagcgggctcctcgaggccacgatggcgcgggcgggagccgcaggggggaacaatctaccccgggagggggtcgtgcttctgggccccgtgatgggggcccggggggcagccgccctgccgacgcccgggggaagaggaaacaggaggataccccctccccatctcctccccgagggggcggggcggtgcgtgccagcagcaggcgcccggagggtgctgtgccgacgtcgcagcccgagggggagcgaaaaaagaagcggctccgcaagatgggggggaccgaaccatgccggggaaacctcatctcccccccaaggtggtcgtttagccgacctcctcgcaggttcgtccccgcgcccactgcggccgtattcattctcccaaggtgagttttcacttacccgttttctttttgtcttctggtttttcttccgctttcagcgagattccgtcgcgcccccctcgccattccaagtccggccagtctgaggccgaggagacagcgaccgcggaggcccggaggcgggaagctgtccggcgagaagccgcggaccgcctccgggaagctgaggaggctgcccaggaagccgtccgggttcgccaggctgaggaggccgctcaggaggaggccagactccgccgggccgggaagtcagcccgggaggcagaggcgacacgcgcacgccaggcggcctgccaagcccccgacccgactccgcccgaggcaacgacgacttccgaggccacccacgacgaggccgcgggcgcgccgctcggacccgacccttcgggcgacgttcgggacgagccagcctcgggggacgcccctgagtccggcacgtcgattggcgggccgagccgcacagcgcccacaccaaggcagctctcccctctgccttccaccgccccactgaacacagagcccctcctgcaggccctggccgccgcgaacacgacggtgctggacgggttaggtgcccagatggaggtcctgcaagcagagcgggcggaactcgacgcggcgtgggcgcgcgtcgaagaggggcggcgctcggtggaggccatggtggaggcgggccgcaaggcataccgccggcacgcctcagagctcgaggcccgtcggtgggagctggcggagatcgccagggaggtggaggaggagcgggagactgccctcatcgccaccgccgtgctcaacgaggcgcgggacgatctccgccttcaatacgggagccgggtggcggagctagagaagaaactcgacgccgcccggggagtccttgacgccgccactgcacgggaacggcgggcgacggagaacgaggcggcgtcccggcggcgcgaagtggcccttgaggctcgcgccacggcgctggaagagcgcgcccgcgcgagggagagggacctggcggaccgcgagaccgccatcgctatccgggaggcaacgctggcggcgcacgaggccgcctgcgccgaagaggagtccgcactccgcctccgcgaggacgcgctcaccgagcgggagcgatctctcgaggaggcagaggccgcggcgcagcggctggcggacagcctgtccctccgcgaggcagcgcgggaggagcaggcgcgccgtaatctggaaggcgcccgcgccgagagggccgcactggatcagcgggccgctgagctcgaggcgcgggcgaaggagctggacgcgagggcgcgcagcggcggggcggccgcgggcgacggcgatctagccgcccgcctcacagctgccgaacacaccatcgccgatctgcagggcgcgctggactcgtccgccggggaggtcgaggccctccgcttggcgggcgaggtagggcccggcatgcttcgggacgccgtctcccgtctagaccgcgccgggcggcaagcgggcctctggggcgagcggaccgcgaagtacgccgccaaccagggggggcctcgcccagcgcctctcagagatggccgggactctccagcggctccccgaggagctcgaggagacgatcaagtcatcctcgagagacctcgcccggggggtagtggagcttgtactggcaagctaccaggccagggacccggacttctccccgtgggcagcactggacgagttccctcccggaaccgaggacgacgcgcgcgcgtaggtccgggacgccgccgaccacatcgtccacagcttcgagggtacggcccctcggctcgcgttcgccctcgactccgacgaggagggcggcgacggtggtgtggacgacagcgaccacgaggccggcgacccgggagcctcgaagtgagcccccaggcccccgccaatcttaaatagtttttcctttcttcttccgaggccttcgggcccccttcttgtataaactaatttaatctgcaatcaaataaagaagaaatttctgtgtcaattttatttgttgtgtgtatgagacgaggatggtctgtgccgcggtccttctgtgtcttggcttgaacaagggctcgtgcccaggtcccagcttcaaacggcgggggtcggggctagtgcctggggagatgcacgtgtcgagactagccaggccgggagcgtggtgactgagggttatggggacccgattgtgggcctttgccgattcccccccggagttcaccactccccggggcacggctcggttctgggccccgtttggcgatttccgccggcccgggccaccgagggcagggtcgagcacgagcgtgctaattcaagccaaaactcttcaaaaggaaacaatggcacagacacagtccttaggaaatcgaaaaagcttttattgaaatacggaagagaaaaaagataagtatatgcatatgtggtagcccccggccaaccctgcacgcccgaggggggtgcggggttggcccgagcccgagacctgacacccgacccccactaggggtagaaacgacgaaggtgttcgatgttccacgggttaggcagctctgtgccgtcgcccgtggccagccgaacggagcccggccgggggacgccgatcactcgatacggaccctcccacattggtgagagcttactcagtccagcacgcgtttggacgcggcgtaggacgaggtcgtctacgcagagtgatcgggcccggacgtgacgctgatggtagcgccgcaggctctgctggtagcgcgcggctcgaagggccgcgcgccgccttcgttcttccaagtagtcgaggtcatctctgcaaagctgatcttgatcagcctcgcagtacatggtggcccgaggggacctcagggtgagctcggatgggagaaccgcctccgcgccgtagacgaggaagaaaggcgtttccccggttgctcggcttggcgtggttcggtttgcccagagcaccgctagcagctcctcgatccacgagtcgccgtgcttcttgaggaatttgaaggtcttggttttgaggcccttgaggatttctgcgttggcgcgctccacttggccattgcttctggggtgggtgggagaggcgaagcagagcttaatgcccatgtcttcgcagtagccaccgaagagctcactagtgaactgggtgccgttatccgtaatgatacggttaggcaccccaaaccgagcagtgatacccctgatgaatttaagtgcggagtgcttattgatcttgatgaccggataagcctcgggccacttagtgaacttgtcgatagcgacatacagatactcgaacccgcccggggcccgtctaaacggacccaggatatcgagcccccagacagcaaacggccatgaaagaggtatggtctgcagggcctaggccggctgatgggtttgcttggcgtggatctggcacgccctgcaccgccggaccaggtcgaccgcatcgttgcgagccgtcggccaatagaaaccctgacgaaaggccttgccaaccaaggtgcgtgaggcagagtgggctccgcactcgccttcatggatatcggcaagaagctcgatgccttgttcccgaggaatgcacttcaggatgactccgttagccgcgtgccgatagagggtcccttccaccagcacgtagtgcttggagatgcgctggacgcgttcactcccttcgcggtcctcgggtagagtcttatctgcgaggtacgcctggatctcagcgatccaagcaatcaatctaagggagctgggagcgctcccctcgggtcccgaggcctggactccgacgggcctcgggggccgttcaggcgcgtctgtctcccctagggggtcgggtcgcgccgacggctgggcaagcctttcttcaaaggcgcccggtggggtctgggctcgcgaggaagcgagccttgagagttcgtcggcgaccgcgttatcccgtctgggcacgtgccgaagctctatcccgtcaaaatggcgctccatacgccgcacctggcgcacgtaagcatccatctgcgggtcagagcactggtactccttggagacctggttaacgaccaactgagagtcgcctaacaccaggaggtggcggatccccagtccagccaccactctgagtcccgcaaggagtccctcgtactctgccatattgttggttgcccgaaagtcgaggcggaccaggtatttgaggacatctccgctcggcgaggtcaacgtgacccccgcaccggcgccctgaagagacagggagccgtcgaactgcatcacccaataggcggtgtgaggcagctgcgaagggcccgagctggcctcggggatggagacgggctcgggagccggtgtccactctgccacaaagtcagcgagggcctggctcttgatcgcgtggcgtggttcaaagtgcaaatcgaactcagagagttcgattgcccatttcaccacccgtccagtaccctctcggttatgcaagatttggccgagggggtaggacgtaaccaccgtgacccgatgcgcctggaaataatggcgcagcgtaaagcatcttctgggcctgagggtattgggtcttggcgtcccggagggcctcactaacaaagtagacgggccgctgcaccttttgtcggggccgatcctcttcgccaggggccgcatctccagggcgcttttcgtccgagaggccgcgcggggcgcactcggcttctgtgtcgacgacctcggggtcggaaggcgacaggcgcggccttcccgcagtggccccggggccatcctgggggtcgggggctcctggcaccgtcggacaagcgggcagagggccagctccggtcgtcgggggcctcgggccgccgttcggctcgggggcctctcctccctgctctctcccgggtcgagtcgatacagggtgctctttgtccgagaggccgcgcggggcgcactcggcttctgtgccgacgacctcggggtcagagggcgacaggcgcggccttcccgcagtggccttggggccatcctggggtcgggggcgcctggcaccgtcggacaagcgggcagagggccagttccggtcgttgggggcctcgggccaccgttcggctcgggggcctctcctccctgctctctcccgggtcgagtcgacacagggtggggatgcgcggagcgagggtcgtcctcgtcgcgctccacgaccaacgctgcgctgaccacctgcggagttgccgccaggtagagtagcaacggctcatctggctccgggacgaccaggactgggggagaactgaggtacgccttcaactgagtgagggcccattcagcctcctccgtccagataaacggcccagagcgtttgaggagcttaaataggggtagcgccttctctcccagcctcgatatgaaccgacttagggcggccatacagccagtgacgcattgcacatccctaagcttgctgggggggcgcatccgctctatagctcatatcttctcggggttggcctcaatgcctcgggcagagatcaagaacccgagaagcttgcccgcaggcacgccgaacacgcacttgtcggggttcagctttatgcgggcggtgcggagactttcgaaagtttccgctagatctgagagtaaggtctcctggttgcgtgttttcacaaccaagtcatcaacataggcctcaacattacgtcctatttggctacccaaagaaattcgagtagtacgttgaaaagtaggacctgcattgtttaacccgaaaggcattgtcgtataacaataagttcctatgggggtaatgaatgcagttttttcctcatcctccctagccatgtgaatctgatgataaccagagtatgcatctagaaaacacaaaaggtcgcaccccgcggtggagtcgacaatctgatctatgcgtggcagggggtaagggtccttaggacatgccttgttaaggtcggtgtagtcgatgcacatccgaagcttgccgttcgccttgggaacgacgaccgggttcgccagccactccggatggatgacctctcggatgaatccggtctccagaagtcgcgccacctcctcgcggatgaaggcttgacgttccggggcctgccgccgcactttctgccggaccggccttgcgcccggccgtacggcgagacggtgctcaatcacctccctggggaccccgggcatgtccgccggtctccaggcgaagacgtcggcgtttgcccgcaggaaggagacgagcgcgtcttcctatttgtcgtccagaagaccaccgattcgtgtggtcttggacgggccgtcgcccagggcaacctgcttgatcgggacctcgtcgcacgtgatcatccgctgcctcggggcggctgggacggaggtgctgagcctctcgtcaccacccgcgggcttggatgccgcggcgaggtggtccgcgcgctgctccatgcaagcaagcgcgactttgaggtcgccatggacggtgatggggccaccggggcccggcatcttcatctggagataggcgtagtgtaccgccaccatgaacttcaccaacgcgggcctccccaggaccgcgttgtagggcagactgaggtccgccacatcgaagttcacccgctccgtgcggaagttggcggaaccaccgaaggtgaccgggaggtcgatatggcctagcggccaagtgtgccccggcgtcacaccgatgatcggctgggacggccggagcaccatccccggggccttgatggcgtcaaaggcagcgggggaaaggatgttgagggctgcacccccgtcaatgaggacacgccccaacttcacattgcaaacggtgggggaaaccaccatcgcgatctgtcctccccgggcaacgcacggtgggtggtcggtttggtcgaaggtgagggcaacctccgaccaccgcgcccgccgcgtcgcctcatgggtaggggccacggccagaagctctcgcttcatggccttgaggctccggcgagaagcgtgagcacgcgctcccccatcaacggtggcgacagtggcctcaggctcctggaaccctaggtcatcgtcgccatcgttgatgtcctcggcgggggccttctgcttggcctcacctcgccggttgccggcgggagccgccggggtattgccctcacggcgctcctgcctcctctcctcctcccacttcctcgtccgctcagccaaacttttgaccgcgcggcagtccgcgaggtcgtggagggaggtgttgtgcacggtgcaccacttgccggtcgggcgctccctgctaggagcgccggcctccttctttttgtcgctcgcaggcctcccctttcgggtggcccgcaaagcgccctcgacggcgaggacgtgaccctcgtcgtcggaatgggccgacctcttcttcctcctcctgtcccgtcgccctgaccgagcggcggatccgggggcggccgaagctgccacaccggaaccggaggagttccaggtccaggcctcctccttgcgagccacacggtccgcgagctgaaaaagctccgcggtggtctggggctccttggaggcgatcttctcgagcatgcggttgtggcgcacgccccccctgaacgcgtagatcaccgcgtgtgcagggatgcacggtatggtgttgcggacttgacaaaaccgctgaatgtacgagcgaagagactcatcgtcccctcgctgtaccgcgtgcaagtccgcttcttcacttgggcgcggatatgtgccttggaagttcatggtgaactgctggcacaaatcctcccaagagtggaccgacgcgggtggcaagttcattaacccaccccgcgcctgtcctttcagggccatggggaagaaattcgccatgaccctgtcctcacccccgggcggcctgatcccaatcgtgttgatctggaaaaactccgcggggttgacgcttccgtcctatttttcggtgatggtgggccggaacttgggggccaacggacgttccgaaggctcgccacaaaggctcgacagccggcaccgccaaccggggacacggggggctggcccccgtgcccggaccgaagtggcgctccggacgaggaagcgccctccgatgcgtgggcagcacggcgatcattgcgccggcgcttgatattgaagcgggcatctggccccctacgcacatcttcttgggttagaggcgttgacgagggaatggcggacgaacggcgggtaacggccgccgctcgcggcgccctccgcctcgacgacacggagccagcagtagcaacgccagtggccttagtggcggaggaccgccagccggcgcgtaggcgctgctgcgccgtcatgaccaaattggccacgtcatctagccaacgtcgggttggagtctctggatcagggatgacgggcgggtgacgcaggagcgcgcccgcagcctggagcgcgccctggggcgtgctgccatcaccgtagacgaggagacgacgctccccgtctcgccgtccttctccatcgcccgcgtgcggcgaagtcgcggatctttcgacctcctcgagcgcctcctcccgcccaagacttcggcgagagagggacagtggagtacgagctcgacggcgcgggttctgctccccgtcttcaccgctagcgctcggagagagattgtgcgccactgcccgttcggccattgggctgagcgggagaagcttggcgcacacgaaagaggacgagggcttagaaaaacacacgcaccccctacctggcgcgccagatgacggagcgtggggctcctcactgggagaccgcgcaggcccccctttgccggttcggccgggggcgctaagtgaggttcttcgccctcgatcgatctggagaatgttcgcgagagagcaagtgcacgagacacgggcgatgtagacaggttcgggccgctgagaagcgtaataccctactcctgtgttctggtggatctgtgtgtgaaggatttacagagagccggagagccagagagttcaggctccagaacccctctcgcctccttttttttctttttttccctttctttggtgggcaaggtcctccttttatatctcaagggatactacatgcaccacttctacctacctttcttctgggtggggacctaccctctcttgaccaaaacttggcttgcaccttcgcctggaagctaaatcacaacttgtccttgagtgaggctcagcgccgtctctcgcctgacaccggggatctccctgttactccctcattaatgggcggagatttgccatggctgctttccaaatgaccatccgacgagatgggtcatacctacctccactccaccggaggcagatgcatcgtgggagcacggttgtctgccgatgacgcgaccggcgtcagaccagtcacagaccggtcattcttgtccaccacgtgtcagttcggcatgctacatgtctgcccttcttcatacaatgacttccttgcaatggttgcgatgaagcctggaatgtatctggccggggctgacatgccaactctaggagttcccacgccggctccggctagggacgagtgcctggaggctctcatcattccgacgggacggggcgaggcgtgtgtcaggccgcctgttgccacctaacccgcgatctgaccggtctgtgaccggtcacacactgtgacctgtcacggaccgaacgagtgtgctgcgctgcattaaatgcggcgtggggcgctcgtccaacccgcaataaacgcggttaggtgagcgccgctgtgctcacctaacccacacacgtggcgccaaacccacagggggtcggggcgccccagccctcggggccgaaacgggagcggcccgacccctcgggaagacagagggaggggcggccacatcaccctcgggcctgacccccccgagggggtcaggccacgtgggtgactgcagctgccccaaacctctagtcaagatacccccggtcccatgtcaccgacagatgcgaaagggcctttagcctaatggttacaagaaccacagtggtacctgaggtcctgggttcgactccccataggagcgaattttccaggatttaatggcgtttgtgctttcagtggtaggcgacgtacccgtcgacagcgaggcgcctgtggtgacttcgtcaatctctccagaatttgccgacccagtcttcaaagatgctcataggggtagggtggccagcgaggcgcctgtgggggtagggtttgcatgcttgagttcatagggtacgtcgccagaatttgccgacccagtcttcaaagatgctcataggggtagggtggccagcgaggcgcctgtgggggtagggtttgcatgcttgagttcatagggtacgtcgccagcgaggcgcctgtggtgacttcgtcaatctctccagaatttgccgacccagtcttcgaagatgctcataagggtagggtttatgtgcgtgtgttcataggggtgagtgcgcgtgcgttgtgagtgtttgcgttgtactgtgtaatttaaaaaaaataggtcttagatttttggatgaaaggagtataaaagtagagaataaatatattgaagtataaaatggaaaaaaactatattgagatttgataaaatggaaatattctattatctttttatgctgcattaatatgtgtcatgtgtgatattgaataacgaacttactttaatacggaggagtattttccttgaaccgggatgatgaaatcattgaaaacgcggaggcaagaggacgtgcaacacgtgggatagcgccgacgtcggcgatctgttctaccttctggaaaacaagtctgcaaaaattaatttctgcctgaggcagtgaggctcgcttgtcagtcacccgtatacgtggaaaataaattttctctcgctttctcacgcgggtcgcgaggaactctctctctctctctgtgcacaccccgggaggaggaaccgagggaggaggacaagtcagagcaaggggcctcgacggcggcgaagccctccaactcacaggtgagagaccccccccccctcgcctcctcctcttctctccggcgacagcgacggcgacgagcgagtccgtgtagatctccgaccccgtagatgggttttgggaggggggcggtttaatcggcggcgcggatggcgtccgtaggactccgtaccccgccggggaatccttaggttgctcctctattgctcttggagtacacgccgcagccgctacccgtaggccttagcccgatggacatccatggttgggtggatctgaatggagacggattggagagagcaagtaggatggaagtaatggttatgatgtctagctgatgaatgtactttatacttaactaatagtactaatacgcaaagctttgttacaggaagcccaagattttccccgtgaattcctgtttttctccattgctccatccaaattttgcctattcctatgtctttcaaatgtttgcgataggaggcctcaaagggtctagttagtgtataacactgtactctgtaccgcgaagtagtgcctcaggctgtgaaatgtctgctgttcctttgtcaattgtttggatccctttgaacaatggaaagcatacaatttcatggaaggttattaattacatttccctgttaggttagttctgttatgccatttcagtactaatgaacaaacagtttgtccacctacgtgtcatcacttggcttgatagtgctgcaaccaacctatgtttatgtagaaagctgaggcatatttggattccctttcgtaggtaaaatctgctaaatattgtttgagttttctggcatctgcttcagatatccattcgctaatgactaaccaatttaatcacagaaacaccaatatctaaagcagcttaaattttgaaaccaaaatgcaagttgtattaaaacaattccatgaaaatcttgattatggtaatacatactttctaatttcattttgttggtgcttttgttttcttatgtgacctgtttttgaccaattgttatctcaaaatatatgttccttcctcctggtgaataaacttgaatatatctatctacaggcgccatgtcgatgtcactgttccctgggatggatcttacgaaaatggatgctcctactcttaccctccttggagcagcctgctgtgtaatgctatcgatgcattttacagtacagttggtgtcgcagcatcttttctattggaagaatcccaaggagcagaaggctatacttattatcgttctcatggctcccttatatgctataaattcctttgttggtcttctggatatcaagggaagcaaaacatttttcactttcttggatgctgtcaaagaatgctacgaggcactggtgagtccttttgggttaaccacattcttgcacccaatgccgagattcactaaccttctctctttgtttcactatgtaggctattgctaagtttatggcactgatgtacagctatttgaatatatctattagtaagaacatagttcctgatgagatcaaagggagggtgcttcatcattccttccctgtttcccttttcctggtaatttccttaatccttataccctggttcattctttaaatgtttctataatctgtaattgtgcttgagtgctaagatttctgtttgattacttctttacatagcactatatattgattaagttttgatgacttagcataataccttccctgcttctcttttactggcattttatcccataccatggatcacctttttgtacttgaattttaaatttctatttcattgcttccttatatagcattgtctggaatctggattaattaaaccaagttaccatgagtggtaattttttactataatatcaacagcagttttaatctttctcttaccaaattctcctgtatgcatgcacctaaagcgatgacttaaaaatctgtctgtgcatcacccttctacatttttattattcacctacaatctgcagaggtagtctggagctttcagcacttcagtttatagtttgagtcgatgttgtcctaagaacctgtctttgcatctcccattctcccttttagtgttctatcttgcacatataatctgcacaatctggaagtttattctttcagaacttaagtttgtagttagactttagggtgttctattacttgcttcacttctatctgttcaaaaaggaattaatatatttgtgatgttttgctatggcagccccgcaatgttcgattggagcataaaacactgaagcttctgaagtactggacctggcaatttgttgttgttaggcccatatgcgccattctaatgattactcttcagcttcttggtctgtaccccagttgggtcagctggacattcacaatcatactgaacttttcagtctccatggcattatacgcactggttattttctaccacttgtttgcaaaagagctggcacctcacaaacctcttgcaaaattcttatgcatcaaagggattgtcttcttctctttctggcaggtaatcatctacttttccctaaggaaaatgaaagccgtttcacaatttttcttactttatggaccaaataggttacttcttctttcttgtgtctgaatgctttagtgtaactttggacactgtttaccatgatgcatgcctctgaatgtttgattgaacaatgtcgatgtagactttctaaatagtttagatcttctgttccttctgggtactgtggtgtgacttctcatgacagtcatgaagcttcatcatatttattctctggatttaattaggtgctcaagatacaccaccatttctttttgtacatatagttgtttatgaattgaaaaagttcttctgcaacttaagtttttatgaactgccatttgaaagtcagatttggcaatttcctttatgaagtctcataactgaacaactatatgccttgttaccaattagtttagaaagaaagccagagtaagttgttaaacaagtttaattagataataaatcaatactgagcttttcacctttaaggcacaataagctgctatatcatactgcttaaagagacatccccagtggacaccttctaaagagtgcatgtcttcctcttttgccatgggaaacataaaagctggaatagtttttaatagttctcccattctgttcatttcttatgattagtgattgagctactgaatgccattgtctttttgcagggttttgcattagaggttttagctgccgtagggatcattcagtcccaccatttctggttggacgtggagcacatccaggaggcaatccagaatgtcttggtgatcatcgaaatggtcttcttctccgttctccaacaatatgcttaccatgttgctccatacagcggggctgacagggcgaaattcgagaagaagaatgaatgatccaggttttgtactgagtaataccctccagctcttgtatgatatctctctgtatggactcacagtgttataaactcagtgtttcttatgcacacgagtagagtaagtacattacaatcattagaaagctagaggtgcctgaataagtggtggtttcgtcttgttgtacacaatatcatgttggactgaggatcttgtgtgtacactgtacagtgcagcctttggaggcaagcaaatccattatcaataaagctatgtacttccaagtgccaatcaccaactgtagagccctccctcccccaatgcattgagttggtgaatgcaaagttattcagggacatcattaatccggttaactggatacaccgtatttaactagcccggtctggactctggaccacggtcgtgggtaacttttattgttctttcaatttttccatgtgaaaatttgttccagatagtcattgcctctggtcacaagttgtgactctgcaacaatgtcgatcgagaacatgtgttaccctctctttctgcttctgcctctttcaccagctgggcacggtgaaacaagggcgttgcatccagcatcgccgtggcaggattcttgacgcgagagcagtttgtctgcagcgatttgctccgtcgtatcagcggcgacgagaagaaaaggagaaaaagagtgggggaggaaagagatgagtactccagacgtccagtctgtctgcagtgctgtgtgcagtgtagggtaggttgcctgaaatcagaggcgaagtggggcacgggcactagtagcagcagctgtgcactcctaggccgggcctgtagctgctgtgttgtgtgcgtaagcggtgggggccatatgtgcaactcctgtagattcctagtacggcctggcttgccttcccgtgacctatttttgcatcgctttaagctcggccgacttttaaccagggtcagaactcagaactcagaagtgtctcctcttgccttgtcctcctcctagctagcggctgataatagtgtcacacacatcttggtgtcaacttataaataatgatatgccttctgtttataaaacattactagcactgaagaccgaacggatgagtaaattttattttaggctatgtatttttataaattgttacaaggggtttctgttagcacgtccggtttatctctatccacatcaataatgccgactttagtttcaatccttttctttaaacttctaactttttcatcacatcaaaattggaggtttggttgaaattgaaacgatatgacaaaaaagttagagtttgtgtgtgtaggaaagttttgatgtgattaaaaagttgaaagtttgtgtgtagggccgagtttagatccacagaaacttccaacttttcccatcacatcgttctaatttcaaccaaacttctaattttagcgggctagtatgtttcattatcggcgggaacatggatagccgagaaagcttatcagccagcaacggtggtggcgctttgtttaaggctacggtaagaaatgcattctgatgtaacgattccatttttctttacaaagtataaaaatgacaccttcagttttgaagcgaatgttcacatatcgtacgtcataaactataggtccttgaggtggttgtgattatcatcaaatacatgtcaatggaaaaaaaaacaaccatgttctagtcagtgccaaaagaaattgatctttcggtcgtagagctaaattcgatgaggattagaaaatgcaataattaaacatgagcgcatagttgccaaatgtttttgaggaaaaaaagggtatttttccttgctgttgatcgagaatcttgcctaatgtcatggcaagtccatcttttgcggttgcgcgctgtttagatcccaccccaaaattttacaccctatcacattgaacgtttaaacaccggcataaagtattaaataaaggataaaaaaataactaataaatattacacacattgcgactaatttgcgagacggatcttttaagcctaattgcttcatgatttgacaatatggtgctacagtaaacatttgctaatgatggattaattaggcttaataaattcgtctcgcggtttattgatggattttgtaattagttttttattagtgtctaaacaacccatgcgacaccctatagaatatccgatgtgacacaccaaaattttacacccctaggccgagtttagttccaaattttttcttcaaacttccaacttttctatcacatcaaaacttttctacacacacaaacttccaacttttccgtcacttcgttccaatttcaaccaaactttcaattttggcatgaactaacacacctctagctttaaaaaccccagagttctttgccagcagtacagtgtatgcgcgaaaaggaaaactgcgagctgccataccacatcaccctgggcctagtcatgcatcctgactggagaccttgtcactttgtcagcactcagcacgcacccagccggccgaccaccttcatcaagctaggacccaacccaaaagagttgcaggctgcgaggctcatcactgagcctgactgcctgagaaggctgagagagagaggcccgtgtttgatgagggtgtgtttagttcacgtcaaaattaaaagtttggttgaaattgaaacgatgtgacgaaaaagttgaaagtttgtgtatgtagaaaagttttaatgtgatgtaaaagttggaagtttgaggaaaaagtttggaatcaaaatgctgacttgccgtatcgtcgaccaatttagtaggagtagtagccaagtaagttagctatagatatatattattatgcattaatacctagtcctagcaattccttcacaaactttgatagagcatgtagcattatagcttgctatatatttatggtccgcttctcttctctctttttttttcgctaagtcatctacaaatataagtggtaacacctatagactattatattattttatcatacaagctttgatgagtgttgaaaacattttttttctctctcattaggcagcacagctatagtgtagtactgcactgctatttccatcccaaaatataatctcttaggtctttattccccccgagggagggattggaggggatggatgtgaaattaactccctctaaatcccgcacaatctttttataggtgagattaaccgaataaggccttatggagttttcttatagagattaaatagagagatgaagttgaatgagtaatgattgtgattggttgagatgagtttgtaggtggataaattaaataagagatagttgagataattaaggtagtagattgagagaagttaatttgattgctaaaagtagctatattttaaaactaagaaagcagagtattctttgcattccgcaatataagggattatgctatcttttgtaaaaataaaaaacaaagtagcaaaatgacaagtcatggtataaaagatggtagttgaggaaataaagtactgtatcatcacaattttttttatttttgaacaaactagaagagaaaaattcaaaagaggtaatactatctttttagccttttctcgtagcaagaaaagagctagattttgtacattttagctttttaaaaacttattttacaaatatacctaacaaaaaaaacttatttcaagaatggacttttttttggcgttgaggttcaatgtctcagcaccaattgcttttaacgccaacaccttcatctcctgtgatatctaagtggctcatgtaaagggattgactagccttgaggacatatttataaaatatttttttaaaaatggttaaaatataattttttatagataggtttttggcgtcatcttcttttgatctgaggacctatttgtaagaaaataatatatacattttaacaattttcataaatttattttagtaggtcctcagtgcgagcctcttaattgacgtcgacctctctatatctcggctgctaaagggatgagggcattaccaatatcattgacgacgccaagacgttggactttggtgcctggatcgctgacgacgagaaaagggtctttgaataaataaattttttaaaagagccaaaatgtgaaaaatacaaaagaaaagagggagggagaactcatcagcggagaagtgatccgatgagtgacagaccggcccagcgggataagtggccgagtgactgacagtccggcccttgcctggcctgcatcggatcacgtgcaggcctaaataccaaggggccaagtgctactccttcgtacagcacaattgtacacactgctaggctgagcctctctactgctgatctacatcacttcgtcggatacgctcataacttcacacatttcaatgataattccaagtctaagtccagttcagcctccgaagacagcactaacttcaaacggacctaacgccttcatgccaactctgatttgggtgatcttggacttcgtggaaagcttaactcgctatctttcaaacgcatccggtctcatatctaaattcatctcgagtcaacgggaatcgccaaaaaaagacagtgttgttgctgaaaccgaacttgggccttgggccttgtaatagactaggcccatctcggaagtgtctccctccacctccacgaattagcacttaaccctagctttattttcctctataaatagctttgtacatcctcaaaaatatttgggttttgtttaattgaattttaccaagtgtcattcaccttgtctctagtcctcgcttgattagtcagtgactattgattcagagcccccaatagttgatgtgttgatttgccgggtcaattagatctaccacttcaatcgcaactattcctttgtacttaatcacctattcgcaatatttagattgcatcttatcttgttcttgcagtgttctctcatttgcattgcagggatcatcaaccgtgcgtcacggttggtacaacatcgtttgtggtgtagcgattgcacggcgtcctggacttgttctggttggtatccacgtcgcaaatgttgcactcgatcaaagcgagagttatcccctcaccagaagatcgggccacgagagagagcgtcatcatttggtatcagagctgggcccttgttaaggggttgggaatgatgaggacatccttccgcgaccgtgtgagcctctgaataatcccaccttgcttagcttgggaggaggaagccaccttaaaagggagagccacccttcctctattggactagtcttttagggagattgggcctatccgctagtgggtgtgcttaagaactgttggggtccgggcaaccttaatttgttgggcctcggccaaccccaattgggccggattgttatcaactccctacagctacagcgatcccctcttgctttcccatatgttctacgtgtacactctctatcgaaaaataagtttattttggtattgtgtataaaacactgctatgaaatccatttttcgtggcggccattttgggttttcgctagcagaatttggagccaccacaaagcaaaggccagtgaaaatcaagatcttcgtagcggttatcgaccactagtgataatttatttttgctggtggtcatcttaagctagctgtcaccaaaaatctattttcactggcggttagattaagacggtcaccagcgaaaaaacatttttgctggtgggttacaccgtgccagccgccagtgaaaatgctagccaagttttttaaaaaaatgacggacagagcaacaccgctctgtccgcctccatcaatgctcgaccattcaaaaatttcacagaaatttacccaagcattcaaaaatccacagaaatttacatcaacaatttacagtaaaaaatttccattcacccaagcattcaagcaacacagaaataaacaaaaatttgaagtcgtcgtcgcggcgctgcccccgtcgacgtcggcggcggcgggggatccggtcacttcagtcgtcgcggcggtggatccggcctcccccgttgttgggacggtcggatccggccggtcccgagcccgcggcggtggtggcgacgacagctggcggcggtggaggagggagtgggagaaggagagcccgctgctggacccgtcgcccgcgccgtcgtcgtcaccgagacacaccgccgagcccgccggatccgtcgcccaggccatcatcatcgccgagcccgctggatgcgtcgcccaccaccggatccaaccccaccctgtcgcccgcggcccgagactccccgcgccgctggatccaccgccgcg

SEQ ID NO: 10031 - DNA, 43758 bp, Oryza sativa
  unsure (1)..(43758): unsure at all n locations
ggaaacttagcaagaggtccaatctcttggtaaaaatcctttgagtctatctctctcatccgattcctgtgtttttcctgtggtccaatcaaacgatcattcctgtgttttgtaatcctctgttttacacttacattcctgtcagaatcctatgtttttcctattcctccgtttttttattcctacgattcaaaggggcccttaatagtgcaaatgttgaaaatataatcataactaactgggtgacccgcgcaattgcgcgggtagcacccaaacaaaatcatatatttttttaatatgattttacttaaaatttattaaatagctatctaattgtcttaaaactttgaaggactaaaccttatcatccctgacggagcgtggagctcctcaccgggagaccgcgcaggcccccctttgccggttcggccgggggcgctaagtgaggttcttcgccctcgatcgatctggagaatgttcgcgagagagcaagtgcacgagacacgggcgatgtagacaggttcgggctgctgagaagcgtaataccctactcctgtgttctggtggatctgtgtgtgaaggagttacagagagccggagagccagagagttcaggctccagaacccctctagcctccttttttcttctttttttctttcctcctcctttttggtgggcaaggtcctccttttatatctcaaggggataccacatgcaccacttctacctacttttcttttgggtggggacctaccctatcttgaccaaaacttggcttgcaccttcgcctggaagttaaatcacaacttgtccttgagtgaggctcagcgccgtcactcgcctgacatcggggatctccatgttactccctcattaatgggcggagatttgccatggctgctttccaaatgaccatccgacgagatgggtcatacctacctccactccaccggaggcagatgcatcgtgggagcacggttgtctgccgatgacgcgaccggcgtcagaccagtcacagaccggtcattcttgtccaccacgtgtcagtttagcatgctacacgtctgcccttcttcatacaatgacttccttgcaatggttgcgatgaagcctggaatgtatctggccggggctgacgtgccaactccaggagttcccacgccggctccggctagggacgagtgcctggaggctctcatcattccgacgggacggggcgaggcgtgtgtcaggccgcctgttgccacctaacccgcgatctgaccggtctgtgaccggtcacacactgtgacctgtcacggaccgaacgagtgtgctacgctgcattaaatgcggcgtggggcgctcgtccaacccgcaataaacgcggttaggtgagcgccgctgtgctcacctaacccacacacgtggcgccaaacccatagggggtcggggcgccccagctctcggggccgaaacgggagcggcccgacccctcggggagacagagggaggggcggccacatcaccctcgggcccgaccccccccccgagggggtcaggccacgtgggtgactgcagctgccccaaacctctagtcaagatacccccggtcccatgtcaccgacagtagcccccggcgttacgccagggcgatcgcccccctcgagggaagcgctcgggcgtgacgccactccttagacctggtgacagatggggccggtctctacaggcagcagaaacccagcggtcgcaaatcgcgcacatcggcaaggaaaaaccgaccgacaataatgagcggctttctttaagaccgctacattacttaagtagcgcgcgaaccgggacgagccagttcgtttcgcctggagatgtgatgacggtgcatcggtcggcgagcgtagttaacgcgcgcacgatatgtcccatctcgactgccacggccgcacatccgcctcgtgcgccgcaaacgggcgagcgggattagtggaggcgtgggcgcgaaagacgagggggcgaggtagtgggcgcggggatcgaggagccgggcatagcgttggcaagggtactaagacatcaaggaagggatttgtttccttcctctcgtcactcttccctttgcctttgccacttgtgctctgactctccgtttccggcgccctacccttgccatactcgctcgctctcaagctcctcctccgccggcgtcatggcacggggctccgcaccgctcgagggtagcgtgctgccgccttcccgcatcgtgagcgagaggcaggccgggctgccgcgccgattcatgccggaatctgccaccggccgggaggtggtcgcgctgggcgagggacgcccggcgccgcattacccggggcggtccgtcttcttcctctctttcgtaatggcagggctggtcccgccattctcttctttcttcatggatgttctggagctttatgatctccagatggcgcacctcacccccaacgcggtaatgacgttggccatcttcgcgcacctatgcgagatgttcatcagggtgcgcccatctcttcggctgttccggtggttcttcaccgtacagccggtgttgccaccgtcggtagtcggtggctgctactttcagctgcgggggccagtgctgaaccgctacattccctgcgtccttcgcaagaagtgggacgactggaagagcgactggttctacacccctctcgccgacgaagcgcacctccgacttccgagccagcccccggcgcaggcctccagctggcgggcgccggtagatctgggagacggctacgacgccgttcttgaccgcctggcgggtctgcgatcccaggggctcacgggggccatggtgttcggcgactaccttcgtcgccggatcgcgccactccagcggcgcgcccgggacgcctgggagtacactgggtccgaggactacatgaggacccaccaggggggcagatgggactgggcccctgaggacttcaagatggtggtccaacaggtgctgaatctcagctccgtggaggcatccctcatcccccaaggtgtcctccccctctgcagcgatccagagcgcgccaacatcctgactatcatgcaggaggtcagggcgtcaggggagcgggctcctcgaggccacgatggcgcgggcgggagccgcaggggggaacaatctaccccgggagggggtcgtgcttctgggccccgtgatgggggcccggggggcagccgccctgccgacgcccgggggaagaggaaacaggaggataccccctccccatctcctccccgagggggcggggcggtgcgtgccagcagcaggcgcccggagggtgctgtgccgacgtcgcagcccgagggggagcgaaaaaagaagcggctccgcaagatggggggaccgaaccatgccggggaaacctcatctcccccccaaggtggtcgtttagccgacctcctcgcaggttcgtccccgcgcccactgcggccgtattcattctcccaaggtgagttttcacttacccgttttctttttgtcttctggtttttcttccgctttcagcgagattccgtcgcgcccccctcgccattccaagtccggccagtctgaggccgaggagacagcgaccgcggaggcccggaggcgggaagctgtccggcgagaagccgcggaccgcctccgggaagctgaggaggctgcccaggaagccgtccgggttcgccaggctgaggaggccgctcaggaggaggccagactccgccgggccgggaagtcagcccgggaggcagaggcgacacgcgcacgccaggcggcctgccaagcccccgacccgactccgcccgaggcaacgacgacttccgaggccacccacgacgaggccgcgggcgcgccgctcggacccgacccttcgggcgacgttcgggacgagccagcctcgggggacgcccctgagtccggcacgtcgattggcgggccgagccgcacagcgcccacaccaaggcagctctcccctctgccttccaccgccccactgaacacagagcccctcctgcaggccctggccgccgcgaacacgacggtgctggacgggttaggtgcccagatggaggtcctgcaagcagagcgggcggaactcgacgcggcgtgggcgcgcgtcgaagaggggcggcgctcggtggaggccatggtggaggcgggccgcaaggcataccgccggcacgcctcagagctcgaggcccgtcggtgggagctggcggagatcgccagggaggtggaggaggagcgggagactgccctcatcgccaccgccgtgctcaacgaggcgcgggacgatctccgccttcaatacgggagccgggtggcggagctagagaagaaactcgacgccgcccggggagtccttgacgccgccactgcacgggaacggcgggcgacggagaacgaggcggcgtcccggcggcgcgaagtggcccttgaggctcgcgccacggcgctggaagagcgcgcccgcgcgagggagagggacctggcggaccgcgagaccgccatcgctatccgggaggcaacgctggcggcgcacgaggccgcctgcgccgaagaggagtccgcactccgcctccgcgaggacgcgctcaccgagcgggagcgagctctcgaggaggccgaggccgcggcgcagcggctggcggacagcctgtccctccacgaggcagcgcgggaggagcaggcgcgccgtaatctggaaggcgcccgcgccgagagggccgcactggatcagcgggccgctgagctcgaggcgcgggcgaaggagctggacgcgagggcgcgcagcggcggggcggccgcgggcgacggcgatctagccgcccgcctcgcagctgtcgaacacaccatcgccgatctgcagggcgcgctggactcgtccgccggggaggtcgaggccctccgcttggcgggcgaggtagggctcggcatgcttcgggacgccgtctcccgtctagaccgcgccgggcggcaagcgggcctctggggcgagcggaccgcgaagtacgccgccaaccaggggggcctcgcccagcgcctctcagagatggccgggactctccagcggctccccgaggaactcgaggagacgatcaagtcatcctcgagagacctcgcccggggggcagtggagtttgtactggcaagctaccaggccagggacccggacttctccccgtgggcagcactggacgagttccctcccggaaccgaggacgacgcgcgcgcgcaggtccgggacgccgccgaccacatcgtccacagcttcgagggtacggcccctcggctcgcgttcgccctcgactccgacgaggagggcggcgacggtggtgtggacgacagcgaccacgaggccggcgacccgggagcctcgaagtgagcccccaggcccccgccaatcttaaaagtttttcctttcttcttccgaggccttcgggcccccttcttgtataaactaatttaatctgcaatcaaacaaagaagaaatttctgtgtcaattttatttgttgtgtgtatgagacgaggatggtctgtgccgcggtccttctgtgtcttggcttgaacaagggctcgtgcccaggtcccagcttcaaacggcgggggtcggggctagtgcctggggagatccacgtgtcgagactggccaggccgggagcgcggtgaccgagggttatggggacccgattgtgggcctttgccgattcccccccggagttcaccacgccccggggcacggctcggttctgggccccgtttggcgatttccgccggcccgggccaccgagggcagggtcgagcacgagcgtgctaattcaagccaagactcttcaaaaggaaacaatggcacagacacagtccttaggaaatcgaaaaagcttttattgaaatacggaagagaaaaaagataagtatatgcatatgtggtagcccccggccaaccctgcacgcccgaggggggtgcggggttggcccgagcccgagacctgacacccgacccccactaggggtagaagcgacgaaggtgttcgatgttccacgggttaggcagctctgtgccgtcgcccgtggccagccgaacggagcccggccgggggacgccgatcactcgatacggaccctcccacattggtgagagcttactcagtccagcacgcgtttggacgcggcgtaggacgaggtcgtctacgcagagtgatcgggcccggacgtgacgctgatggtagcgccgcaggctctgctggtagcgcgcggctcgaagggccgcgcgccgccttcgttcttccaagtagtcgaggtcatctctgcaaagctgatcttgatcagcctcgcagtacatggtggcccgaggggacctcagggtgagctcggatgggagaaccgcctccgcgccgtagacgaggaagaaaggcgtttccccggttgctcggcttggcgtggttcggtttgcccagagcaccgctagcagctcctcgatccacgagtcgccgtgcttcttgaggaatttgaaggtcttggttttgaggcccttgaggatttctgcgttggcgcgctccacttggccattgcttctggggtgggtgggagaggcgaagcagagcttaatgcccatgtcttcgcagtagccaccgaagagctcactagtgaactgggtgccgttatccgtaatgatacggttaggcaccccaaaccgagcagtgatacccctgatgaatttaagtgcggagtgcttattgatcttgatgaccggataagcctcgggccacttagtgaacttgtcgatagcgacatacagatactcgaacccgcccggggcccgtctaaacggacccaggatatcgagcccccagacagcaaacggccatgaaagaggtatggtctgcagggcctaggccggctgatgggtttgcttggcgtggatctggcacgccctgcaccgccggaccaggtcgaccgcatcgttgcgagccgtcggccaatagaaaccctgacgaaaggccttgccaaccaaggtgcgtgaggcagagtgggctccgcactcgccttcatggatatcggcaagaagctcgatgccttgttcccgaggaatgcacttcaggatgactccgttagccgcgtgccgatagagggtcccttccaccagcacgtagtgcttggagatgcgctggacgcgttcactcccttcgcggtcctcgggtagagtcttatctgcgaggtacgcctggatctcagcgatccaagcaatcaatctaagggagctgggagcgctcccctcgggtcccgaggcctggactccgacgggcctcgggggccgttcaggcgcgtccgtctcccctagggggtcgggtcgcgccgacggctgggcaagcctttcttcaaaggcgcctggtggggtctgggctcgcgaggaagcgagccttgagagttcgtcggcgaccgcgttatcccgtctgggcacgtgccgaagctctatcccgttaaaatggcgctccatacgccgcacctggcgcacgtaagcatccatctgcgggtcagagcactggtactccttggagacctggttaacgaccaactgagagtcgcctaacaccaggaggcggcggatccccagtccaaccgccactctgagtcccgcaaggagtccctcgtactctgccatattgttggttgcccgaaagtcgaggtggaccaggtatttaaggacatctccgctcggcgaggtcaacgtaacccccgcaccggcgccctgaagagatagggagccgtcgaattgcatcacccaataggcggtgtgaggcagctgcgaagggcccgagctgacctcggggatggagacgggctcgggagccggtgtccactctgccacaaagtcggcgagggcctggctcttgatcgcgtggcgtggttcaaagtgcaaatcgaactcagagagttcgattgcccatttcaccacccgtccagtaccctctcggttatgcaagatttggccgagggggtaggacgtaaccaccgtgacccgatgcgcctggaaataatggcgcaacttcctcgaagccatcagaatagcgtaaagcatcttctgggcctgagggtatcgggtcttggcgtcccggagggcctcactaacaaagtagacgggccgttgcaccttttggcggggccgatcctcttcgccaggggccgcatctccagggcgcttttcgtccgagaggccgcgcggggcgcactcggcttctgtgtcgacgacctcggggtcggaaggcgacaggcgcggccttcccgcagtggccccggggccatcctgggggtcgggggcgcctggcaccttcggacaagcgggcagagggccagctccgatcgtcgggggcctcgggccaccgttcggctcgggggcctctcctccctgctctctcccgggtcgagtcgacacaaggtggggatgcgcggagcgagggtcgtcctcgtcgcgctccacgaccaacgccgcgctgaccatctgcggagttgccgccaggtagagtagcaacggctcctctggctccggggcgaccaggactgggggagaactgaggtacgccttcaactgagtgagggcccgttcagcctcctccgtccagataaacggcccgaagcgtttgaggagcttaaataggggtagcgccttctctcccagcctcgatatgaaccgacttagggcggccatacagccagtgacgcattgcacatccctaagcttgctgggggggcgcatccgctctatagctcatatcttctcggggttggcctcaatgcctcgggcagagatcaagaacccgagaagcttgcccgcaggcacgccgaacacgcacttgtcggggttcagctttatgcgggcggtgcggagactttcgaaagtttccgctagatctgagagtaaggtctcctggttgcgtgttttcacaaccaagtcatcaacataggcctcaacattacgtcctatttggctacccaaagaaattcgagtagtacgttgaaaagtaggacctgcattgtttaacccgaaaggcattgtcgtataacaataagttcctatgggggtaatgaatgcagttttttcctcatcctccctagccatgcgaatctgatgataaccagagtatgcatctagaaaacacaaaaggtcgcaccccgcggtggagtcgacaatctgatctatgcgtggcagggggtaagggtccttaggacatgccttgttaaggtcggtgtagtcgatgcacatccgaagcttgccgttcgccttgggaacgacgaccgggttcgccagccactccggatggatgacctctcggatgaatccggcctccagaagtcgcgccacctcctcgcggatgaaggcttgacgttccggggcctgccgccgcactttctgccggaccggccttgcgcccggccgtacggcgagacggtgctcaatcacctccctggggaccccgggcatgtccgccggtctccaggcgaagacgtcggcgtttgcccgcaggaaggagacgagcgcgtcttcctatttgtcgtccagaagaccaccgattcgtgtggtcttggacgggccgtcgcccagggcaacctgcttgatcgggacctcgtcgcacgtgatcatccgctgcctcggggcggctgggacggaggtgctgagcctctcgtcaccacccgcgggcttggatgccacggcgaggtggtccgcgcgctgctccatgcaagcaagcgcgactttgaggtcgccatggacggtgatggggccaccggggcccggcatcttcatctggagataggcgtagtgtaccgccaccatgaacttcaccaacgcgggcctccccaggaccgcgttgtagggcagactgaggtccgccacatcgaagttcacccgctccgtgcggaagttggcggaaccaccgaaggtgaccgggaggtcgatatggcctagcggccaagtgtgccccggcgtcacaccgatgatcggctgggacggccggagcaccatccccggggccttgatggcgtcaaaggcagcgggggaaaggatgttgagggctgcacccccgtcaatgaggacacgccccaacttcacattgcaaacggtgggagaaaccaccatcgcgatctgtcctccccgggcaacgcacggtgggtggtcggtctggtcgaaggtgagggcaacctccgaccaccgtgcccgccgcgtcgcctcatgggtaggggccacggccagaagctctcgcttcatggccttgaggctccggtgagaagcgtgagcacacgctcccccatcaacggtggcgacggtggcctcaggctcctggaaccctaggtcatcgtcggcatcgttgatgtcctcggcgggggccttctgcttggcctcaccacgccggttgccggcgggagccgccggggtattgccctcacggcgctcctgcctcctctcctcctcccacttcctcgtccgctcagccaaacttttgaccgcgcggcagtccacgaggtcgtggagggaggtattgtgcacggtgcaccacctgccggtcgggcgctccctactgggagcgccggcctccttctttttgtcgctcgcaggcctcccctttcgggtggcccacgaagcgccctcgacggcgaggacgtgaccctcgtcgtcggaatgggccgacctcttcttcctcctcctgtcccgccaccctgaccgagcagcgggcccgggggcggccggagctgccacaccggaaccggaggagttccaggtccaggcctcctccttgcgagccacacggtccgcgagctgaaaaagctccgcggtggtctggggctccttggaggcgatcttctcgagcatgcggttgtgccgcacaccccccctgaacgcgtagatcaccgcgtgtgcagggatgcacggtatggtgttgcggacttgacaaaaccgctgaatgtacgagcgaagagactcatcgtcccctcgctgtaccgcgtgcaagtccgcttcttcacctgggcgcggatatgtgccctggaagttcatggtgaactgctggcacaaatcctcccaagagtggaccgacgcgggtggcaagttcattagccaaccccgcgcctgtcctttcagggccatggggaagaaattcgccatgaccctgtcgtcacccccggcggcctcgatcccaatcgtgtagatctggagaaactcggcggggttgacgcttccgtcgtatttttcggtgatggtgggccggaaccttgggggccaacggacgttccgaaggctcgccacaaaggctcgacagccggcaccgccaaccggggacacggggggctggcccccgtgcccggaccgaagtggcgctccggacgaggaagcgccctccgatgcgtgggcagcacggcgatcattgcgccggcgcttgatattgaagcgggcatctggccccctacgcacatcttcttgggttagaggcgttgacgagggaatggcggacgaacggcgggtaacggccgccgctcgcggcgccctccgcctcgacgacacggagccagcagtagcaacgccagtggccttagtggcggaggaccgccagccggcgcgtaggcgctgctgcgccgtcatgaccaaattggccacgtcatctagccaacgtcgggttggagtctctggatcagggatgacgggcgggtgacgcaggagcgcgcccgcagcctggagcgcgccctggggcgtgctgccatcaccgtagacgaggagacgacgctccccgtctcgccgtccttctccatcgcccgcgtgcggcgaagtcgcggatctttcgacctcctcgagcgcctcctcccgcccaagacttcggcgagagggggacagtggagtacgagctcgacggcgcgggttctgctccccgtcgtcaccgctagcgctcggagagagattgtgcgccactgcccgttcggccatggggctgagcaggagaagcttggcgcacacgaaagaggacgagggcttagaaagacacacgcgccccctacctggcgcgccagatgacggagcgtggagctcctcaccgggagaccgcgcaggcccccctttgccggttcggccgggggcgctaagtgaggttcttcgccctcgatcgatctggagaatgttcgtgagagagcaagtgcacgagacacgggcgatgtagacaggttcgggccgctgagaagcgtaataccctactcctgtgttctggtggatctgtgtgtgaaggagttacagagagccggagagccagagagttcaggctccagaacccctctagcctccttttttcttctttttttctttcctcctcctttttggtgggcaaggtcctccttttatatctcaaggggataccacatgcaccacttctacctacttttcttttgggtggggacctaccctatcttgaccaaaacttggcttgcaccttcgcctggaagttaaatcacaacttgtccttgagtgaggctcagcgccgtcactcgcctgacatcggggatctccatgttactccctcattaatgggcggagatttgccatggctgctttccaaatgaccatccgacgagatgggtcatacctacctccactccaccggaagcagatgcatcgtgggagcacggttgtctgccgatgacgcgaccggcgtcagaccagtcacagaccggtcattcttgtccaccacgtgtcagtttagcatgctacacgtctgcccttcttcatacaatgacttccttgcaatggttgcgatgaagcctggaatgtatctggccggggctgacgtgccaactccaggagttcccacgccggcttcggctagggacgagtgcctggaggctctcatcattccgacaggacggggcgaggcgtgtgtcaggccgcctgttgccacctaacccgcgatctgaccggtctgtgaccggtcacacactgtgacctgtcacggaccgaacgagtgtgctgcgctgcattaaatgcggcgtggggcgctcgtccaacccgcaataaacgcggttaggtgagcgccgctgtgctcacctaacccacacatgtggcgccaaacccacagggggtcggggcgccccagctctcggggccgaaacgggagcggcccgacccctcggggagacagagggagggacggccacatcaccctcgggcccgacccccccccccccccccgagggggtctggccacgtgggtgactgcagctgccccaaacctctagtcaagatacccccggtcccatgtcaccgacaatccccatgtttctaattatatagttttaaaagtcacaccagttgctaccacttatgtcatctcctcctttacttgcttgctcgatctaccactatttctattcattctctttggaatttttaaaaattggatcttatagttttaaaagtttattgtcacgttgggtttcgtttttttaatttctatatgtcccgtcaaacgttgccattatactcctctatggcctgtccactatctcttctctttattatcattgagattttaaaaatcgaatataattatcgtttgggttcatttttacttctagaagtcctgccaaaccgttagcggctttgccattgtacttctctacagctcgctcgctgcctcacttttttattgtcattgagattttaaaatcgaacatgattatcattgttttttttttactttttagaagttccgaacctttaaaaattagggtttcattttttataatttttagaagtcccgtaaaatgatgccactatgcttctctatggcccgtccgccacctactctttattgtcattgtgattctagaaatcaaacataactatcgttggaatttatttttattttctagaagtcctgtcaaccgttggctgctctgcaactatactcctataaaccccgctcgttgcttctcctttttatagtcattgagattttaaaaatcgaatatgataatcaaatggggtttatttttttttactatctagaagtcctggcaaccgccttgctcgttttcttcatggcctgctggtcgtccctccttttaatcgtcattaggatctatttggtgttttatcaacagtttttatatgttgtatcaaccgtcaccactctactcttttataggtatgttacttaatttatctcgtcatgtgttttagatggtcttttctttcaatagtctttatttttatcacaaattttagttatttataaattttattcctaattgaaatcttatttttatttttccaattttagaatttatttttttttcaaattttaattaatatcatattgtgttcttttaatttttttatttttttattttcaatttcagttgtttcaaaattgtattcctagttgaactctcttttaatttttctaatttcagatattattttattttttattctgaattttcattaatcttgtattaggttcttatatggattcttctttcaatattgcttatttttaattctgaattccagctaattttaaattgtattcctacttgaaactcttcttttatttttttgctaatttcgaatttttattttatttttattcccaattttaattaatctcgtattgggttcttatatggactcttctttttaatattccttatttttaattccgaatttcaacttttttaaaattgtattcctacatgaactatcctttcttttctaattttggattttattttatttttttcaaattttgattaatctcgtattgggttcttacatggaaacttctttaaatattgcttatttttaattccgaatttcagctatttttaaattgtattttttacttagactctccttttttttctaattttggattttattttatttttatttcgaattttgattaatctcgtattgggttcttatatgaaaacttctttcaatattgcttattttaattcctaattttagctatttttaaattgtatttctacttgaactctccttttctttctttttcttttttccgattaatgtgagaatttctagctcccagagtgaacgcagtggctacttttaaagctgttttaataatataatagatagatagattcggcatattttaataaaaaacaagatactaaacatgacatgtgaataacaggaggatgatcaagtgatagtactaaacacaaacatgctaataacaagaataatatcatctagtaacatgttaacactaaagtgaatagagtgatatgcggagaacgctccggattcaaaggcgatggtgttggtgttgtcgctaccgttgccattggcgtctcctccattccattgctagtcgacgtagaggaagaccgttgctgttggcgtcttctcctccattgctgctcgacgtagaggaagaagaacctggcgtagaggaagcagtgtagagagcttattgtctatcggttccgctttctcataaaaacagaaaagacaagaaaacgagcggctggctcgccagccccgttgctccgctccgctaactcggcccggttggctcgactcggcgcacgagcgcgcggtggcagttcgaccaccatcttaaccgctcgacatgtgctctcatttagcaacttacttctcattggttccaaggtgggattaatcttttaacattaattgtgtgcctttgaaattagtatgattaaatcggggctagcccatttaattctaacaataaatatgcagattacaaaatacagaaaaataaaaaacgaatgtttgaatataatgtgtaaaagagtaggaattagaaaaaataagtgcttaaatatactgtatagaaagaaaagtaggaatttgtcgacgggctatacccgcagacgggatttgtagagtatgggaatcgttggaacctgcagacgtgagatcagatcgagcagacaaggaaaaagatttatactgatttggaccctcaaggatagtaataaccctaatctagattatatggatttatggatggaatatcaccaagattacaatgaggaatttcacgactagactaatccgccgactagaaactgtcgaggacggcccgaggagatctactcggcgaatacggctatgacttcctctggattgcttctcaatgtagctttggctatggcttgtaattcgatgcccttccctgaatacgggggtcttgtatatatatagtgtagatcatatttttccctgaataggatttgtcggtgatatgggtccaggggtatcagggccatagagaggaggctgcccccgggaggctgcccccggtagccacatggccctccccctgaggggggtcgggcccgaggcagggtggcgaccgccccctccatgccttggggtcgggttacctcgacacccttcgcacggtgccgcgtgtgctacgataggtgggcgcccccagcgcccacctaaccgtatttaaggcggtgtgagcgagcacaccatggcgcattaaatgcacaccgccttaaatgcggcgcatggtgcacctgactggactgtgaccggtctgcgaccggtcgaatgaccgatgtggacagggtagtgcgcctgcgcactggttgcatattaggcggtgtgccgcctgacaccccccgtcacgtcgtgatgaggagaggctgcttagactctcatcaagaccggagacggcttgcctaacccggtcagggtagaatttccgtttcccagcgcaagtgaagacccaaaaatcttcactcattaaatgccgaatgacatgcgtgtcccccgtgtcagactgatagatttgacgggccccacgccatagcaaggcatgccagagacttccaaggcaagcaacaagacatgcatttaatgtgattatcctccctgaataggttcggtgggcccatgtggtaacccctnnnnnnnnnnnnnnnnnnnnnnnnnnnnnnnnnnnnnnnnnnnnnnnnnnnnnnnnnnnnnnnnnnnnnnnnnnnnnnnnnnnnnnnnnnnnnnnnnnnnnnnnnnnnnnnnnnnnnnnnnnnnnnnnnnncgacgatgaagcttatcccccatcgtctcactggccgaccttggcccctgttatttttgggtcatatctaattcgttatactcaaaatacacctttggtacaaaattaataatctcacaaggatgaaatatcagtaattttctatttactggttgatcccatcttttacggcatcaattccttttttgaacgtacaaaaatttggggagctcagcgtgtctggaagcacgggagaacgttcttttgctgatattattaccagtattcgatactgggttactcataggaaaatcagcctttccctatatcaggcactaatttatttttaacgtctaattagatcagggagttcttccaattaagaagttaagctcgttgctttttgtttcaccagaattggagccaggctctatccatttattcataaaaggaggtccaggcctacttagggaggggttgagccctttttcacttgaggagttctcctgcccctcattattaacaccttctactccaacaaggagatcttgtaatttctcccacaattagctaagcacaagagtagggtataacgcttctcagcggcccgaacctatataaacccctcttgtctcatcgtccttgaggggcctgacccctatgcactgaactatccaccgagcccttgagtctcacctgctgcccctggccgaaccaacaaggggctctcactatcccctgcttgaggagttcaccctccgacaggattctaacacattctattccgataaggtaattttcttctttatctgtcgtatttcgtaatcaaatgatacattgtcgtatataatcaggtatatggtattgcggtattccatgaatccatgtataggaggtatgtcttatccttgacactgacataattaaataaaaaagacagattcaagggaaatttttctaaagttgtagcttttacgaattttcctccaaaatctatgtagtattttccctagaaaaaagatctctgtagtatcgtccattatattagagtttcaatggaaaggagatgatttaattatttgtttcaaatatgcttttaggaattttttttcatataaatttgaaactccctaatttttctgtcttttttctgttcgagcctgattgatcttgaccatgtcgtgaactactgttctccctgctctcaggatacagagagatgttgtgcagggctcattttgagttttcgactgtatatatatcgagatatatatgtttttcagctgtatttagcagcttaaacttgagcctgcattggttggtgattactacaactcgaatgggactaggagatgttaaatttaagaaaggtactacatgaaattgcccactgggagatgttaaaattaagaaagatacatgataaacagccgctaaaaatatgagctaaccatcacgatttggggttggtatgataattaatgcattttactaccttagaaaagataaagtacttcttggaactccggtcataaatatttgattttgatgttaaaaattagatttgatctctgaccatagataacttctcaagtgcttaatttataaaaaaaataaaaaagtttttttttgcggggaaaaaataaaaaaaataaaaaaatatataagtttgactaaatcttatctaaaatttaatcatttatgactggagtgagtactttttatatgctaataaaaacactccctctcatcatgaaagttgaggacaaagattctatcaaacttttgaaaaatttgaacaactttatattaaacaagttatttaatctactaataagtttgtaatattatgatagcacttttcaagcaactaggaaggaagcccgcgcggatgcgcgggcattttatttattgttttatataatagtgctaaaacaagtcatatctcactatttctacgtcgtgagatagatcgtagacttcaatatacttaaattataagaacgtctcccagaattaaaaacactttgtcccaattacatataaattctatcgtaacaactcattatcactattttaaaagctcgctaactatcaatacatgaaattgcgcataataaaataagcctaatatatcattaatacactacttagctaagtgtttatgtctcacttatttccaaatccacatataaatattcttaaaaatatcactaacgggtgaagccggtcatagccgtagatactttctttctctattaccttaaaagttgggtagctgtgtcccctcaagatcagcccgaagcacatattataatttatctattatatattaataatatattaaatttcctactaacgctcctacgccatcacgtggtactctacaaacgttcctacatcaccacatgacgctataataaattagagaaaatcatagatattcggagaaaaaaataatatgtagtatttatttttacttaaattgatgggcctattattttataccattatattagatcttacttaaaaaaataaaaatgtaatttgtcttcccgtcataatccccatccacgtgcgagagaaaatgcatacgttcgtcatgttcactaggaaaaatgtatgtacataaagttcaccaggtacgtacagttcatcgggaaaaagatacagccgaaagaaaaaaaaaactcaaaacaaacatacctatatatataggatgttggaaaatatacagtacaaatcacatacgtaatggaaaccttagaactaccgttggatctgacaatgaacacatgagatttgtccatgtcacttacatatattccttagtatgattggaaaagaaaattcaaccatctttgaattaggatactccatgttagagaaagctaaaatatattacttccttttttcttataacatttgaccatttatcttattaaaaagttgtataaatatgtaaaattataaattgagattatagattgttgatcataaaacaagtcatggtaaaaaaaatatcatttatattttttaatacaaatggtaagatgtcatatcaaaattcaatggcatcatacagccactcaactcggccatttgtacgccacgttagagggtaaataacgagtccaccaatttaaatgaaaatcgatggtgagattatatagtaccatgtgatggcctaggagcatttgtagcagcgtcatatggtgacttaggaatattcatataaagtttaatgaacgtttagtatataatagtttttcttgctgcgaatagtagtaccgaagctttatttctttttcaatctaacgtacgtttgtatatgtacttatgtttttttcacggttagtatatatatacatctaatctcatggtttaaaataacgggtccgctaatttaaatgaaaatcgacagtgagattatatagtaccacatggcggtttaggagtatttgtaggaacgccaatatgaagacttagtactgttttgtagatcacaaattggatatataatttaaaaataatttgaaaagatgaacatttaaagatggttgatttgatatttatattatagatctagtttaacactgcatctatatatttgtgaagtaatatatttcatctttatatcgttgatagttctattttaaagaccgtcgatttttttgatggtactaagtacttatattttattttggcttatagtaagtacgtgcatatatattttttcttccggcaaacattatgcacatgagaaaggtattacatatttaatagtaaaaaataacaggtccaataatttataaatcgataacatatatggataaaataatggatcgaaaatcgttcaattgtatgtgtatatttgtgggccaatatatctttatattgtagagcgatatttgcttttttgatagtactaagcatgtatgctttattttggttgtcgtatgtacgtacataccttctattcctccggcaaacagtacagagaaagttattatatatatatatagatataatgtattaactgaaaatcgacggcatgtatatatctaatctaacggtataaaataatgggtccaccaatttaaatgaaaatcgacagtgagattagactgtgccacgtggcagcttaagagcgtttgtaggaaatttaatggacttttagtatataatagatagatagatagatagatagatagatagatagatagatagatagatagatagatagatagattctacgcatacccttttttcttaaaaaatagtaagcatttgagaaattatttgtgttcaaagtttcaaaagatacgaccagctcatattctaaacattaaatatctaatgtacatgtccatttcttataaataaaaacgtacaataatattatattggcactgcggccggtagaaaattctcttgggaattactgcccattaattaactgatcattaattgtgcagataagatgagtgagatagagatatggctgcatcaacgacggacaagtatagctttgccgtgcatcgagagcgacacgctgtcgcgtacgagagtacgtagcgcgaatatttaagcagcccggcacaaacacagctaatccaattgctgtcttccacaaaaccaactgattacttagtactgtaacgtcattaatttacaaaaaggaaacgtccaaactacgcacaaaaacagaaattttgtgcacaaaattcgcaaacaagaaccggaattttctttaaaacactgttcaaacgagctcacaacttgcatatatacacacagatagtatactaacccttagaaacgctcaaatatacaccatacccttatatattacatcttcaagagattagatcggtttatcttacgattgataaaatcattataaacgtctcctctcgttatcgacgggtatatcatctatcactaaaaggataattaaccgtaaatacgagctacaaacacctgtgtcaagtttacgatttacccagcataatcatcatcatagagttatgctgacacggcaatttaatcaggtcggcatctttgttctagcctgaaaacgccctacaagcgaaaatctgggtcgaaatggcgtcgagaagtgcagggtcacgatcgagtagtcgttttcaagtgttttcttttcttttgtaataagtaaggagacaatcaaacatgtactactaatattaatcgattccggccggctatgatcttcctcctaatcgtcccaaccgatgacgggatttttgacacgtattggctgccaaccatctcatcacctctgcattttcagaggttttatgaaattattatatatccacaaaataattaaagcttagggagttgggatccaggtactcggtttaatttacatccatgggtgacttagatcaagtttagtatagctaactaatagctctaaaacatatataattaatttaatagttaattcatacaatagttacctgtaaacatatattacactattaatatctggttccacctgttatatacatattatatcttggagtccgtgctatcgctggctataaatatgtagtccactgctcttctctcttaccccctccattccaaaatatagggcacaactaatttttaaagtggtttcataatatagggcgtgtatgcatgcatgtaattaattagcacattctctcctctaaattattattattttaaatcatatactcacaagatccttaattctattagttgcatgtattgtattaattaggtgattcatgacaacaatgagatattaattattttttggtctttgggttaagggtggttgtgtcttatattttggaacggagggagtattttttatctttttaaaatatatttatagttagtttatagtagtttgctattgtatctactcttaggattgccatcagaagaaggcgtggacaaatgttttaattggcgagagatgcttgatggtgtgtgtggatgtgtgtgtatgtccatcatttaaaaaaaaagaataaatgtaatgttatactctcgaatgattgtgcttcacctcattgcatgtatgaaatgctcaccatatataagcaaacaaataatatatattttttatatgtccatgaaatttcagccaatgctttttacaggctcgctccgtcacatatcgtaaattttggttttgatctttctatacccacactaattaatacgcgtagtgtctcaagccatcgttacttaattagttagttaaacagataaggatactttacacatcaataatgcggcaccatgcatgtacgtacatcaccacttgctatttattttgtaggttttaataagaaccaactgcttagttcgaaagaaaattaaattagctaactaatgcatcaaatgatgttagactagtttagattatattagagcgtgggggtcacggttcagattgtagtgtgtcattatgtgcatgagtgtaagtcccacgttctgtcagcgttcaattttgagtcctatcttcttcgtagtattatattacgacaaaagagaattcaaatgacttgaactaactcaatcattcaagcgcggaaatcaggatttaaaacccacctttgtttagttaattcctcattaaaaaagtaaaaagattgagaaagatttattatatatccatcgaggtgtgaaattaattctttttaattcccttcatctcataaggagtaacccagaacaatctcgataacgaattggttaattttgcgtctacgatcaataccagttttttccttcacctgggctaggagtgtagattctccgacaaacaaacgaaattcatgttgaggaatgcaaattttgtcccccactctgatggcctttatcgccattggattctgttctttttctgatcttaaaggtccagccaacttgtagttatgctgtactctagtagcctttcatttgatagagacggtttataatagcaaatccaaatcgcaataaatcaaatagttgatgtagatggcaatctaaccaaaatttagatcaccacgagagggttttgaagcgtcaatagaatccaaacagtttatgcatagctggcaagcatttcctggcatgcgtatcatataattggccacaatgttttacagaattttgaaaaggaaatgaagttaaggacacaactgttgaagacgtcatttcttccagggtttcatttgcctttcactgttacaattgttcaagcacatgatttgacttctttttttaaaaaaagataatagaattcattgtgtcctttatttcatccaatctacaactcgttattactgcctccgtcccaaaataaacgcagccatgagtttttgtgctcaactttgatcgtccgtcttatttgaaatttttttatgattagtatttttattgatattagaatataaaacatgaatagtattttatgcgtgactattttttttagtttttttaaaaaaataataaataagacgaatgattaaagttggaaaaaaaaactcatggctgcacttattttaagacggagggagtaccaagtttgtagtttgaacgaacgcttattacttatcacagcttatggatcataagaaacctaattgaaacaccatcctaaagacatacaaagataacacacctctactttcctaactcacctttctcgtttaccgcgtgcacgcttttcaaactgctaaacggtatttttttaaaaaaaaaaattctatatgaaagttactatctttcaaatttattttaactaatactgaattaatcatggacttaacgcttcttcgtttcacttgctatggagtgagggttgcaacacaccttatatatgtttgtcctcctcaaatacgatacctaaaaacagagacaacactatatgtttgtcgtcctcaaatataaacactactataaaaaccatttttcctaacatagaagatcttattttcgaaggcggacatgaccctcagagccaaatgactatctacaaaaatataaatcggggtgaaatttaatgtccgtctgcgaaaatattttcgcagacggtccacttaagcggcgcaggcggaccacttcacaggcgccgcttaagtggtacgcccgcgaaaatagacttaatataaatagacaggcgggcctaaattttttctaagtcccctcacatcttctcctctcccctcccctgccctcacctctcctcctctcctctcctcccctcctctcccctctccccggccgccggccggaggcggcggcgtgtgctcccggcggaggaggcgaggcggcgcggtggctgtgctcccggcagtggcagcgaggaggcgcagccgaggagggcggtgcggccgaagttcgggcggcggcgtcggctcccctcccccctccctcccagatctggccggaggagggaggggggaggccgccggtggcggcaacggtgtggagcggcagcggcggcggcggtgacggcgctgtccgggcggcggcggcggctcccctccccctccctcccagatctggccggaggagggaggggggaggccggcggcggcggcgacggcgctgtccgggcggcggcggcggcatggagcggcgacggtgcagtccgggcggtggcggcgcgggccgggcggcggcggcggcggcggctcctggcgcgattttcttttgttcgttccttttattttcgcaggcgggccgttgccccaactgcgcagtcgtcgtggtgcaggcggacctctctctcgcctgcaaaaatgagttttggccgcctccaaaaatgccttttctagtagtgaaaaacaaattctcaaaattagagtccaatcattctactgattagaacttacacacatcaccgtctataattgacgtcgaaccaaagcgaaagatatcggaaactgaatttcaaaccagccgctcatgcatgcaaatatagccgcgtaacgcacatggaagccgatggcagccatcaagcggccaccgcatgaacacacaaaacgctggacaacgaaacgcctccgtcgtggttgtgagatgaggcggcggaaagttcgacgagagggacgagacatcgtggctgtgagattaggcatgatttgatcgtttgcctatagaaagttaatttagtacccatccatcttcatacataatgggctcaaaattatttagcagaatttaaggtcaaggtgaaattagtttcatgctattcagaatttacttaaccaaaaatagattactcctagcgatgcaaactatcaatgagcaataaatatactctaaactcaaggtaaaatatagagatccgaaatatccaatctaccatatagttcatattcattatgtgacacatccaactatctaaaaccacccgatgaattacatccgatggcaccggtgctcccacgcagatcgcgcctctcctgcagctccctccgtatcaatccaacggcccacgtcgctcccacctccctcaccccaccgcgccctctcttcgccgtctgacccgtcagccaccatgcgccgtctccgccccccacgaagcttgcggctcgggtccgtctcgccaccgccgccatcgttccgctgctcagggccgggccgacgcaccgctgtcccgtgccgccaccaccgtattcgtcgctcgggtctttctccgccgtctccacccgctcgggaccgccgcgaatcgtcgcccacctcgccgtcccctatctccaccgcaagaacaccgtcggcagcctcggcggtctactctgcgccggtctcctccgcgtcatctcctcgctcgtgccgcctctgccatcccctccgttcagcaccccccctcctccccccgtcttcccttccgtccttccgtccatccagcgcgctggcgatcctccacccagggcctggcgtcccatcgatgatttagggcgtcgcgggtcctccgttcagggcaccaccggccatccgtccagtgcacggtctccccaatccagcatacaggtgctacttcccctcagcgccaggtgagcaaattctgtttaatttggtatcacttggtttggttgtagtgtagcaattgctgcttaaatgatgaagaagtgcaaaccaaatatttctggaaggtactgcagagtttgattgagtgtttgaaaatatagttcgttcagtttgttgtatgtcttgaatcctgataggatcacctctgccaactgagtgcttctgacggagtcaagcatcttgatgcctgcaatgtttctggcttttgacattccttgcatgcttgacactcatccaatcggattgtaaggtggcttttctgaattttgtgatgatgaaaatcaccatggtgtacatgttcactgctagcattgtgtggtttgtattaatgctacaaaatgccttgctgctcatgaactgcttgacaaaatgcctctcaatgttctatctaaaattctgagcatgttaatatgtgtctccccgtaagtttagatggtcataatttgtgctggttaaatatcctaaaagagttcttaaaaactgatatttgatcaaatattttagtgattctatcgtgcatattaattccctgtagaaatattatatacatattagtagagtagattatggagagttgctaaaaattgatcgccaaccgtttgaagctcactttgaagatctactgcgaaagatggcttcatgttaccagaagacaaggcaaggcatcaccacgtaacagaaagaagagtagagaaaaagaatgatatcaaccgccatttcggctgtgtttagtttctaaaattgatgagaagtttggagaaagttggtagtttggaaaaaaagttaggagttcatgtgtgtagaaaaattttggataacactaacgatgtccagcttcttctcattatgacagcaggagggaacacagatgctttttgtgtatttagtcaataactcagcttactggatgcttatattttatattctgcaatgtaaagagtagatagcatacttgagaatcattggtcgtcactgcattataattgtacatcatatatcctaggaaatattggatcaattgcaaggacatgtgtgcagcgtgagcagttggtgtgcatcttatcggggttaaggttagtgtttattgaaaaatacattgaattatgtttcttccttttctttgttatgttattcatctggtactacatgtgaacggcaaatttactttgtaagcattttcagccattgggtttaaaggtagacaacacaaagctctgtgtgctgtattgggttattgggcatatcctatggttttatgccagatatgccaaatttccctcttctgtgcattaatatagttaccaaatatgcatgaattttgaaccactgtttttttctctacatcaggatggagaaaaatggttatataagcaactaagcaatgtatttttggtagtgaagtgtacataatggatacagcatcacttgttatcctgatatatttatttaagatggttttcttgcatgtttggtagtgcaaatggacaccatcaaattgccaatttgccatgatcttggtgcgtgtatggaatcaagtagaatggtagtctcctgcaattgctccacgatgactgaatccacgcggaaggctgtccatttttggcagttcagacttagagagaggttagcattggcctattctttggataggtttaggtcatttatgtgttgagtaaaatttggctaagaagctacggcatatctgttttacgaatggaaaaaatgtagctattttttcatgtgtccttgttgcttgattggtcaggcaagttgccaagttattgctccgtattgcaaattcatcttggtaccatattaactttgacaatctgctttttttggtgtatcaataaatcaagtaaataatgatgcaatgaactcttctgatggacaagcaacagaaaatttacttgataactatattgtttggacgtatgttctggccaataatcttgattccttcttatatcagtccatccttatccttgacgccttatcagtacactgtaatgctcatactgattgtgctggctgagacctaggcgggggccaaggccttcatttaggtcagtacacaccgcctcaggaggtttattccttgtccggtacatatggttgggatgttggatccatttcatttatttctgcaggatgagattgtgaacaatggattatctgttattaggcttgggatgctggtctgatgcaaattactgtagattattcaagtcaaagttactatagtttttttttactgttggagttctgtttcagtgccaaatattcgctgagcatgatgttgtgttgcagtggtgccctaattgcgatttcaatgggatgttctagacagatgtgtggagtggggtggaggagaagcgtagtcgatgatggtgaaacacagcgtgtttgaggaacaaggtgatcgacttgaagggcgttgccagcaaccaggctgcttctttgaacaccttggttaggtaatatattcaagctatgttagatggaaattacttttatggaaataggtgcatttgtgatagcccatatattatttctttatagttattagtgcaattacaattatttagcatgcaagctaatagtacttctaatgaggctacaaatgcatatcatacttatatatgtttgtccataacgtgttgtttagaacagcttaaacaaaccaagcaggaataatttttatttatgtttcctgatcaattaggaagtatatttacaaacgatggcatatgggataagaggatttcctttctttttgtgctatgaatcccatcaaatttctgctatttttagttcacgcaggagaagcaggagaagagtatacaccgtgcttttgctctcagtattgcgaaccagctcacaaatatattccgtgaccgagagaagtgccaatacaatagttttaggaagttgtgttcgatgatcagttctgagcaactgagccccttgtagagttgtccccattgcagtggataaaattaccaagtgcctaacacacattccatcagaagtacaacttgggttttgaaagacaaaaaaattgctatgtaattaacaatgtataaaaaatctatattgttctttttttcaatccatncttgatatatatctcattctcaaacatatatcgttttctattattctgatttgaattatctaatgctgccgtagcgttagcacgtgtatgttactagtatttaaggatggagaaagtacttgttctttgtaacatatggattttgtagtatttttgtgttttaaagagatctatttaaacggaaacaatttgcattgagcattcgacgcgagacgaaacatcgggcggttacgccatgtgggcccgcatcgatttaaccataacggctcgaccttttcatcttccttaatcctaattattctcacattttctcttaccttcctagctattgaacaggttcatcgggatattggcagaaccgccgttgctggtggccacgactgcaacaatggtagcagggtgttcttgatctggtcagacgctagcttccggaaccacacgattgagcacgtattgtcgagggtggcagcgatgaggttgacatttgtaggggaggtggagctggcaccagaacctaccttaggagcactcctcccgatgctagtggctgtcgcccttccactcctcctgtagtcgccaagctgtcgcatccggttctacgccaccttcatccgcatgtcctccttcctcatctccggcaagtcaacaataatctcgtgcgcgtagctagccagcatcgtcggtctgattcgagagttacattttgttttgattcaatgttctgatttgagtgtttcattttgttttgttttcatgtttcatccattgatttcttggtgttgcaattagtatggatgttgtatctgactgaaatactttcgatcaagcgatgaaatattttttcctacttgatgaaacatctgaaatttttttgttgaaacatttttttatcgagtagtgcaacatgtgaaacaatatagtgcaataccatgtgatgttctatgaaatatcctacatccaattttgtagtgcttcccttatttatactccctccatctatttttgatagtcaaaatctgaaaaatttatttttgatagacatatttcaatccaacaacctatcatcttaatgactttctcggattttatgcgtgactctccattcttccacacaatattggctatatgggcatcgagaaatgtaaatattaatgaatcgcttgtttacgataaatgactagtagcatgtttaaatagatgataaatagaattacttatcattgatttatgtaccaagatgaaatacaatactatcaaggagctctccttttaatcgaaaagaaaaaaaagtacctctcttttgctgggccccacgaagaaagggagccgcttctgctgcccatggcaatggtggcagtggcgaccggccggcctgcaacccggcggcgtcgtctcgtgctgcgacgcgagatgtatgtatgcatcctccaaagtcttttttcgcggcatgcaatcctgaaaagtaatacctctgtctcacaataaatattcgtgcccaacatttgaccgtccgtcttattagaaaattttgtgaaaaatttgaaaatatttagttacacataaagtactattcatattttatcatctaatagcaataaaaataataattattaaaaaattttaaataagatgaacaatcaaatattaaacgtgaatatataaaactatatttattttgggacggatggagtagtctgttggctcgcgccttgatggcatggcatctttttctctcttgtgctgatgctgaccaagacggcacatgtgctgatgtgcctgcgtgcagtagtttctttggctggctgctggttttggctacatcaggccgtgtaatggcacatcatgcacacgcacgaatctgatggatacagagccgctagtccaagcagtactgctaatagcgggcctatctcccgtgctttcgtagctcctccctcctactactactgtgtaggagtagtgtgtggatggataggatacggatcgatggcactgtgcctgtctgttctgcacgacggaggacaagttgtgggttgcgtttccgcgtcatactccgtctctgccaaaataaatgtagtttttcatatcttacgttttcgtttgaccgtttattttatttgcaatttttttacgattaatatttttattgttatttgatgataaaatataaatagcactttatatgtgactaatttattttaattttctcataaaatttttaaataagacggatggtcaaacgttggatacggattcccataactgcacttattttgaaacagagatagtacgtacctagctagagtaagggcagttaggccttgcagtgagcggacattggttttggttcgttgtcataccggagctaggtcaatttatcatacccattcccccgcgaggctcctcatgccttagcaacaagctaagatagaggcacggtttgcgagccgtgttgggcgaggccatgtctctgtgacatggtctcgcccttcttattatgaagcttataatgatgtcagcttaattcgtcagatctaaaatgatggcgcaatggatgaaatcaggaaaaacggaacatgtatggtggagaagaaagatggacctaccaccacggatatcaccacatgaatgcaaaggagaaagaagatggatctaccaccacaggacactccacaacctccttctccctcctcacccctacccccaccagccggaaaagaagaaatataaaatgtcaggggctgacatgaaaaattaaagctaccacttaaaaccaatttgtcttatattcgctcaataaaaaaaccatttctaggatggagggtttttttaagacggagggagtagaagagatatggtactaacctacgtggtgcacactctcttctcagtggccactcataggagtagcctcgtgtagttatctctagagagatggtatagattgctcccatagtgcaaatatagcttgagcccgtaggaagatttttatttcactttgtttatttgcccatcaatccttccgttgattttatttacaaccttatccaaaattgtgctgttagcacccttaattagacaaaataatttataaaaacctctaaaataaaaataatccacattcttactagtcattcttgctcccctattccatcatctttggccaccctagctcgttgtcgctggctcctcctcctcgcctccatcatatctacgcaccactattccaccaccacttccccgtctacggtcgttgtcgctttcccctcttattaggcagcaaattggatggacaagcttcgtggctgcacaaatcaggagtagcttgggtcgacaagctctgccgagttgggggcaactacagctaatggatttggcgttgttatagattggaagcggttcggactaacaagctccacggttggagggagttacgaccaatgggatttagcaatggcttgggccaacgagctccacaaaggcttcaaccaatgatgtctttggcggcaagggccagtggcggagccagaatttttccaaacctagggctcaattagttgaatgtatataattttgcctttatcttctagcttttgaagttttaaaatggaatttcaatgaatacttaggatcaggagtagggctgcagccctagctgccctactcttgtctccgcccctagcaagggccaaatatagttcttagatcttggcattgcctatccacaaatcgccaccgtctttagcaagcttgggcacttgcgacgtcgtcctattggtggcgacaacctcttctcaacagcgacggtggtcggcggaccttcctaatcatacgcgcattagaggtggcttattcctagtcttcattctcttctcctccatccctgtttgggacataacttttttcatggaaaacttgtggcttgtagaaggtactcttgttgtcttacactttgtaaacaaacttcaaagtcagtccctttcctccatgatggcatccgagcctacgtgactagtggggttactcctcttaggccatacacagtaaacgctctaatgtttacaggatgtctggatctaagattttctaatttttagagatttttttattttactttcaatgaaaacatcacctatctcatcgtgcacttattcgttcatcggctacatccaaaatttaggttttaaaaattaattttaagctaatttgaagctttctattacaatctatttttcatacttgacttttgaaccgtgaatactatcgatatggaagtcttacatataaattatttttattgcttagttggttttacaaaccgtagtctaatcaaggactcctttaatcaatcatcatagccgaattcgttggttgaagttttcccaatcatccttttatggaacgtttctttttctaaaaattctcacggctccaaatagaggtccttgtagaaaattgaatgtgttgttgcttgttgttggactgggatactatagagctcaaagcctcaaattacgtgcaagacgacgttcctactcctgcgtaccgctcgatgttggttggcctacgatgttttcgtgtcaaacttggtggcgcacgcacacgcacaccaagtcgatctctcgctgtcctacatggtcgatcggatactgtcagttttctttgtcctctacgcacaccaaagtcgcctactgctgcgcgatatacactgccaacgtactgcaaggatcccgaatcgatattggagtatgggctagcagtggcactgtggcagctcccggccggccctagctagcgtatgtcatgtcgttttacaccatataatttccaacttgtcactaagtgccggtgcatgacgtacctgcatgcagaggtttatactgtactgtactattcctatgtacggatccctccgttaaaaaaaaacgaatataggacataactgtattatttagaccttcaactccaaatttcaactttcgtttttcgttagcacactttttaaactgctgagcgatatatattttttaaaaaaatttcatatagaaattgtttaaaaaatcaaataaatttattttttaaggttacaataattaatacttagttaatcatgtgtaagtggtctttcttgttttgcgtgccctgaaaaattttcttcctacccatgaaacgaacgaagcgtaataattaatacattcgccttaaaatatcaactctagttcactacgaccatgaaaccccttttacactattaacctttttctttttttttgcaccattggattatagagatatgtggacatttttcaaataactgcccgcctatcaatgtattttttgttttggtccaagggctcgtcttcttctctctgtatcatccctctctcgtactgagtaaaaaaaacactcatgcttaacattaggagtatttacttatcacttaaaaccaagagtaaagtttttactctctgtggattttgagagtaaaaatattacaaacggttgaatcttatcagtaaaaaattacaagtggttaaatttaagagtaaacaaaatacacacaaaaaaaagtaggtggcagcaaggtcacaacttggcgaggtagctgcggcacatccacctgcgatctcgatgacagtttggtaagggataaccgagaagacaatgctaagaggtactgtggcgttgcgactagcgggagctagcttccgagccaacttcggtggcacatgggcgagtggatctggggtggcgcagcatgcgacgaggagcaggacaggtggggtgaggaccaggagctctcaattcagtgtccgggatgatgaggtggccgctgcttgcacatcttgccggtcaccggcgctgcattggtcattgctgctgccaccgctcgcatgcctcgctagtggccctaattccttgtgttgcctctcgcatgccttgctgttgtctcggtggcgaaaggaggtgggagagcgagagatgcagcgtgagagggagaatgggtgccagggactaaatgcaaaaaatggtgagaaaggaggatgtcatctggtgcacatatgttagatctaacggtgaagatgggggttgcgtgtttccacccaaatgagaggttgcatctgaaactttccgcaattacaatggatgccaagtataattttgttttggttagtttagttggtaacatataacatatgaagaaatcacaaatcccagtcattgggagtggaggatgcgcggccagtgcccatataccaccatcaccgtcatcacggttgcatttgctgtggacgttggtggcagccggtacggagctgtgctggtgggtcgatggtgggctacaaaggtagagtacgtgcgagcggcggtgcggctaagcattgagccctacagtttgcggacgtccgcgcagcggtgcagtacctgcctctgcggctctacctagggtgcgggaattgtgtattactttgcatcattcgaccatttcggtaaactgatatagactatcaactgtcctattacctctgttttatagtgttttatatcataagccgctttgatttttttcatagtcaaacttttaagtttgacttagtttattaaaaaaaatatagcaatactttcaatgcaaaacaagcatattatcaaaatatatttaatattgtgtttaataagatatacatgttactaaattttttatatgaacttgtttaaatttaaataaattcaattagaaaaaaattcaactgcgacaatatgaaacagagggagttcagttactgcgagtcgataaccaaacttttttggtctcggtcatttccacgttttggtgtgagtttgtttggttcggttatttttagccagccctatatgtatagagcaatagttaatgaacgcatgcacgtattaaccacaccctaacgttggaaatattaataggcctgatgcatgacaaattgcatgcgcgcacctgtgccggggtcgttgcacgtattctcgcgatcattgccgaacagtcaatgtcaattatatcgacggccggtttgcgttagcgtttgcttaactagtgtactagtactaaatagaagtattgtactactagtatatgtagcgtattcatcgtgaggtaatgatatgatgtcgatcgatcgatcgatctaccgacctgttgatcatcagtgactgaatttaaagctgctttttatttgaaaaccattgctatcttccgtccaagttacgtatgtaccactgccgagcagttattttgcttttttctaagaaaaataaaaaataatatgattttttattgttttagtttctagtaatatgtaaaatttactagctcttctacgtcgtattaaagttgctagtcacattcatagtatgaaaaatttctaaccatgccgatatcattttcaataataaaaagtactttttagaaatttacaaaaatcaccctataagctagaagtttgatgtttcaccccataaattattttgttgaaaatgcctgcccacctacttagttttgtatcaaaaccacctcggtatgcacgtgtttaaccgaatcaacgtgttttcataaattatgagccatcaatgtagtctttaccaaatttaaatacttcaataatatggtcttaatactttttagagattccataaataatgagagcttaaatattgttgaaccaagtttcacaatatgcataaaatagtttaataaaacatgaagaataaatataatgtaagtacttggataagattgactcgattagcatggcgtgtggtatatctatatcaacgataataggctgatttggttaagtacgtgcgtcctaacatgacttttacaccaaaacttagtaaaggtgtgtatttgtaacaaaaataacctatgggatggtttctgtaattttctcttttttctcgaccgttttcatccctgaatacacaggatacagacgatgaaaaatattacgccatcgatcgatctcctgtgtcctgtccaattaaaactcgcgggaagccggcccaatacaggtgttggcagactggcagcacgcggcccacgtacccttcatgcatgaacggaacggctcccacttttgagtcttttgatccaccacaattttaagcacaatatgtcaataaggttgggttcttccttccattttcccaacccacctctctccattttcacgcgcacacttttcaaactggtaaaaagtatgatttatacaaaaactttgtatatgaaagttgttttaaaaaacatattaatctattttttttaaaaaaatagttaatacttaattaatcatgaaataatacgagcttcgttttacgtgccgggggagaaggagttcccaacccatcctcccgaacacaaccttagtccacttgctatacctcaacctcgattctacgtcgagtttgtttgaagccccttatctccaatagtagaaatcttcacccataaactatacaaaaccatgtaatttgggtccgataatagtatagatgtttgattttgctgacataatatcgtagtcagtaaagtaaacataaaaataatatgtgcgtcccacatgtaactgaagtgagaagaaaaaatattgggcccgcgtgtcagtcccatcacctttcttctcttttcttcctaagcctgggagatggggggcagccgataggacgggagggggggaggaggaggtcggtgagcctgggagggagggagagagaccaaatgcgccggcgggagagcggggagaggaggtcggcgagtctagaagggagagaagaggataggaggttggtgagccttggagggagagagggagagaggcggtcggccgcaccggcgggaaagtggggagagacggtcggcgagcctaggagggagggggaggcaccggtggaagagggaggggagaggtgaccggtgaggttgggagtcatgttcgctgccgctaccgcaatgacgacaaagacgatgacgcacacgcgccactgcgcgcgcccaccgttccaccaccagccccgtgcacgaaggcagcgccgctcagctccagcccgtgcgccatcattgccaaggagacgaaaaccacggagcgcagctcctttccgttaagccactgcatgacgcggtcggcctccatgcccacgctaacattgccacctccccctcccccaggctcgccagctgcctctccccccctctcccactcgctgcatccccctctatcctaggcttgggaagaaaagaggaaagatgatgcggttgatacgcgtgccccacatattttcttctcatttcactaacatgtggacctcacatattatttttattttgctgactaggatgccatgttagcgaaacctagcaaggctagcatccatactactataggaatgagatctaaattgcacggttttatatagtttaaggttgaagatttttggtataggagataagagatgtcaaataaactaaacgtaaagttgagggacggcaaatggacttttttccattttaagcagcggcggtagggttggtaggtaggaagatccggcgccatgtacaaacgtcgccgtcggtcggtatcgttttccatcttcgacgtacacgttgatgttactaatacgtagtactggtaccacatggcagttagacacttaaacttggcgcctggatctggacatgccgacgtagatcggtcatcacacgttcaaaccccaccctgagttttttaaaatgaaaggtagtccctcggtttcacaatgtgactttctagcattgcccatatacatataatgaatctaaacatatatatatatatatgtctagatttattaacatctaaataaatataagcaatactagaaagttttacattgtgaaatagagaaagtaacagacagtgcctacttacttcctccatcatagaaaaaaataatttctgcatatgtttagatacatatatagtcagaagatgattttcttttcttacgaagggtgcatctcacagtgcaacctgtttttatatatatttgttgattggtgagagacaatttcaactccgtacttggtaccttaataggtgtagcggcctattgaaattaagtacacgtatggttttctttatttatgattgttagttggtgtgcaacgtcactatatctgtatcttaagtttgtatgcgcatgatatatatgttcatctaatgaccatcccttttatcaatatccatcgtttatcacgctatatttcatgtctagctttaaaaatgatcttattttcatgggctggcaagtttcaaatttgatccaaaatattctttgatttgctaaccatttttttcaaaaaaaaaatcaaatttctgaactttcaatccatacgtaggtttgtggtttggctttttttttttgattcaaggttccataaccattgccaagagtgccacattatattttgatcttttggccggggtcggaagaggggctttaggtgtgggatatatagaatagatctccatgttcggagggaggtggctaaccaatagcacatgagcatgcttggaagcaagcggtgcagggggatgaggtcggtaacacgtacaacaagaactcaagtggctgggaggtgttggcgtcttggcgagatgtggtgctaagtgttaacaatagtggaggcttagtggatgggaatatcttagctaaagctgcacaaaacatctggtttgaagtggggggataattagtagggaagagggaattgagtgagtgagagagagagagaggaggtggctagtgaagcatgtggatgttatcaaggcaggggttgtgtctagaggaggaagggtgacgtcatcgtgttgcaactttggataaacggaggaaagccattgacagagacagctcccaggcaggtcggacaacctcccaagctccaccgctgccatcttctttgcggattgtctttcgacattaaaaaatcacagagaaacattgttagccgtttggatttaacaacggtattggttccgcccctaaagaggacgagtacggtgagggatttttttttccttaaaaaatgaagtacaggtagacactctcatttatttttcttgaccgaaaagtttctccaatatgaatttggatttccctccgacagtagcttctagatcctaacctcgtttggatgggccaaaatcctgacgaggccacgtctatcagtgatgatttccatcggtttttctgaaatgtacagctgcaccgaaatctcggccaaacggaaaacgggagttttcaactttgtgctgaattttgtcaattgcattgtcggttatcgaattgaaactactccgaataaattctgacaattggttagaatggtttgtcaattgcgtttgttcaatatctgcgctaatcgccaaatctcccccaaaatcttacaaagcaggggtcgacgaggcggaaacgagaacgacccggacactcacaacgggcaggagtgggtctcataataagttcatatttcatgtatccgtttaacctaaaaataagttaatttttaacaattattgtattattccatgcttccaaacgtataagacttattccattcttttgtttttttaaaaaatctaagtccaatttatagttactatgtgttaaattaagttgttgattagaacccaaaagccattgagggcggctagggaatgtatcccgtctgaacgggatacttgagattgacatcaatgctgacgtcattatacgtacgcggtaccacgtatgatacctacactactacgaaaacgatttttccgtgtggtccaaaagggttttcgcgtgcggatctcccgcccatctgcattgaagtgtcagcaaaaatccgattttttcgtgcgcacgcgaaaatctaattttcacgtgcgggtggcttatgtcgcaaaaaaaaaaaaaccaaaccctaacccaagccgccgccctcctcgtggtcgccgtcgtcggcggtggcgttgccgccttctgccgctaccggccgccgcggccggctcccagcagcgtcgctgccgcccaccgccgaatctgggcgggagaggggcgccgccgcccactgctggtcccggccacagccagggttttaaatttcaaaatacgattttatgccagtggggggcgaaattaccgaaatttcggaaatttctagccgaaattatttgaaaatttgactgaatttgaataaaatttgaccaaattcacaaaaacttgcaaaaaaccaaaaatttcgggcgagatttgagtatgccggtgggggtgaaaattaccaaaatttttgaaatttctaaccgaaatttcaaaccctggccgcagcccacaagcgaggccgtgctaccgtcgcccgtgagagacgagagagagatagaagaaatgaggataacgatgagtaggtggagaggataagatagaaatttttgaagtggttgagaggggaaaaatacctgaggagggtatttcgcgtgcggtgctcttaagatgcccgcatgcgaaaatttattttcgtgtggtccgcttgcaaaaataggtttattttttgcgtgtggactcttaaaaggcccgcatgtgaaaaccgatttttgtgtgtggtcctcttaagggtccgcacgcaaaaatgggaggacaatttttctagatgcggtcagttatggaccatatggaatctaacgaggggctcgtacaggaaaatcgttttttagcagtgcaattagttccaagacatgatatttgtgtaacaggtcagataccctataggtatcatgtcaaggtacaaaaacatgatacttaagtaacaggttagataccctataggtattacgtcaatgctgatgtcactgtatacgtatacggtaccatatatgatacctattggtatcgaacatgatacatgagtatcaagtatgatactttatgagtaccaagtatgatacctgcatgtaccagccatggtacctgggtaccaagttggtacctgtaggtaccaagtccgatacttatatataccagacttggtacctgggtaccaggtccaatacatataggtaccaaagtattatgatactactaaagtatcatagcacactaagaaccaaaaatcatatcttaccaagacagagctcaattaaaccaacaaagaaaattgattccgggaaaaaaagtcatcatagtggtagaaacacccatagaacatgtagaacaccccaagatcaaacctcaaacccaagccaacgcaaaagctcgggggtcacgagccaagatctaaatatatggatccgcaccacaagaggccttgtcctcgatgatggtgacctcatcgacgatggccacctcctgaaacgtggtgagtagctctgtcttcgtcttgtgcttgggtacctaccccacgat

SEQ ID NO: 10032 - DNA, 51815 bp, Oryza sativa
agagtcgatctcaacaaacccgtcgcagagagatgcacaaagtgaatatggaagactagagagttctacagaagatgtaagaccttttttagatatgctatttgtctaattgttagtgttgtttctaactaatggttatcttccagaatgaccaatctataagtgggtctggaactgttgtactgcgctcgccaagagcatctcaggtgtaccctgcagctactaaccacagttccaaggtgtgttttagattcctaatatgaatgtcatagttttcccccaaaacaagacagataagtatgtcctcccaatccgattctgaatataggtcattttagccttcacaattcttttctaaatgtatgttgttttggtacttttaagcactttttcatcttttactagcctagaggccatgcgttgcaacagaaaacaaattgagtttctagcttattaaatcaattataagcacttatttagtccaagtactactattatttttcttattgaacaagtaggattttgaaacataggggaagctaatagtgaaatgggggaggacttgttgtagtgctcagatgttagtggtaggggtggtgtgggaatggacaccacaactactaacattttcagttatatagattctttatttacagatgctaaataaatggtactcacaaataaatgactagtcttttcaatgtaatgtaaatgaagggcaataatgtcatctgtgctgtttccttcattcttggcataagtctaaaactacttaatattggaatcagagggagtaagcaacagcgtctgatacattttatttattagcctcccagtagattctcctcgtatgaagacacgtctatcagtgggacagtcgttcggaatcaaattgaagaaccagaaactccacgatcttcaaggtcgagactgggaatccaagaaaagtcaccaaatgcttcactggaggacagtgcaactaaccttgcagaggtgatgcacatgaatgttgttggcaaatttctcaattgtggttaatggttgatacttattcatatatttgggtaattaatgcaggcaaaggctgctctccaggctgcgtttaaaaagggtaatgctcgtgaaagacatgttatcagcaaacatgaaaaggaatcacatgaacccagaatttcggcagtaaacagtcatgatgccccaaggtattgcaagtttggttttagttttgttttgtactcgggaaacttttctgtccatttcttgtaacgcttcttaacagattcttttttttttatcctagtgagaatgctgacatggaaaaaggtcgcaaaccacgccagatacatgatggacaatcagctcctcaagcttctggttctgtatcttcacctgcactctcgtcattgataattccttctctaaaagaggtacagtatatttaactcattcccttttcaatctactgtgtttgctattagttgctacattgacactactcattatacatttgtttcttgaaaattctttataagccccaaaacacatttatttacgctcttaacatttttttataagaattaggttgaatttgaaggacatttgtgcttagctactcagctgcatgtaaaacgagataaaccattagcacatgattaattgagcattaattatttcaaacttgaaagatggattaatatgatttttttaaagaaacttctatatacttcatttagcaatttgagaagcatgcgcacagtgaacgggggaaagtttcagccaacattctgaaacgaatgaagccttaaccttaatattggataatccaatctcgaatgagttgtgtcatcaccacattttatcagtttgatctttgtacaactcgagacatgccaaactcttcactgtattgatgacatgctgcaggctactggtgacaagtttaacggaccagttgttcatacattccttgattccttgatgcatctcgaaaaagagctacctggatcttgtgaggtgctgattggcagaatgctccatcggctagggaggtctgagtttcacttgtgttctctcttatgcgctcctctgcttaccttacccctgtgctctcctctgcttaccttacctctgtgctcagcttgtagctcatgatacctccttgtttgcagctcgaaggagtcctcgctgcaaagtcttcaagagacggcgacatcagttttcgcaaagaaatctgaacctccctctgaacctccaagtaacaagaaaatggctaatacaccttccttggctgcccctaccgtaagccctttggcgaggttccttcttacaaggtttgtttagagaaattgtttcccttttcttattattgctttcccacaacaaagagtgagttgatgccattggtgcaggtggcaaaaccaagtttcccaagatcttaactccgtctgaagacaatacaaaaaaaaaaaaacccgtcatgattcaatgtataattaattttgagtgtacataacgctatggttagaaatctctttgttgctagctgttctcagcagcttgtgctgctaccggttgtttcatttgtttgtgttcgcggtgaataacacattttctacccattttataatgtaactttgcacccactgtacctgtatatcacctgaggaacattaataacacatcaatttttttccattttctgatgcccgagaatttatgaattaatctggcctcctatatctgttcggccctgtttaataggcaacaggctggcaagaaccggaatatttgtgtcacgctttgaaaactattattcctccaaaaagaaattatttaaactttttccaatttaacttgttactccctctcctaaaatataaggcatgtaagatttttattctccaatgtaaaacttttatcatatagaagagatagaaagatgaatctaatgtatttttgtacaattaagtagatatatggcacattcgttgtctttgaatgtcacatttatgttaggccgcacttatattaggacgaagaggagataatttatttaaacagaccaaacttaagattcttcttctcagctataagaataatatttgatttgattgagaatgtttttaccgaaatgagaatgtgagctgactccagtttgagataatgtagaacatgacaggtaggagtagtaattagtaagactcgcctctcccccacagtggcactaatctccctgggcctagcatgtcagtcacaccccacaaaaatagccgttgcgaccccgcgccggctccgagccgccgacccgttcacacacaagcgccgcacacctccctttgttaaaccgtttaaaactctcccgaccgttagagcctcctccccctctatccccccaacgttcgtctcctcttcccccgatccaaccaccaccaccttcttctcctcctcttccgctcgacgccatcaccacgcacttgagagagagagagagagagagagagagagaaaccctaagcctcgcccgctatccagccaagcaccgatggcgacggacgcgaacccggaggcggcggcgccgccgccgcagttactggtggacgagggctacgagttctgcgcgcccaagttcttcgacttcgtctgcgacgagacggaggaggaaatccgcgccgccgagcgctggttcgaggcctccgccagccacgccccttcccgtacgctccccaatccccaccccgccgcctcgatcatccccccctctcccgtgttttgctttttttgcgctgattagggctcttcttcttttacctgcttgcagcgttcgctccgaggatcaaggagtcgagggcggaggtcaagatcgagagcctctgcgacttcaccgacgcggagccgattccgaaggtacgaagcagaaagctgcgggaataaccccccaattttgccctaatttctgtaaatctccccccttcttattgtccgttggcctctgcgttcgtcatgataggaggtagcagtggaggaggcagcaggaagcgccgccaatccctcgcagaattctgatgggtaagagttggagaactaaagaaattgtttatgatgattcgttgtgatctgatgaagttaatcgatttctcgtgtgtttttcatcttcacttttggatgttcaggaatgtgcaacagaataaggacggctccatcaaacttgtacgtgatttcttgatgttttcatgttttctatgttctcagtttcagtaagtactagtgttgggtttctagcagctcacatcctgaattcttcaggtccatgaagcaaatcccagtgaaaattgtgtcactgacggcgatcataagcaccaagaaaggtgcatttcaagacctcaatttgttggttcattccgtttcttgctggttttggcatgtgaatgactaattggttgttttgggcagtgatgcaatgttggagtcgccaccagcagaggaggatgagaaggaatcgccaaaatccttcgagtttgtcccttccaatgcaaaatgtaagttgctagttatatatgagcaatggcagtggggaagaactctgatccctggattttgatatcaatgttgcatggctttagcagcagatgttgcttctagcacaccgaagattcagaggcctccacccgtcaaagctgtcactacggtgcctacctgtcccaagctgacagtgaagacagaagccttcactccgaaggtgcaggcaacgaactcctccagaggtcttgcacccttgactggctcaagggcacatccatctgctttgaagcagtcgatgagcgtcaagaggagtgtgatcaagtaagagtcatgctcactcataaaaaaatatattaatctggagattattttcttactaatgtctgaattgttggtttttcagatgccctcgtgagttgctggctgggaaggccgctactgctgcgaatgaaatcgcacaagaaaatcaagctgtcaagagacagaagcttgatgatgggaggacaagacaggtaatactgggatgagattaaagatggcacttcaaatacatgtgtttgcgttgcgcgagatttctgagaaacattgtgtttgccgtcgtggttagatactgaacgtgaagacaaggaccctgcctcacaaggggagaggaggtggtctagcaggaagcaccgagatgagcctgtcggccatgaggaagcaccgtgacgattcacactctctcaaggtagctcccaagttgctcttctgactcttaaatgatagacttaattgtaatgtttcttgtgagaatgcaagtataatgtgattttgttattgtgagcttggcacttagcaacttttgtttctgccatgtgcaggaagtgactcactatatatcggcagcagagatggtaaagaagttcgagtctgggactagagagttggccatccctcacaacagatcgctttctcatgttagcactcatgtgccctttattattaattttaaattgtgtgcatttctccaattttattaatatacatgtcttctcagtcttgttgtgggtatttggttccatacaaagaccgatgtcctttttgtgatactgatatctgcatatcaaatattgcacagttattacatctgaaccgttgacgacgaaatcattattggtactaagaattttgacatattgcaatttgtgcacaatgcaggaggatgcagcaaccgcattacaaagaagaacaaagctgatgctaacaaggccaaaggaacctgagttccagacctcccacagggtccgtgctgtcagagtgaaaagctctgctgagctagaggaggagatgctagccaaaattccgaagttcagagcacggccgtttaacaaaaaagtgagaaatttgtttgctttggttttgattatactaactactcaatccaggatctgaagactaactatttgtttgcttctcctttcagattgcggaggccccttcatttcctcctcttccaaggaaagctccacagcttcctgaatttaatgtacgtcttgtttggctgattcagaaatttatgagctccacagctttgtttggctgattcagttattcctttccaacacctacaggagtttcatcttaaaacgatggagagagctacacgacatgcagacacctgttccgaagcttcttccgtggggactatcagggtaagctcccttcacttaacctggttgctaatatcagtatgtaaattcttcttcttattagtctcctaaaaattaaaattcttggcattactgaaagtttaatcaaatcttgcagagtcagagcagtaagccactgaccttgacagcgccaaaaccaccccaacttgagacagcattacgagctagaccaccaaggtttccctttgccacttgcatcattcagaaaacaagccattttatgttattgattattttcgattactctaacatcatctttctgcagggtgaaaagttctcaggaattggaactagaagaattagaaaaggctcccaagttcaaggcaaagccactgaacaaaaaggtctccttatcttcttgaagcttgtacatttgatacattgattgcattgtgcttcaaaacatccagtctgaacatcatttcttgcagattctcgagagcaagggtgatattggtgtgtttccacatctaaaggctcaaccaacagcccccaaggaattccatttctctaccgatgatcgcttgggtcctcctgcagttgtggatctatttgataaggtgagggttctaagtcatgctagtaagctcattattttttttccagaaacctttcttctaagtccttttctattttgtagctctctctttgctcagaatcttcatatcatagcaagaaagatgtgcccagattgacaataccaaaccccttcaatttacatacagatgtaagcagtatgaaagttatttgttttcccaacacattgcatttacctatctgttgcaggcaaataactttgttatccatgttacaggaaagagggcatgagaaagagaggcagctagctgcacaactgctgcaaaagcaattacaggaagagaaagccaggattccgaaggctaatccttatccctacacaactgactatccagtggtacgtgcaaagtaacataccgaatattacatgtcctggttgctgaccatctcatattctgctagccttaacattttctctctcttcagataccaccgaagcctgaaccaaaaccatgcacgaggccagaaggctttcagttagagagtttggtgaggcatgagatggagcaacagaggataatggaagaaagagagaggatggagagggaagaggcccagaggagagtagtgaaggcacaccccataatgaaagagtaagccttcacattacggtttctcttgtcccaacagttcctggtttcccttataagatgcatattaatactgttaattttgttgcagggatcccattcctcttccagagaaagagaggaagcctctcactgaagttcaaccacttaagttacatgttgatgaaagggcggtccaaagatcagaatttgacaatatggtcagcaaagcaagcttgttctattatctggtttggaggagcctgccaaattggctgaatttactgagcaattcgttgtcgtgcaggtgaaggaaaaggaaataacttacaagagattgcgagaggaaaatgaattcgcacaaaaggttattattttcttatgccttcttctcaaaatccctacattgttggatgcattttcatctgttctggcaactaacttgctgtgatcttttcatgtgaagattgaggaagagaaagcgttgaagcagctcaggaggaccttggtgccacaagcacggcctctcccgaagtttgacagaccatttcgtccccagaggtaagagcagaaacggccaagatttttgcctacaatgtcatcgacctttccgtttcatctcacaaacgtgaactcgttgtttcgcacacagatcaaccaagcaggtgacgaggccgaagtccccacagcttcaggtcgaccaaagaggggcaagaaggcacgccttcatcagatgatccaactctccggctcatcttgttgtcgtctatcggttacccactggctgctgctgttttctcttctgttcttgacgtcaagatcatccccaattctcgcagcgattctttctgaccaatacataaataggccgatccaatcctgttatatagtcagtcaacacagctgacggcgtgtgtatgctcctttagggttctgctgatgcttgactgcattattgtaaattcagtttgtgtgctgtgtgtgtgtgctgttcgatgaacgacaataggatgacaccctgtcagtgtcctcctcgtctgtttcgacgaatgcaagttgtattcattatttgtttatcatctctgaactatcctggagttctgtcgatgttgaataatctaattcatatctcggcacttggaaaactctcgtgagaaacatatgtaccaagaaaaactgattcatgtcaacaacctagcattctactccatcatccgtttcgaaatgtttaacgccgttgacttttttagcacatgtttgaccgttcgtcttattcaaaaaatttaagtaattattaattcttttcctatcatttgattcattgttaaatatatttttatgtaggcatataattttacatatttcacaaaagtttttgaataagacgaacggtcatatatgtgcttaaaagtcaacagtgtcaaacatttcgaaacggagggagtatcaatgttttactcatttggacatatggaagttgtactcattttgtttatcatttcagatttctatcaacgttgaacaatatgtaaggagttaaggacggcggctggaagcagaaatctgggcatttgaaaaactctcccgagaaaatagacgaatcctgtgaaaacctgtccaccaaattcacatccttctcatgaatcatgtaaaaatgaccggtcaaaaacttagatgcatgatcacacatgcccgtatttcatctaaattttctcccagaataccgttcgcgattctgttcgttgatagtacgtcaatcacattgtcacatgctttcccccaactactgctgacgggcgacgagccgacgactcttgacttgcgcaaaaccattgggggatttcgcttacgaaatcaatccactcagcagcgtagactcgttccaaagatactacgatttggataggccggtggtctggatctggacacaaatcccatccgtgtaattctagtatttctctccatttccaagattgatcgatgcatgtgtagcagaaaataatgatactataatccctagcatttgacatgttctttggattgaaaatataggtgaatccgctcatgcgcttgagctttctatgcgaaaagttcgctttgtttttgtcaaacttttctttcgaaaagccacatgctttcggacaaaatatatccctttacgttttgtgccaaacatttctttttgtcctcttactatcagacggaggtgatagcacttcgtccaaaccgcgtttggttcaacgttaagccttaaggcagtccgggtaattaaccttaatgtttcttttgttttaacatggtaccttaatatttcttttgcagggatgattaaacttaaatctagttgggttaattatagcttgggaagcaccgttgattcatgtgaacttggttcaatttttcttaaacaacacatataggtatagtgcgatatttcgtatggatagaacaataaaaaaaaacaagaatatagccttgggaggctatagcctggaaaaaaaagcaaccacaccacacgtttacaatcagacctcactactaatgaactactaatgagatagtaatacgacatctcgaaggaaaaggattttccaaacgacgacttcaagaacgatatgacactgagatgccagcaccgtccatcctaggttcaagacatttcacctagaggaatccatcagggggcaaaagagatcactcaataataccctaaggggaaaagtggcgctcgcaagcgtcgcccttgctagctcaaagaggctaggctttcgtttgtaatcttcctacttcctcgtgtcaagatcttctgctggtcatagagaacaccaccaaccacactccttcgacgcacagccaccgcgccagcatcttgctgccagctgaccatcgagtagaagctcgacatccgacgcattccaaatccatccacacggttaggttggagggcgagagagaagaatggatctcctctccgcactaatctgccaacgaggccttcttatggtgtcgtcgccacaagtggccttcttatggtaggcctgcaacgcacacctcacaaggccaccgttgtcactgccacagctagactgctagcgtcatctcaggccgcccatccgcatcactgccaccttgtcctcgccatgcaccgtaccagctcagtttgccgctggccggcctgcgcctcgctgctctcaacctcgtcaccgtgccggcctcctgccaccgccggacacaccaagcttgcgtcacataggcctttgctgaccgcaacttgcttctatcaccaaccacgtcacgtcagcctcctactccaaatgtcgtcatctacccgctgtagtcggctgcgtcaacctccttctcatccgctgtcgtagcttccagcaccggcctcttacttccgccaacgcaggcgtcccgcggccgccgacgctgtcggcccgtagccgtcggccttctactgaggccaacgccgcccatgccgaagttcactgacaactttctgagctttgcgtcgcttcccccgcgctgtagatggagtgtcgtcgggttttggccccgccaccgccatccttgcttgtcgcccggttttccaggcggtgagctccggtggcagcgaggcatcgaggagggtgggagggacggcggcgggtggctaggatttcgcttcgagccgtctgtgcgtgggtgacacggatatctttcttccttttcggttcaaattctgatccccacaattaagaacacatgggaccatgagttcactttgtgtagaagtttcaatggggttcacgaatttatccatggccccctccatccatctaatgcgttaaaaaaacacacatttacggatatatgtaattgttatatacatgtgtgttgatgtgcttgtgtgcatttcccattaatataaagtagctcgaccagaatctcgtgtgtggcaactaaccttagctatcatggttgtcgtcggcttctatttaagatgtaaattgcccatcatttcattaacttatggacgttttgcatgcctagccaccttttaacaagaataaaaatgggttctatgggaaaagtaggcgtagtggtgaccggtgaagctgtcacccatgggtgcaagacttaatactatctgcgctttcaatagtaatttaacgagggcaaatatttgctactgacactacttagaaaaaaatgttttttcaggcggtcaaaacatgttctcacaggcggcaaaaccttccgtctatatctaaacgacggtaaaaatccctaatttttacaggtggaccaaagcactgcctgcaaaaatcagggggcagtttgaatctttccagacgctgtaggtgctacagtagtcccgcttgtaaaaataccctcagcgccaaaattttttttctcgccaaccccacccgtccctaggggcttcaaatcacaaaccacaaattctcacaaatctcatccaagaaacaaaatccaatcacaaacattgtaaagttgcaacacaaaatcattggattcaaatctacagcaagttaacaacaatgaacatgtaaacttaaaaaaaaacacgtcgtcatcgccggcgaactcctttgttgtatggggtggccgccgccgcctccctcccccctccagctggatctgggaagggagggttggggcagcgagctagcgacgcagccggcgctagtcatcgtcattgcgcagtagggccgtcgtcgtcctgcggtagtactcgtgtgtatagtagtgggatagaaaaaaacaggttatgaggaaatgctttgtgcacgtgtttttctctttaaaatccacaatataatagtatgtactcgatgtactaaatagttaatacatatagaagtttctgatacatgagaactaggagcgagaactagttcttatatgagaaatcatccaagaaagtaattttaagagggcttaaaaaagaaaataatgaaacaacccatgatcaattataaattaagttctacaactcaaattcgaaaagactggtaaggcaacgagcaaacaatgaaaaagttcgacggttcatatttttttttactatagatttgtatcattagatttatcatcgaactgctttaataacatacggtcataaatattcgacactttagtcaaacttttgaaatttcaaaataagtttttacaaaatctaataaatttatgaataatattttaggtaaatttaagtgcacttttttactttctaaaattaagtgtttcaaatggttgagatttaaaaatttgcccaataatcaaatataatgactagagatcggagagagagagtataaagatctgaaataagaaaatagacaatagtagctatagatatatatatgtctagattcatttagatcaatatgaatgtaggaaatgctagaatgacttacattgtgaaacggatgaagtaattcaattactctagatttatttagttattctcatgaaacctcaaatttcagatggaaaagaattatgatattatggtaatatttttgaggtaatttaagtgcacctcttttaattttgaaaattaagcgtttcagatggttgagatttaaaaaattatccaaatcttacatgaacatcaagtataatgaccagagagcgggggagagagtataaaaactcgaaacaagaaaaatagactgattgtttgtttgtagctaatgcactaaagccataccaagagaaccgatcccaatggtaccacattatcgccgatgtgcaaagtacaaaggagttgctagcagaggtgaaatatcgtcatgtcgaaagaggttgcaatagggtactcatgagttagcgcagctgactagtagaacgaagcattgtgcactatggtgggagcatattcccacctgcattcaaggccttgttctcaacgattgaaataactttgttctcatcagtaaagctttctctttctgaaaaaaaagaaataagaaaataggcaatactagctattaaaacataattcaattactctggattttagttattctcatgaaacttcaaattttcagatggaaaatttcacagggtcatctgtcagttctgtcgcatctctgtccacagttgatatatgaaaagaaaaatccatcctgaatagaaaaagaaaaacagaaaaaaaaaccttttgtttttccttttttctcacttgtccctacttgaccagtccttgtccctatctcccctttctcaggtcaaccgattctatccaagatccagtccccctttctccttccttccttcctcgagcctcatttcccccccaatcttcttcccaaaagcagctccatccaaacccaatcaagccccactccccaccaacccccttccctcaattataagcctacaactactgctgattgcttcagactgatccaagaaagggaagtttggttgtggtgcagagaggtgcagaagggggagggagggctctgaattttcaagaaagggaccatctttctgctgctgctgctgtccgggttggtgcttgttgaatttgaggctaaagaagtcggaattggaggttttgtaagagggaaacaatggctggcaaggaaatctaccacaagatgaaggacaaggtactgagtaatggaggactggaggatggggattcttgtttgttcttcctttggcctccatttccctttcatgtttattgtttttttttatttttttgctattcctgtgctatttttggggtaatatttaggtgcaccgttgtgtcgaatcttttccttttcatattagcttgaggggatcttgaaatggcgaaggctagaagtctgaacatgtcttaaaaatcttggaatgatgctaggctatggtgtctatttatttattttgggccaaatctgttgcttaattacgacaatccaatggtttgtggttctataaacataatgagtcccgatgccatgaaactccgtgttgacgttagattcttggagttatcatgtttctcgttcctactagcagaagcaggaaacatgtatcagtggagaaaataactactgaggaaacaaaacataactcgtctagaccagtagagagacaagcatttcaatatgttggttatgggaatctggtccatttcaccataaaacttcaagaacacgatctccggcttttgccggttaagcatgaattttattttatgcttagatttttttggatattcttttttatgaaagcttttggaactcaagaactcgtttgattgacgttgttccttgggagttttagagtttgcagcctggaaactagaagttatcttgaaatgttatactctactcaatgtagaatacacacatcactaaatccagactaaattcattttggtagactaccttatgcaccttctttgtgtttattcttgctgtgatgcaaccaatgtcaaaaaagcgaaaactgtttttttgctccattgtgctggatgttttccgcaagcttatatatttgctttgcttagtgttgtactattagcaacttaacatgcttgacgaacgattatgttttgtttaacaggtgaaagatgcttttagttcgtcaggaccagaaacagggaaaggaaaaacaaaattgtcaggcaagcgtgtcaagcatggttaccatcttgtgaagggaaaatcaaatcatccgatggaggactatctagtggcagagtacaggcaagaaggagagcatgatctggggctgtttgcaatatttgatgggcatttgggccacactgttccagacttcctgcgctcacatctctttgataatatcttaaagcaggtaatatttcaaattcaatgtcctgttaataggcttagcctcaatacttgctgcattgcctacatgctcagatagtaagattgttttgtcatcatgcgtcaattgttccaatattgtatttttactagctacatgtcctttgatttactatggataaaaatgaaccatccaagttctaatgctgttcacaataaatagttgtgtcattcattttttttgtcgttttaaggagcatctgacagtgtctgtacttacagtaaaaataacccattcgctatgtacttttatgtgttaaattctgagtttagaaggtttaaaaaaatggaattagaatatatggaatgaagattgcataatattaaagaaatgtaggaagcattttgagaaaagaaaaacaaggcggagttagtggggtggcgatttaccaccagcatcactactctttttcttttaggtattatacttatcctcaaaaacacagaaagagcaagtcaatctataatgcatatggtaaactataaacagggtaagaagagttgtacttctgttacgcttacaagtgttatctgtgcttgttctacaatctacttgcaagaaccatgctaggaataactatggagtgacctaaatatatagataatgtctatgcaattgaagatagtcaactgaattcacaactgtgctgattatttattgactccttcaacctcagccagaattcttgagcaacccacaagctgcaattcgaaatgcatatcaacttacggatgcaaaaatattggaaagcgcagctgagttgggcagaggaggctccactgctgttactgccatattaataagcagtgaaaattctgtgaacctagtagttgcaaatgttggagattcacgagcagttattagcaagagtggtgtagcaaaacagctttcggttgatcatgaaccaaacaaggagcggcattcaatcgagaaaaaaggtggctttgtttcaaacttaccaggtaaatgaccatttcttgtcaactctttttcctttttttttttttttgggggggggtttagtcattgtaattaacagtttaaagttatagatgttttttactgaggtttttttgtttgctaatctagtgtatctaatgtttagttccacactgctttcttatttggatttatgtccttgtatgactatatactagccatgtggccctcaatactgcccatctatttgagcccgtttcattggttgacattgcatcagatcctaggtccaggatacaccctaacactaagcatacctatgccaatattgcattagtaattaccagcagtggcgtacacagaccctactcttaactgcttctatgctgttactgtcacaacatatgagatgcaatctatcgagcttcaattccaaaaattttttacttgcaggagatgtaccgcgtgttgatggtcagcttgcggttgcaagggcatttggagaccggagcctaaagaagcacctcagctcagagccagatgtggtggaggaacctatagacgagaatactgattttctaattcttgcaagtgatggattatggaaggtgatgcctataaagctcataccaaccatccatgatagattacacctaaatttattgttttgcattctatatgcatacctaacctaagctcaacaaactggagaccatgtcctaccttatttaattctatatacacaccaaatctcagaatatgcatacatgcatgcactacattatttaattttgaacatgaggtactggaggttgagttttgtctaacaggtgaaagtgcttattcctacatttcagctacttcctccgtcccaaaatataagcatttttagatatctacacggtcttcgagatgctactttgaccaacaatgtctataaaagtaatatgttttaaataaaaagagttgcatattatgatagtttgtttaatgataaatctagcaatatcaaatttacatgattgatctttttcattattttgctattaatagtcaacatttaaaaagtttgatttggcactattctaaaaatgcttatattttgggatgaatgaagtatgtaatttggcatgcataagcacatcctgactcatgagttgcgaaccttgatttttctattttcttaagctgcatctatgactattgcatgattgtttttttttttgttttagttgagttctttactctttttatgctagttttcccaactcacctcgctcgttttccacgtgcatgcttttcaaactgctaaacggtgtgtttttttgtaaaaaatttctatacgaaagttgttttaaaaaattatattaatccatttttcaaaaaaaaagttaatacataattaattgtgcaatagtacgtgctccgttttgcgtgccggggaggaggggttcccagccttaatgagctgctaagttgcattagcgacgttcttttatcatatgcaacgattataatttcaagatcatacatatccaggtgatgtccaaccaagaggcggtggatgaaatcaaggacttcaaggatgctcaggcagctgcgaagcatctgacggagcaggccgtgaaccggaaaagcaaagacgacatctcctgcatcgttgtaaaattcctctgctagcagaaacagagtctcatacaagtgtacaattgctaccatctgatggtttcagtgttgttacttttgttgaatattctggttagtcttgtcgaacattgccgattgttgaatgccccaatgggacatgttcatatattatccctacaattccagtggatggttcattaattccttttgccctatcactttttctttatcaaaattctctcaacgcgaaaaaaaaataaattgctgaatttttttatctcaattctgaaacaaatgcataacacaaacatgcaacaaaaattgaatggcctgaagaaaaaaaaaatgctcgcatggggaactagctaaggattaccagctgagtctaaatgtaagcacaacgtttggcttaaaacagcaaacaaaaaatattttatgaataggacttatatatgcttttagcaatttaaaagtaaacggtgaaaaataaactataatgaaaaaactaaaaaattcaaatttagagtggctttaaaggctgagttcagcaagggagttagaatccttccccttcaacatataaaacggaactgtgaattagcgcataattaattaattatatgcttaaaatttttcaaaataaattaatatgatttttcaagcaacatttctatagaaaactttttcataaagcacatgtttaataattgaaaaagttaaatcaagagcgctctcggtttcctcctatcgcgcgacgcatcttatagccgtctatccgtgtcttcgtgctgttggagagacacgattgcttcatcaaagtgaggaatctgtatagcgtccagtattgctacaaaggacaccaccaatcatcaaaactaaagattggctacactagcattgttattttagtttagtttgtaccattatgctgtactcaaaatatacgataaaacgagtctaacattgaatatatccaaacattttaaataattacttcctccgtttcatattataagtcttataatatgaaacggaggaagtacttgaatcgtagaagtaacttagctctgcaatagtaactacgagataccctttttggaaagaggcgcgccttcgtacatatgctaattaggagaagagtgagttgcgtgtttaggcaacgaagcgacttcgtgctacgtagtcgcgtccccatttaataatttaggaagcatatgcgtgaaaaaaaagagagtgttgaacccacggtcccacactagtcactagcgtggaaaaaaagggagtatagaagtaggaaaaagtgtaccggaggtccctgaacttgtcaccgagatacgaaaatgtcctccaaccgcaataccagatatggggggtcccctaagtatgcaataccggtcacccgaggtcccagggcaggatttctccccgatttgtctgacgtggcagcggttttgtccaccgtggcgctttgacctcggtcgtcgtcgctgacttagcagcccggtagttaggacaacccgtggcgcactgaaggggcattcacttcacttctccctcctctggaaaccctagatcggcgagggcgacgcagctagcgatgaaggcgattcggagcaggctgcggcggacgggcggagtgtcgtgcaggcgaggcggtgaccggcgtgcctctaccgtcgactacctcgagctcgaggtggatctgggggcggcttaggcgcggcgaccagcagccaccttgggcgacctcgaggttgcatcggcgagtacccctccaattgggaatccgaatctggcaggtattacctttcgtagttaactgtgtgtgcttgcatggtaccagtgggatttgggaagtgaaattttttatattgtgagatgccttttttatctgggatttgatgtaagttgggagttttttatttaggtatgtagttgattagaggttatttaggcttacctctgtgcaaaagtttcgatttggacatggtatgcatgtgtaggtcaattataatataccctaaatcagttttatatgttgtttagcatgaaggggatggacgtgttggacactctcgtggttaggtttcatatgaatggggtttttctgttagatgggagtgagaagaagtattgcggtggatctgaggctttgtcatatgtagatagggataagatttccttgtcggagttatttggacacctgaaggagcattgcaatatgttgtcagggacaatgctccactggttgtttcctggtagggatttgcaaacaggtctaagggctctttgtgatgataaggcttgcaaattgatgtgtgattgtactggagaattggaggtggcagatatgtatgttgaagagcccaaaattgtggatttgtgtgataagtctgatgatgagagtgatttatgaggtagagatggaattggaagttgagagtgaagaagatggggaaaaaggggatgtacatgtagatgcatctaaagggaaagaagttgacaagggtaaagcaatagcagaggaggaaactgataggaggatagttttgtaccaatctgaatcagcacctctagttagccatcaaccttttagcagtgctcccaaagctagccatgaaccttcagacagttcacccattccaaatcagccaacatatgacactgaacccatagctaacgatccaccttctgatagtgatgaagatagtgactatattccaggggatgaagctcagtcagatgatgatgaagaggctgctgagatagagaaacattacaagaaggtcaagaggaaggtgaaggcaggacagctagagaacctggatgacttctttctagagaggggacaaccaagtgtgcatggtggtgttgaagatgcagggaatgaaaccccttatgcaaacagcgatgaggaggactcagtagatgagattggtagtgatggggaggtgaggactaagagaagtaaggaaccaaggtacaagaagagtgaaggtgtgcctaagtttgaactagggatgaagttcaactgtaagaagcaattcaagaaggctattacaaaatatgctcttgcagagaagaaagtgattaactttattaaggatgatgggcaaagggtaagggccaagtgtgattggcataactgtccctgggtatgtttgctatccaaaaattctaggtccaacagttggcaaatagtaacatttgaaaatttgcatgcttgtccacctaggagggatagtaggctagttacctctgttagaatagcagagaagtatggaaacttcatagctgctaatccttcttggctacttgctcacatgaaagctattgtacaagaggaaatgtttgcagatgcttctgtggctaagttgaagagagcaaaatggcttgtgcaaaagaaaaagtttgaggctactaaggggcaataccagcagttgtataggtatcaactagagcttcttagaagcaaccctggtagcactgtggttatcaacagagagattggcatggttccaccagtctttaagagaatctacatatgcttggatgcattgaagaaaggtttcatagctggctgtaggaaagttgtgggactggatggatgttttttcaagagggcaaccaatggagagctgctgtgtgcaatgggcagagatgctaacaaccaaatgtaccctattgcttgggcagtggttgccaaagaaaacaatgaggaatgagattggtttcttgatttgctttgtggggacttgaaagtggggacaggggcaagctgggtattcatttcagatcagcagaagataatatcattacaaactgcttttttcacttgtaaatttccatcacatgtcactgaacctttattttttgtatttccatacagggtatcctaaatgctgttgagaagtgggcactggaggctaggggtggaaacgagccgagccaagccttagctcggctcggcttgcaatggctcgcaacaagctaggcttggcttggctcctctcggttagggaaacgagctaaaacatgagctcggcttggctcgtttcttggctcgagccagctcgagctagcttgcaagccttccgttgaagctatataatttgtaatcattaagaaaagcaataacaaatcatcaacatgtaaaattaaaataactttatatattcaattcatcaagatctagacgataaattacatattaacaaataataactccactacaaaataaaatcatccatataaatatatgatggcctaggctcacgagccagctcgggcttggcttgttttagaaacgagctgaaaaggaggcttgggcttggctcgtttggcattcaagccgagccgagctaagcgagctcgagccaagcctgagctgagctcacgagcccgagctttttttccacccctacctgaggctgagcacaggaactgtgctaggcacatttatgccaattggaagaggcattttcctgacaagcaattccagaaaaagttctggaggtgtgcaaaggctccctgcaggatgttattcaatcttgctagggcaaaacttgctcaggtgactcaagctggagctcaagccatactgaacacacaccctgagcattggagtagagcctggttcaggttaggttctaactgtgactcagtaaacaataacatgtgtgaatctttcaacaaatggattttagaatctagattctatccaatcatcacaatgcttgagactattaggagaaaggtcatggttaggattagtgatcagaaatcaaatggtgcaaagtggacaaatgttgtatgccagggattgagaaaaaactaaatgtttacatagctgagtcagccttttgccatgcaatttgcaatggaggtgataattttgaggttaatcaccatgaccataggtttacaatacatttggacaaaaaggaatgctcttgtaggtattggcagctgtcaggactaccatgccctcatgcaatatcttgcatttactatagaaccaacaagctagatgagtacatagcaccttgttactatgtggatgatttcagaagcacacatgtgcactgccttcagccagtagagggaatgagtgcttggccggaggatgatagagaagcactcaatgctcctggatacataaagatgccaggaaggccaagaactaaaaggaggagggagatgcatgaaccacccaagcctaccaaaatgtccaagtatggtactgtcattagatgcactagctgcaagcaaattgggcacaacaaatctacctgtgcaaagcatcatggtgcaagttctagcaacctaggcagttctgagtagcttccatcaccaagtcaacagatggtgttatcaaacacaccaggcagttctgctcaaagcaggaagaggaaagctgtcagccttactacaacaagcaccacagaacattccaagagcaaccaatcaaagagcaaggtaaatggcaacaatttttcactattttcactttcgctaactttacctaattgccatactttcccactacaggcagcaatggatagccaggaagtggtcagggttgctgcaaaggccaaggtttcaacagctcagggtggatctgctagagtagatcttcaagcaatagttccccattcaaacagctctactactgcgtctgtgaggctcacatctggcaaggcaactgtcactgtctcagctcaagagcctacaaaaaacaagccaaagaagagagctggaggattacttattcttctgccctgggaagcaaagaagctttgaatgtgccattgtcagtaatgttagtgcaatatttgaacttcttttgtgatgtaatggcagactatttagccaagtaatctgtgatgccaaaatgtttggctatgtgatctctatgatgccatgctatttggctctcttatcagtgatgtaagacaaattatttatgttgtcatgccagactgttaggctagctatgtcacttattatgtgtatttgaatgtcagacaatgaatgtttgcttatctgttactgctggaagccaaatatggagtcacattttgcattgtcatgaggtttgctgcagaaattggcaggtttcatacactgtttgtatttgtttcatttcctgctgacatggacatttgctgcagaaattgacatgtttcattcactacacaaatggatttttcatacaccgcttgattttgtttccctgaacaaacaccaaaatttgcacaacctgatacacattgcatgctgattttctttcagattccatattgctcttaacacccactcattcacaaatttaattccaactggatagcacaagtgcacaactgatacatacatattttgacacatcaaaggaaagacttgatcacaccattcagtccacatagcatatagacaacacacatctaacaccacacatcagtccacacatcaacatgtctcattccttcccaactaacaccacaaacagcataaaaatacgtgacagcatacagattacaaggatttttttctccttctctaacttttgattcctagccttcaagcttctaattttttcctttttcacagcaaccatagccctcacatcatctatttctctcctctctcgctcccccttagcccgactgtcttcaacttccttatgcaacaattccttctccctcctcaacgaattcaccatgtcccgcaagtcattcaatagctcactgatgaaactggaagtcgggtcgtcacaccatgcccagaaatcacaccccccaacctgaaaccacaaccctacattcaaatcccaaaccgtccaaatccaaattcaacaacagaacaaccaaaagccctcacttaccctagcatgttaacacttgtagtatcggcgcccagggttgtccgtgctccatgagatccacctcgccgctttcgccgggcatcggcatcggcacatcaccgcgggttggtaatccagaggaccaacccggtaaggcacgggagaaggcttccactgatgggaagacgacgagccgtcgctcatcgagctcgacatctccgtaccgccactcgccaagtcgccgccgctctacaaatcgctgccgccgccgccgcccgctcgctagggtttcggtgtttgggggagaagcaaaccgcgccaaacatttccctcgttatatcctaactaccgggctgctgagtcaacaacgacgaccgaggtcaaagcgccacgatggacaaaaccgctgccacgtcggacaaatcggggagaaatcctgccctgggacctcgggtgaccggtattgcatacttaggagaccccccatatctggtattgcggttggaggacgttttagtatcttggtgacaagttcaggacctccggtacactttttccatagagaagaagtatataatacaattttatttttttgaaaaagccatcgattctgtcgatgccgcagtagagcccattgggccaaacctggcccaggactagaatacgcgcgggccaagaaacagggcgccgtgtcgcacgtcgaaaaccctaaaaaaaccaccgccctttctccactcctcccgacgttgccgcctccgcctcctccccctccatcgccggcggccgcttctagccggagagaagaaggcatgccgcggacgagcgtggtcgagagccccggctgcccgccgctccgggccctcaccaccgacatcctcggcctcatcaaaggtagcccgtccccacccttcccgccgccgccgccgccgcggcggcggcgtgctggtttgcctcctccggtgagagggctgatcatgttttgtggtattcatcctcaaccgcgcagtcgtggaggcccgcacgaagccggcgggcgtcgccaaggtcgtcgagacgtggggcgcgcccgacgcgccccgcgccgtcctcgccgcctcgctcgccgaccgcgccgtcgaccccgtgagtgttcgcgacctcccgttattcctccccgcggtaattggtcagagtatgatcctcactgcgttcctcgcttcttctcttcttctacaggttttggccgtggcgcggaagaacggcgtggtgagcaacgcgtttgcatttggagagctgaagcactcgttgagcatttttgtgctggttgtttattgctgtgggttttgtgtgtaggttgagctgctgaatccactgaatggggagactctcgcaggcgtcaacgctgctgctgggcgggcggcaccggctgatagttctgcagaagaggaccccttagccacgctgcatctcttcagaagacatgcgctggactcatccatgtaattttcatttgatgctctttggcaatttattgtgcacactcaatttgccatgtagatatgggttatgaatccacctgcatttgtggtctccatgctttagtgttctttcattttgtagataatggcatacttatgatgtattcattgcatatgtcaggttaggcacatttcttgcttgtacagagaaggggaaagcatatgtcaagtctgtcgcaaaggaaaatgcatcctcggacatggctgttgggccatcaagctcatgggatgtgagcaattcgggtacagtgcaattttcttcagtggatgctggtgaaagctacgcgatgttcggagggtgggtttacaataatctttatattcattatgtagcatctaagtgtactataaaaaaatattgcttctgattactaactactcaattggaaacatgagtagcttttatgaaggttgaggcgctaataataatatttcattttaggaaaggaatagaagtcaatttgtgggatatcacatcttgtagtaagatatggtctgccaagtctgtaagcactcactgactcacaccttttatcctttttctgggtctacttgcacttttatctgatgttatagcagactgccacgcattaactacttcattcttttttttacctgaagcctcgaggcaacagtcttcagatattcactgcaccttggttcactgctggaacttttttgtgcaaggatgaccatcgtaaaattgtagcctgcacaaataatcatcaggtattgctgatatgctaacaaaaaagatccattttcaactagtttggtcaaactgctctgtttctgtattgttgtctcattgaaactgatccaactttataatggcaaagcagaatgattgcaattgattagttttttcatgccagttagttgtcatgctgtatagtttcctcgtataataaatcatgaaaccgatactggattatgctaaataggatgttctcatacatcagttttcatctttcaaaataacactgcattgatgaggttttctcaatatttgtacctgtggtgcttcttctgattgttaggttcgcttatatgacactgcttcccaaagaaggcctgtaatttcagttgattttagggagtcaccaatcaaggcagttgctgaggacccaaatggacatgctgtctacattggtacaggaagaggggaccttgcttcctttgacatgagaacaggtattatatgatagtagctggtgtgtgataattcttgctgatggcacttggaagtcaaaatacattctgaattatattttcagagttgtagcttagtttgaattttgtatctagtatactatagttcaaataaaaatctcttttcattttcgtactctaaagttcactctggcatgtgtatttcattgtactattttttggctaccatgctctgatgcttacataggtggtacaacattggttgtttatttattttcctgatcgattcatagttagttcatcatgtgctatatggatacatttaactgcctggagaagttttatttaaatttaacttaatattctgcaatgagcttatgcatcatgcacttttttggaggaacagagaaaacaaatatgcatctctgtgggtttccaggaacatcaactgtgaatcaaaaccttcggttgaatattcttgctaaaaatgcacctcctcaattgattcctgtgtacatccctcaactatagcatgaataaagttgtgctgttatggttcttgtactaacctgagcaaatatgccaacaaattttcaggggatttgagactactaaactatctgtgagtgatattgaaataccagataaattggtttcaattcaggcgttagaaagatatcttgttcatgtcccttatcagatatcaaaagatgtttgattattgtatgcttacaacattctagattatattctatgtaaattccttacactttgcaatcggtattcactttttagttctttttaatgtatctatttacagaattaactttagcttgcacccttttcccaggaaaactacttggttgctttgctggtaaatgcagtggaagtattagatctatagttagacatccagagctacctttgatagcatcttgtggtaaggctgcatattttgaaaaaatatttttccaattatttcatattcatttattttgagcgcaaatttattggttacatgtatttgtcttgcacacctttactagtctaggttattctgtttgcattaactcaggaaaccaatttactattgtaggactggacagttacttacgcatctgggacacaaatacaaggcagctgctctctgcggtacgtttaacagttaatttcatagtattcaaatactatattttccatgcaattaacagatactgtttcagttctgcttttatttgccattgcttcattttggacataccatataagtgaattattgtggtcatgaagacatcatgggctagtcaaacattttagacttaaccttggggtactcttttactggttggcatgcgcaagtgtattggtattggtattggtattgatttttcttctggccacccttttgctgtctagttaattgccttttggtggttgttttgctagtttgctgcattctatttaaaattaagatatatctcccttcggaaattacgtgcttcacagtgaagttataatgtaccatgattcttgtgcaacttgaaactgtgtccaggtttaaacattttatccttgtagttgcacgatctaatgctcttcactgtcctgtttcgtaacaggtcttcctcaagcagcacctgacagctgtggttattgattcacatttctccactgaaggtaccattccatttattactgttctttgtttaccaatgtaattccagcacacatcaccttaaataatagtgagacttaatagagcagtgcttctattatcttgaatagaagggctagttaagatagtaatctacatctttcagccctaggaccccaaagcccaagatgtagtgctactcttcaaactttttgaaacgaagttcattgccatatcgaattgattcatgaagaattccacgtgttcatctacttacgctcttgttggatgttcagaactcgaggagactaaatccaagcagccagatccagttggggcagaagttagaaaggaaagaaaggaaaagaagaatagaacgagtgaaatggatgaagacgaaactagaatgctcgaccatgatgacagtgattctgaaatgcacacctcaaagagaaaaaaatctggtgaaaaaagcaaaggaatgaaaaagaaaagcaagaagcagcaagtcgcatagataggacacacaacactggagtcagtgttgaccagttttgactttttgactaaggtgctttgcccttcactcgattttgtacaatgaatatcatttgtattagagtttattcgaactcgaacaatagcacttatctggattctcaattcttcaaatacttgccgggccaattaagtattttactatgccttctgagcaatataaaagaaatggcgtattatcaccccttttttgtgtgctagtccgtcctttcttatcaagctgaagagtttagttttgatcatagtgtttccttactctatataaattgataagagaagtgcacattttgtccaattttggtccatcaactataaaaccgttcattatagttccttgactcttggaacagtccacatttcatcctacatctaaactgggggtacggtaacatggcgcttgagttgggtccacatgagcaaatagtaacggtatgaatatagcaaccataatgaacgacagtgaaacaaaaacttgaacaaatactaaaaccttgcctccttttcctttcccatatctcaaattttttctttttgaacaaatactaaaaccttgcctccttttcctttcccatatctcaaattatttctttttgaaagaagctatatattatttaagaaatttctaattaagattgtcatgtcacacggagccacatcaccaaaagctacgaaagatgaggtggtttgaaagagatcaataatgacgaccctctaaaactcagtattaagaaaacatagagtagaaaaaaaagtaagaatagaatgtcatactcattgaattcctataagattctgaagcataggaaagtttcaaattgtctttgattagcacatagaaaaaacccaaaaattctacatgaaaaggaaagcatgtggtgagacctcatgtttatttttatctaaaattgctctaggatgatccattccataaaaatttcaaaggaatggataggaaacaattttgttttaaagggtttgataggataaaatcagtattactatggtttttcctttgtttcaaattcatgtggttttttctttgtttcaaagatggtctgaagccttgaacgaattcatagtgaaggactaaatttggaccgagcggtcaagggattaaatatggagcttttccaatcgataatggcatggaagtagttagtggagtgaaatgagcttagctgaactggttaagttccttgcggtggaactacccacctaagtatcctatatttgatacgtgtgctcgtatttacggctaattattttttcagtggtagataatgtaattgttgatagcgagacacctctctttcgttgtaaagttgttagtggaaatctgatgcacgccagtttcctactattaatgccaggaaaagaaaattgcccatttccatgagtggtacaaggggaacaaaattaatctttacatagttcccttcaaggcttgaataactttattaacatcgtttccgtatgaacattttgcttatctataaactattaacttatctccatatatatatagcatcttcagaaggatcctggcaatctcctcatcacaacaaccatgtgatcatatgacagccagaacaaaaaacaatggcagtcttctcgcaacaacagcaatcatttgaccgccaaacatcccaattgtgctggataatttgcagagttcaacagtttcagaccattttcctcccagccttcagctattacgctgtcgttctcgaatccggggacaaactcatcaaaatctgctaacgatttaagttgcctgttcagtgaagctattgtcttctggcagtctgccagtttccctgctgcacgagctagctctttctcctgcagaaagtggtgacatctcattagtagcatacaaactaaaagttttagtgtttgtcacaaggcttgattttgcaatatatatgataaatcactgaataaatgtacaattagtactatgaaattcacctttttaatgtgaagttctttacttgccataggtttcattggttggctaagagctctgctggtaaattgctctttcaaattctgacattgcactccaagttcagaagattgtgctttctctttgtgaatttcctcctcgagcaaacggatcttcctgcgcaattcctccacttccgcctctttgagctcaaaccgactggcgaatttgttcttctgggcttcagaagcatccaatgcagtaatgtaggcagatgacaagttcttctggctttccagcttcttctccaacgaactgacatgatccttcaggcgcatggcttcagcctgtgccaacctgagctgggactccaatcctgcagtcaatggcttgtgcttctcttcagcctcttcaagcatcttaaccttctcattcaggccagcgatttctgagtttgcagattggagctgagatctgagctcatttgtctgcacacccagtgcctctagatcacaagaccgtgtcgcgagtttctcagacagtgccctctcctcctggattttcagttccaagatgctaactttcttctgcagagatgcaatttcctctcgtgccgactccaactcatgctctgtacccttcttcttctcttccagagcttcgattccatggcacctcactgcgagccgggttgaaaacgccttctcctcctccagcttcttctctagaagagtgatcttatcaccgagatttttggcttcagattgtgatgcttccaggtgaccacgcagctctctcctctctgcctctagtgcatccatctgctgatacttagcagccagctccagcgtcagcgccttttcggactcgagacgttcctccagaatgcggcccttgtcgagcaagctcgtgatctcgccatgggcgagctcaattctcccctccagttcattcctcctgttctccatggcttccatttcggtttccatggaatgtttcactcccttgacaaggttcagttgcctctgcaattcgaccgatttctcctctgccaccatcgcccgatgccgggtgttcctgagctctcgctgagcttcgtgcagcgccttctccctgtccgccttctccattgccagcctcttgatcttctcctcgagcttcaccagctggacgctagcggcgtcctcggcctcgctcttggatgggctattcgccgacgcgatcttctccatctccaggaagtcatccatcatgccgatgtctgcagccgcgaggctcgcactcctcgtgatgctcttgtcgttcttgaattgatcgagctcggtgatcagaatcgaggcccatgagtccgagcagtctgactggcaatcggtgactgactcggcgtagaccgagcttggtgcacgcttgagttctctccgtgcattggcctgccaaaaattctcacagatgttagtgttagagagagttattagcggactcatgggccttgagttggtacgtgaaactaatgaaaatgaagattaagtaagggcacggaaaacaagaaatctcttagcgcatggttagatttatttgacattttagggtaacttctatatacaaagttttcgtgcaaaatatatcctacttcctccgtttcataatgtaagtcattctagcattgcccacgttcatatagatgttaatgaatctagacatatatgtgtagctagattcattagcatctatatgaatgcaatgctagaatgacttacattatgaaacagaggaagtattatttagcagtttgaaaagcatgctaacggaaaccaaggtagaatctacgtactaatcagaagagatttgcttcggtcctggtgcatggttcctcgcggtactaaatcattttcgatcgttaaatctagctaggtagggtggacattgttagatccaacgatcgaaaacgatttagtaccatgaggtactttttattgaactggagcgaatttctgatcagaaaagaacgggaactgtccaaaatgcagagctgttgggggaaaaaagaggaaatggcattacctgcagccttctgcattcggcttcgagcttggctatcttcttgatgctctcaagctgctgcttgctggccgtctctgctgccctcctgttcagctccttctcgatggtcctgagctccacctcctccgacatggccagcagctgaaccttgagagcagagttctccttctccaaggaggccagccttgagctcgcatcagtttcagcgttcaccgagaactcggacttcgcctccagcttcgccttcagctcgactactcgcagctcgaggtcggccttctccgactcccattctcgcgactgctgcgctagcgcgtcctggatgccatgatccagctcttccttggcacgccggagttgcctgacgcattccttgagggcgccgtcgaggtgaacgattctgtcttccagtgttgagttcttggcagttgcagcgttcagctgggtcttcagtgatgctatctctttctcggccttctcccatcctagtaggagaattgcaggtttttgttatgaagatctggcttgtcagttgtcagttctatttatgcatgtgtagaaataacactgtttctaggatcagattaaaaaaagaactctttctaggggattaagcttttgcttcaaatcattagtacattattcgtgaaaaaaatattagtacataaaacttaaggattaggttgagaggaccttagaataagaatgttctttttctaagtcagggaattgataaaactacaaatgagcttttggaccacatgatcagtacaaaaaattaaaagcaagagacaaggaacatatctgcatatgcatatgcagtatatccaggtccaaacagagtcatttcttaaattttttggcccagcgaaaaacaataatttgtttgaatttttgcttcatgtactgaaactgtacgattcagtcatgtttaacatcatacctagaacagcttcctccgcaacttttgaatgctgcttcacaagatcatcttttgcacgtatgtccaaaactgcagatgacagtctctcgctcaacaccttcaccttcacattgtcatcctgcgcttccttcgacgagatctccggtgattgaactgagcttggagaactctttggagtatcctaaccaagaacaaacaggatcaaacattgtcctgactagaaagtgcaaaattaggaggctattcatgcaaaatttcttgtgaacttcagctattagtcatgcaacagtattgcagaacaaagggagtggctgaagtaacaataagaaacctctattggatgcatctgaaaatttggaagaatcaattatcaaagtattaaatactgttttttttctggacaaaagcaaatgagcacgtgaagtacgacatggtactttctgagatcatgttcttgcatgattcccaacattatgctcagagaagcacaatgattaaggggattcttaggactttgagcaccattactccataatcatcatcatattaacttctatacaataggacacccctaattaaatgcacaactccatcagaattccagacatttctttggaggtacaggtagagctgatggtcaaagatcaggaattcacaagtaaatgttgcacatgaacagaggtgagagagagagagagagagagagagagagaggcatcttgattgctctgtgccagcagacacattatgaggcatttgggttgggccaaagggtgatgctgcagcacatggagatggatggagtggccaccaaagaaaatgcatcttgccctcatgcaagccataattcctgcagagaaaagctagtcccaactaacatcacatccttgttgtccatggataggtaaggcttgtcctataatcccttcccggtatagaaacaaacaggacccctctctctcattctctccttcagtttacaggcctacccaaaaactgtgacatatgatcatggactaattgccagtgtcacctaccaaacaaaggaagggaaactgaatctatcttacagtcccctcattttgtcatgtggctagtatgattgggagctgctatgtggatgtctacgaggatgtcgcaaacgcgcgattttcgcgatatcaccagacaagagaataaacctgctaggatggatgaatcatcaaacagaaagaataattcttgtaccctacatggtacaactaggattggtcaggaagaactgagctgtttttatgcagaggaactctgatcctccatcaaaatctttatctaatgccatcagagcttcaaatcttaaagagttcacatctgcaacatggtggtagattaccaaagcttccagcctctacagatctgaaaccggatgaaacctcacatgtttgccatatcagatggacccttattttctctgtactgcacatgttacatgatctgttcaatggaaggagcgtagggctcacaaagtcaattgacaatcatcaattcgtttgagcatgcttgcacaacactcctagacactagacaggtattatcattcttcaacatttgagcctcttttactgttacccagttactttttcctgctccttggacccattggtagtttgagaaatgtgagataaacatgcggaaatgaccgcgatttcggaaaaaaaatatgaactttattttccgagaacacgcagaagagctgcgtgtctttggattggtaggaaaagattactgcccaattatcgtgatattctaatattgcaagtagtacctactgtttgactttaaattgtgcaaatatgtataaacttctgaaatgtgaatgcagtatacagggagaagaagaaagagagtgacttgttttttttttctcacctgttcatcagacagcctctcggatggagaagaaaccgagctctcggtctcggccgggctcttctccgtcgatctccgccgccatagccagctccggcgatccatccctggagctctctacaccattcggctcaatgccgatgcttctgcgcctcaatctctctgcttatctcactgtcttcctattcagcaatccaaattcgatgagttcatttttttttctgaagaaaaaggaaagaaattttgcctcttatattaataaagcaggaattcgatgagttcatggtcgcacaagaaaccaaacacacagaaaggaaaaaaaggagttgcagcttttgtatttttgtccgtccaagaacacaatcaaaaagccttcaaaaagtcaacttgatacagtccagtgaccgtgagacaaaacctccttgatcgagacatgaaattcagctcaagttcagaagtttatcagtgtgcgacgaactcacccagaaaaaagtttacaaatcctaccaaattaccatcccggcaccaagacctatcactctatcagagattcagagccaaaatttcacccaatgcatccacatctaatcagagaagaaacaaaaacagaaagaaaaaaaaaagaaagaaaccatcctacctgccatccatggagaatgaacagaaaacaaccatcagatggattagctcgtactgggccaatccaagaacaagcattgcatatcgttttcacctcaaaaaccacccaaatcaacccgaaagatttcatcaagaaaaccaaaaatcccagaacacgctcccctccactacaaattaatcaccaagaaatgggagaagcgaaggcagagtccacacgaacaggacatgaatccaagcagagaagaagagcagtggagcagcagcacacgcacctcccggaggaggccgagaagcgtgacgagccgcggccggaaggaagcgaggcggcgcgatacacgagacccgacccgctggattcctcctcctactcttcctcctttacctcgcctatttaaaaccgcgaggtcggagagtacaaaaggagtgtgaaaaataaatacttgaaaaaaaagagagaggaagaaaggtgtggcgtctcaatagggagaagaaagaaatggaggcttcgatgtggcattttcacgcgagataagggtttgatgaaaaaaaactgagaaataggaaaaaaatacagtattttaacaatgataagggcccctttgaatcaaaggaattataaaggaattttatagggttgaaatactataggaaatttttccacgtagccctttgattcaaaggattgaaattttccaaatcctacaaaattcctatggaatggcttgttgcatataggttttagaggaaacttagcaagaggtccaatctcttggtaaaaatcctttgagtctatctctctcatccgattcctgtgtttttcctgtggtccaatcaaacgatcattcctgtgttttgtaatcctctgttttacacttacattcctgtcagaatcctatgtttttcctattcctccgtttttttattcctacgattcaaaggggcccttaatagtgcaaatgttgaaaatataatcataactaactgggtgacccgcgcaattgcgcgggtagcacccaaacaaaatcatatatttttttaatatgattttacttaaaatttattaaatagctatctaattgtcttaaaactttgaaggactaaaccttatcatccctgacggagcgtggagctcctcaccgggagaccgcgcaggcccccctttgccggttcggccgggggcgctaagtgaggttcttcgccctcgatcgatctggagaatgttcgcgagagagcaagtgcacgagacacgggcgatgtagacaggttcgggctgctgagaagcgtaataccctactcctgtgttctggtggatctgtgtgtgaaggagttacagagagccggagagccagagagttcaggctccagaacccctctagcctccttttttcttctttttttctttcctcctcctttttggtgggcaaggtcctccttttatatctcaaggggataccacatgcaccacttctacctacttttcttttgggtggggacctaccctatcttgaccaaaacttagcttgcaccttcgcctggaagttaaatcacaacttgtccttgagtgaggctcagcgccgtcactcgcctgacaccggggatctccctgttactcccttattaatgggcggagatttgccatggctgctttccaaatgaccatccgacgagatgggtcatacctacctccactccaccggaagcagatgcatcgtgggagcacggttgtctgccgatgacgcgaccggcgtcagaccagtcacagaccggtcattcttgtccaccacgtgtcagtttagcatgctacacgtctgcccttcttcatacaatgacttccttgcaatggttgcgatgaagcctggaatgtatctggccggggctgacgtgccaactccaggagttcccacgccggctccggctagggacgagtgcctggaggctctcatcattccgacgggacggggcgaggcgtgtgtcaggccgcctgttgccacctaacccgcgatctgaccggtctgtgaccggtcacacactgtgacctgtcacggaccgaacgagtgtgctacgctgcattaaatgcggcgtggggcgctcgtccaacccgcaataaacgcggttaggtgagcgccgctgtgctcacctaacccacacacgtggcgccaaacccataggggtcggggcgccccagctctcggggccgaaacgggagcggcccgacccctcggggagacagagggaggggcggccacatcaccctcgggcccgaccccccccccgagggggtcaggccacgtgggtgactgcagctgccccaaacctctagtcaagatacccccggtcccatgtcaccgacagtagcccccggcgttacgccagggcgatcgcccccctcgagggaagcgctcgggcgtgacgccactccttagacctggtgacagatggggccggtctctacaggcagcagaaacccagcggtcgcaaatcgcgcacatcggcaaggaaaaaccgaccgacaataatgagcggctttctttaagaccgctacattacttaagtagcgcgcgaaccgggacgagccagttcgtttcgcctggagatgtgatgacggtgcatcggtcggcgagcgtagttaacgcgcgcacgatatgtcccatctcgactgccacggccgcacatccgcctcgtgcgccgcaaacgggcgagcgggattagtggaggcgtgggcgcgaaagacgagggggcgaggtagtgggcgcggggatcgaggagccgggcatagcgttggcaagggtactaagacatcaaggaagggatttgtttccttcctctcgtcactcttccctttgcctttgccacttgtgctctgactctccatttccggcgccctacccttgccatactcgctcgctctcaagctcctcctccgccggcgtcatggcacggggctccgcaccgctcgagggtagcgtgctgccgccttcccgcatcgtgagcgagaggcaggccgggctgccgcgccgattcatgccggaatctgccaccggccgggaggtggtcgcgctgggcgagggacgcccggcgccgcattacccggggcggtccgtcttcttcctctctttcgtaatggcagggctggtcccgccattctcttctttcttcatggatgttctggagctttatgatctccagatggcgcacctcacccccaacgcggtaatgacgttggccatcttcgcgcacctatgcgagatgttcatcagggtgcgcccatctcttcggctgttccggtggttcttcaccgtacagccggtgttgccaccgtcggtagtcggtggctgctactttcagctgcgggggccagtgctgaaccgctacattccctgcgtccttcgcaagaagtgggacgactggaagagcgactggttctacacccctctcgccgacgaagcgcacctccgacttccgagccagcccccggcgcaggcctccagctggcgggcgccggtagatctgggagatggctacgacgccgttcttgaccgcctggcgggtctgcgatcccaggggctcacgggggccatggtgttcggcgactaccttcgtcgccggatcgcgccactccagcggcgcgcccggggcgcctgggagtacaccgggtccgaggactacatgaggacccaccaggggggcagatgggactgggcccctgaggatttcaagatggtggtccaacgggtgctgaatctcagctccgtggaggcatccctcatcccccaaggtgtcctctccctctgcagcgatccagagcgcgccaacatcctgaccatcatgcaagcggtcggggcgtcaggggagcgggctcctcgaggccacgatggcgcgggcgggagccgcaggggggaacaatctaccccgggagggggtcgtgcttctgggccccgtgacgggggcccggggggcagccgccctgccgacgcccgggggaagaggaaacaggaggataccccctccccatctcctccccgagggggcggggcggtgcgtgccagcagcaggcgcccggagggtgctgtgccgacgtcgcagcccgagggggagcgaaaaaagaagcggctccgcaagatggggggggaccgaaccatgccggggaaacctcatctcccccccaaggtggtcgtttagccgacctcctcgcaggttcgtccccgcgcccactgcggccgtattcattctcccaaggcgagttttcacttacccgtttctttttgtcttctggtttttcttccgctttcagcgagattccgtcgcgtccccctcgccattccatgtccggccggtctgaggccgaggagacagcgaccgcggaggcccggaggcgggaagctgtccggcgagaagccgcggaccgcctccgagaagctgaggaggctgcccaggaagccgtccgggttcgccaggctgaggaggccactcgggaggaggccagactccaccgggccgggaagtcagcccgggaggcagaggcgacgcgcgcacgccaggcggcctgccaagcccccgacccgactccgcccgaggcgacgacgacttccgaggccacccacgacgaggccgcgggcgcaccgctcggacccgacccttcgggcgacgttcgggacgagccagcctcgggggacgcccctgagtccggcacgtcaattggcgggccgagccgcacagcgcccacaccgaggcggctctcccctctgccttccgccgctccactgaacacagagcccctcctgcaggccctggctgccgcgaacacgacggtgctggacgggttaggtgcctagatggaggtcctgcaagcagagcgggcggagctcgacgcggcgtgggcgcgcgtcgaagaggggcggcgctcggtggaggccatggtggaggcgggccgcaaggcataccgccggcacgcctcagagctcgaggcccgtcggtgggagctggcggagatcgccagggaggtggaggaggagcgggagactgccctcatcgccaccgccgtgctcaacgaggcgcgggacgatctccgccttcaatacgggagccgggtggcggagctagagaagaaactcgacgccgcccggggagtccttgacgccgccactgcacgggaacggcgggcgacggagaacgaggcggcgtcccggcggcgcgaagtggcccttgaggctcgcgccacggcgctggaagagcgcgcccgcgcgagggagagggacctggcggaccgcgagaccgccatcgctatccgggaggcaacgctggcggcgcacgaggccgcctgcgccgaagaggagtccgcactccgcctccgcgaggacgcgctcaccgagcgggagcgagctctcgaggaggccgaggccgcggcgcagcggctggcggacagcctgtccctccacgaggcagcgcgggaggagcaggcgcgccgtaatctggaaggcgcccgcgccgagagggccgcactggatcagcgggccgctgagctcgaggcgcgggcgaaggagctggacgcgagggcgcgcagcggcggggcggccgcgggcgacggcgatctagccgcccgcctcacagctgccgaacacaccatcgccgatctgcagggcgcgctggactcgtccgccggggaggtcgaggccctccgcttggcgggcgaggtagggcccggcatgcttcgggacgccgtctcccgtctagaccgcgccgggcggcaagcgggcctctggggcgagcggaccgcgaagtacgccgccaaccagggggggcctcgcccagcgcctctcagagatggccgggactctccagcggctccccgaggagctcgaggagacgatcaagtcatcctcgagagacctcgcccggggggtagtggagcttgtactggcaagctaccaggccagggacccggacttctccccgtgggcagcgctggacgagttccctcccggaaccgaggacgacgcgcgcgcgtaggtccgggacgccgccgaccacatcgtccacagcttcgagggtacggcccctcggctcgcgttcgccctcgactccgacgaggagggcggcgacggtggtgtggacgacagcgaccacgaggccggcgacccgggagcctcgaagtgagcccccaggcccccgccaatcttaaatagtttttcctttcttcttccgaggccttcgggcccccttcttgtataaactaatttaatctgcaatcaaataaagaagaaatttctgtgtcaattttatttgttgtgtgtatgagacgaggatggtctgtgccgcggtccttctgtgtcttggcttgaacaagggctcgtgcccaggtcccagcctcaaacggcgcgggtcggggctagtgcctggggagatgcacgtgtcgagactagccaggccgggagcgtggtgactgagggttatggggacccgattgtgggcctttgccgattcccccccggagttcaccactccccggggcacggctcggttctgggccccgtttggcgatttccgccggcccgggccaccgagggcagggtcgagcacgagcgtgctaattcaagccaaaactcttcaaaaggaaacaatggcacagacacagtccttaggaaatcgaaaaagcttttattgaaatacggaagagaaaaaagataagtatatgcatatgtggtagcccccggccaaccctgcacgcccgagggggtgcggggttggcccgagcccgagacctgacacccgacccccactaggggtagaaacgacgaaggtgttcgatgttccacgggttaggcagctctgtgccgtcgcccgtggccagccgaacggagcccggccgggggacgccgatcactcgatacggaccctcccacattggtgagagcttgctcagtccagcacgcgtttggacgcggcgtaggacgaggtcgtctacacagagtgatcgggcccggacgtgacgctgatggtagcgccgtaggctctgctggtagcgcgcggctcgaagggccgcgcgccgccttcgttcttccaagtagtcaaggtcatctctgcgaagctgatcttgatcagcctcgcagtacatggtggcccgaggggacctcagggtgagctcagatgggagaaccgcctccgcgccgtagacgaggaagaaaggcgtttccccggttgctcggcttggcgtggtttggttcgcccagagcaccgctggcagctcctcgatccacgagtcgccgtgcttcttgaggatgttgaaggtcttggttttgaggcccttgaggatttctgcgttggcacgctccacttggccattgcttctggggtgggcgggagaggcgaagcaaagcttaatgcccatgtcttcgcagtagtcaccgaagagctcactagtgaactgggtgccgttatccgtaatgatacggttaggcaccccaaaccgagcagtgatacccctgatgaatttaagtgcggagtgcttattgatcttgatgaccggataagcctcgggccacttagtgaacttgtcgatagcgacatacagatactcgaacccgcccggggcccgtctaaacggacccaggatatcgagcccccagacagcaaacggccatgaaagaggtatggtctgcagggcctaggccggctgatgggtttgcttggcgtggatctggcacgccctgcaccgccggaccaggtcgaccgcatcgttgcgagccgtcggccaatagaaaccctgacgaaaggccttgccaaccaaggtgcgtgaggcagagtgggctccgcactcgccttcatggatatcggcaagaagctcgatgccttgttcccgaggaatgcacttcaggatgactccgttagccgcgtgccgatagagggtcccttccaccagcacgtagtgcttggagatgcgctggacgcgttcactcccttcgcggtcctcgggtagagtcttatctgcgaggtacgcctggatctcagcgatccaagcaatcaatctaagggagctgggagcgctcccctcgggtcccgaggcctggactccgacgggcctcgggggccgttcaggcgtgtctgtctcccctagggggtcgggtcgcgccgacggctgggcaagcctttcttcaaaggcgcccggtggggtctgggctcgcgaggaagcgagccttgagagttcgtcggcgaccgcgttatcccgtctgggcacgtgccgaagctctatcccgttaaaatggcgctccatacgccgcacctggcgcacgtaagcatccatctgcgggtcagagcactggtactccttggagacctggttaacgaccaactgagagtcgcctaacaccaggaggcggcggatccccagtccaaccgccactctgagtcccgcaaggagtccctcgtactctgccatattgttggttgcccgaaagtcgaggtggaccaggtatttaaggacatctccgctcggcgaggtcaacgtaacccccgcaccggcgccctgaagagatagggagccgtcgaattgcatcacccaataggcggtgtgaggcagctgcgaagggcccgagctgacctcggggatggagacgggctcgggagccggtgtccactctgccacaaagtcggcgagggcctggctcttgatcgcgtggcgtggttcaaagtgcaaatcgaactcagagagttcgattgcccatttcaccacccgtccagtaccctctcggttatgcaagatttggccgagggggtaggacgtaaccaccgtgacccgatgcgcctggaaataatggcgcagcgtaaagcatcttctgggcctgagggtattgggtcttggcgtcccggagggcctcactaacaaagtagacgggccgctgcaccttttgtcggggccgatcctcttcgccaggggccgcatctccagggcgcttttcgtccgagaggccgcgcggggcgcactcggcttctgtgtcgacgacctcggggtcggaaggcgacaggcgcggccttcccgcagtggccccggggccatcctgggggtcgggggctcctggcaccgtcggacaagcgggcagagggccagctccggtcgtcgggggcctcgggccgccgttcggctcgggggcctctcctccctgctctctcccgggtcgagtcgatacagggtgctctttgtccgagaggccgcgcggggcgcactcggcttctgtgccgacgacctcggggtcagagggcgacaggcgcggccttcccgcagtggccttggggccatcctggggtcgggggcgcctggcacgtcggacaagcgggcagagggccagttccggtcgttgggggcctcgggccaccgttcggctcgggggcctctcctccctgctctctcccgggtcgagtcgacacagggtggggatgcgcggagcgagggtcgtcctcgtcgcgctccacgaccaacgctgcgctgaccacctgcggagttgccgccaggtagagtagcaacggctcctctggctccggggcgaccaggactgggggagaactgaggtacgccttcaactgagtgagggcccgttcagcctcctccgtccagataaacggcccgaagcgtttgaggagcttaaataggggtagcgccttctctcccagcctcgatatgaaccgacttagggcggccatacagccagtgacgcattgcacatccctaagcttgctgggggggcgcatccgctctatagctcatatcttctcggggttggcctcaatgcctcgggcagagatcaagaacccgagaagcttgcccgcaggcacgccgaacacgcacttgtcggggttcagctttatgcgggcggtgcggagactttcgaaagtttccgctagatctgagagtaaggtctcctggttgcgtgttttcacaaccaagtcatcaacataggcctcaacattacgtcctatttggctacccaaagaaattcgagtagtacgttgaaaagtaggacctgcattgtttaacccgaaaggcattgtcgtataacaataagttcctatgggggtaatgaatgcagttttttcctcatcctccctagccatgcgaatctgatgataaccagagtatgcatctagaaaacacaaaaggtcgcaccccgcggtggagtcgacaatctgatctatgcgtggcagggggtaagggtccttaggacatgccttgttaaggtcggtgtagtcgatgcacatccgaagcttgccgttcgccttgggaacgacgaccgggttcgccagccactccggatggatgacctctcggatgaatccggtctccagaagtcgcgccacctcctcgcggatgaaggcttgacgttcctgggcctgccgccgcactttctgccggaccggccttgcgcccggccgtacggcgagacggtgctcaatcacctccctggggaccccgggcatgtccgccggtctccaggcgaagacgtcggcgtttgcccgcaggaaggagacgagcgcgtcttcctatttgtcgtccagaagaccaccgattcgtgtggtcttggacgggccgtcgcccagggcaacctgcttgatcgggacctcgtcgcacgtgatcatccgctgcctcggggcggctgggacggaggtgctgagcctctcgtcgccacccgcgggcttggatgccgcggcgaggtggtccgcgcgctgctccatgcaagcaagcgcgactttgaggtcgccatggacggtgatggggccaccggggcccggcatcttcatctggagataggcgtagtgtaccgccaccatgaacttcaccaacgcgggcctccccaggaccgcgttgtagggcagactgaggtccgccacatcgaagttcacccgctccgtgcggaagttggcggaaccaccgaaggtgaccgggaggtcgatatggcctagcggccaagtgtgccccggcgtcacaccgatgatcggctgggacggccggagcaccatccccggggccttgatggcgtcaaaggcagcgggggaaaggatgttgagggctgcacccccgtcaatgaggacacgccccaacttcacattgcaaacggtgggagaaaccaccatcgcgatctgtcctccccgggcaacgcacggtgggtggtcggtctggtcgaaggtgagggcaacctccgaccaccgtgcccgccgcgtcgcctcatgggtaggggccacggccagaagctctcgcttcatggccttgaggctccggtgagaagcgtgagcacacgctcccccatcaacggtggcgacggtggcctcaggctcctggaaccctaggtcatcgtcggcatcgttgatgtcctcggcgggggccttctgcttggcctcaccacgccggttgccggcgggagccgccggggtattgccctcacggcgctcctgcctcctctcctcctcccacttcctcgtccgctcagccaaacttttgaccgcgcggcagtccacgaggtcgtggagggaggtattgtgcacggtgcaccacctgccggtcgggcgctccctactgggagcgccggcctccttctttttgtcgctcgcaggcctcccctttcgggtggcccacgaagcgccctcgacggcgaggacgtgaccctcgtcgtcggaatgggccgacctcttcttcctcctcctgtcccgccaccctgaccgagcagcgggcccgggggcggccggagctgccacaccggaaccggaggagttccaggtccaggcctcctccttgcgagccacacggtccgcgagctgaaaaagctccgcggtggtctggggctccttggaggcgatcttctcgagcatgcggttgtgccgcacaccccccctgaacgcgtagatcaccgcgtgtgcagggatgcacggtatggtgttgcggacttgacaaaaccgctgaatgtacgagcgaagagactcatcgtcccctcgctgtaccgcgtgcaagtccgcttcttcacctgggcgcggatatgtgccctggaagttcatggtgaactgctggcacaaatcctcccaagagtggaccgacgcgggtggcaagttcattagccaaccccgcgcctgtcctttcagggccatggggaagaaattcgccatgaccctgtcgtcacccccggcggcctcgatcccaatcgtgtagatctggagaaactcggcggggttgacgcttccgtcgtatttttcggtgatggtgggccggaaccttgggggccaacggacgttccgaaggctcgccacaaaggctcgacagccggcaccgccaaccggggacatggggggctggcccccgtgcccggaccgaagtggcgctccggacgaggaagcgccctccgatgcgtgggcagcacggcgatcattgcgccggcgctcgatattgaagcaggcatctggccccctacgcacatcttcttgggttggaggcgttgacgagggaatggcggacgaacggcgggtagcggccgccgctcgccgcgccctccgcctcgacgacacggagccagcagtagcaacgccagtggccttggtggcggaggaccgccagccggcgcctaggcgctgctgcgccgtcatgaccaaattggccacgtcatctagccaacgtcgggttggagtctctggatcagggatgacgggtgggtgacgcaggagtgcgcccgcagcctggagcgcgccctggggcgtgctgccatcaccgtagacgaggagacgacgctccccgtctcgccgtccttctccatcgcccgcgtgcggcgaagtcgcggatctttcgacctcctcgagcgcctcctcccgcccaagacttcggcgagagggggacagtggagtacgagctcgacggcgcgggttctgctccccgtcgtcaccgctagcgctcggagagagattgtgcgccactgcccgttcggccatggggctgagcaggagaagcttggcgcacacgaaagaggacgagggcttagaaagacacacgcgccccctacctggcgcgccagatgacggagcgtggagctcctcaccgggagaccgcgcaggcccccctttgccggttcggccgggggcgctaagtgaggttcttcgccctcgatcgatctggagaatgttcgtgagagagcaagtgcacgagacacgggcgatgtagacaggttcgggccgctgagaagcgtaataccctactcctgtgttctggtggatctgtgtgtgaaggagttacagagagccggagagccagagagttcaggctccagaacccctctagcctccttttttcttctttttttctttcctcctcctttttggtgggcaaggtcctccttttatatctcaaggggataccacatgcaccacttctacctacttttcttttgggtggggacctaccctatcttgaccaaaacttggcttgcaccttcgcctggaagttaaatcacaacttgtccttgagtgaggctcagcgccgtcactcgcctgacatcggggatctccatgttactccctcattaatgggcggagatttgccatggctgctttccaaatgaccatccgacgagatgggtcatacctacctccactccaccggaggcagatgcatcgtgggagcacggttgtctgccgatgacgcgaccggcgtcagaccagtcacagaccggtcattcttgtccaccacgtgtcagtttagcatgctacacgtctgcccttcttcatacaatgacttccttgcaatggttgcgatgaagcctggaatgtatctggccggggctgacatgccaactccaggagttcccacgccggctccggctagggacgagtgcctggaggctctcatcattccgacgggacggggcgaggcgtgtgtcaggccgcctgttgccacctaacccgcgatctgaccggtctgtgaccggtcacacactgtgacctgtcacggaccgaacgagtgtgctgcgctgcattaaatgcggcgtggggcgctcgtccaacccgcaataaacgcggttaggtgagcgccgctgtgctcacctaacccacacacgtggcgccaaacccacagggggtcggggcgccccagccctcggggccgaaacgggagcggcccgacccctcgggaagacagagggaggggcggccacatcaccctcgggcccgacccccccgaggggtcaggccacgtgggtgactgcagctgctccaaacctctagtcaagatacccccggtcccatgtcactgacagtagcccccggcgttacgccagggcgatcgcccccccccccccgagggaagcgctcgggcatgacgccactccttagacctggtgacaggtggggccggtctccacaggcggcagaaacccagcggtcgcaaatcgcgcacatcgtcaaggaaaaaaccgaccgataataatgagcggcttccttcaagaccactacattacttaagtagcgcgcgaaccgggacgagccggttcgtttcgtctggagatgtgatgacggtgcatcggtcggcgagcgtagttaacgcgcgcacgattagtcccatctcaactgccacggccgcacatccgcctcgtgcgccgcaaacgggcgagcgggattagtggaggcgcgggcgcgagagacgagggggcgaggtagtgggcgcggggatcgagagccgggcatagcgttggcaagggta

SEQ ID NO: 10033 - DNA, 120728 bp, Oryza sativa
ggcccgcgtgggagatctggaagactggtagggtgtggccacggggatcgggggcagggagggaggcaccggggagtagggacggcctaatgttatacgggactcttgtggcaaatgaaatgggctcctcccatgttgattttggataagttaattttacaggtgtttcactcccttatctaatgttttcattttcatttaaaaatatatatgtttgctaattttacatatttggaatatcctatgtcctcttttcttcaacttcggtttcccacttccaccgcttaaagcttgatggataaagtggcggtctctcctaattatgtttgtccatcatgcctactagcaactcagcaataaaatgcgtcaaaaaagaagtaagtcaaactcatgagccacaagagcattggtgaagataaatggagctcgagcttgagatggcactctaggcaatgcaaatagagatcgagctcagggtcgtatcgatgtcgttaatcttagtgcatggagcggatttggaggacagatgagtagaaatgtaagatggcaatgacaagctcatgaagaagcatgagcaatgtggtgcaaccatctctaactccaactaaacagatatgggtgggtggatagcgccgatgtctcatgtggaggcgagtaggatggcagcaacctttttcgaactccaaccagctggatctaagaattaaataggaacaacatggcaacaccataatttgtggagactctcggctgcaaaattcgagaaccgtcgttgctttcctctatggagaagcttgagctcaagccttgggtggcactggcagagacgctcgagctacaagtatggtataggtagatcttgaacttgatcttaggggaggtgatgagtagattaaacttgatcttaggggaggtgatgagatgtaaatgatggtggtggtgctgcataattggagttagagaagagagatggattaaggatgatcatagtataaaattgacaaacatacacagcttgaagtaatatcgttaaatatgggtggttcaaaatgaacattggtaaaaataccataatcaaccaaacctaaggggaattagaggtgactttgactcaaactacctcttgcaaatttacaacttacacttgcagtataaaagttcgatattagatggaggctctaaaaaattattcaatgtgtatattagtatattttaaacattagcataccaggaggcataggtggcttgccccccgaaagtgcttgtacaaaaatccattaaaattatatgaagaagattggctagctcgatcggtggtttggtttaaaaatgctctagtaacaacatttcctttaatcaaattaagatttgttgattttttgactggatcggttctttagctcctttctgaatttggtctcaactaattgtatagaaaaaaaaatgaaccaaactaaaccatttcaagcaaaggtaaagaaaaagtgaagctgacttatcatcaacccctttagatactgagtagttggattgaattttgaattgtacaatggtcctccttttgtggctggacataaattgcaccttcaatgatggatttctattttccaatccatcctataaggtggtaagcaaacaacaattccaaatacaagttgagatggactcaaaagctaagatgtgattacatgacttcatgtctatatatcgtggttgtgcatctagcttataaagattcaaatccgatttaccaccggtatatatcaataatctttgagtaattacacaaatgcatgtttggtaggtgagtacatgtgcctcaaacaatatttaaatgtgtgtaaattacacgcacgacacatacgtgcgtgtatatcgtacaacagcgttaatgtgattacaaccgtataaaataactccctctcaagggaaaaagagttgaggagatacaacaaacttaaggcacctttggattaaagaattttcatatgaattttgagaatccaaatccttagaattttttcttatctaggttgttaacgtaagattgaagtatggaaattcctttgaatcacattcctatacgttaattccatatgaatttaacccatgacctcaaacctcatttttattttttcctttgattgcttttctttttctaatctcagctttcctagtataaacatatcctctactttttctttgtgatgttttctcttccacatcttgtgtagctgcaagacgcgggagatgggccccggctgcggacggggtgccggaatgaacgagcgagcgtgggccccggccgcggacggggtgccggaatgaacgagcgagcgtaggtgagtgccgatgactaccactagtggagctcttattggctgtggtggaagagtaacatgagggattgtggccaccaccatccacactaaagtcgtcgccctatttgaccgagaagctagttagcacggtgaaaagtagcaacttgatcgatcagtcacctacacccacactagaagaagaatggcaagaacgagtgagctatatatgtgggaaggcgagagccacgatgccggccatcacgacagtgtggggggatacaggtgtgacgttgggcaaggcggcgtggtgattgggtttgggtttgaggccgccccggtgttgacagcaatgacggaggtcgggatcgactggagcgacattgaactgccagctgggacgaccggtgtcggtgtgagagggcgggcgtccaacgtcgatctactgaagccgaggcaacgattttttttttttcgtacgccagaggagcgaagaggatggcgcacatcaggggcacccatcttgtgtgcgccacatgtggatctggcacaagggcgaagtgagacgaagcacatgggatcaaatgggggtgatgtgggacccacaaaacatgtttttaatcgctagtactggctgcatgcaagttgtttgacatgtgaagttgtgctaccgcccggtgccagatttatagctcgctctcttctctttccttaattatctccccctccacctaggaatatgatgacattaaagtttttggagcctgctgattcatcttattgtatatgctcttaagaagtcaattgcgtcttctctctgtctctctctcctttagaatcaatccaaattcaaatattatttttctgttagtcattcaaacacatcatcttttgaattatcaggtgttatcaacaactattgttcctgcaacagttgaaaaatagctataacctaccacggtgttcaattgatgcagtcgcaacaacaatcccggtcgatcaagcccacaatgttttagattcttatgagattcgctagcaaactactccctccatcccaaaataaactaacctcataatagaatatgacgcatcctagtataaatgaacatgatgtctcacgtcctagtacgaagttggtttattttgggacagagggagtagcatttaaattcaatgcttattttatttttaaatctagcgtagtcatcaaatccatagtagtcaaatcaaatgctacataacctgaattcaacgatcaacgacatacataggagtaagtaccagtaccagagctcttcgaccgtctgcctaagcctaacacacatgacacatggacaccgaacacaaccgtagttcactgcaaaggtagcactactggtaggctagtagcaaagctgatgagagcagcggccgcagattcacagcacgatggggtcggacgactgcgagcccttccctcccacgcgcctgaacctcttcgcctgcacgcagctccggctgctccgccgcaccgcgccgccgccgccgcctgatcccttcgccgccccgtcctcctcctcccgccgccgccgccgccgccacttctgctcctcctcctcctcctcctcctcatcctgctgctgctgctcatcagaccgctccttcggcggcacggcgtcgtcgtcgtcggcgtcgccgcgcacgatccccggagcctccgcgtcccccgtgccatgcggcgcttcctgctcgcgcggtggcatcacagccaggggagggatcaccgcgatcacctggggctggggctgtggcgcggcgtcgcctcgcttaagcggcggagcaggaggggaggcctcgatgagaccgcggatcctggacagggacgtcgccagctcggcggggaggcggtgttgctccagaaaccgcgcgacggtcgggagctcctccctgacgccctccacctgcatgaaccgatccaatcgatcacaacaacgaaacgcacgatgcaatcacccgaactgaaccgcgatgacacgctcacgtcaatgtgacagcttcctcagcacgagtgttagggagatggattctaatctaatcactcggtgcatgtccacacgtttattatacgttagctatatgactatgatttttttaaaaaaaatgacaagatagattgataacaaacatgccagcaaattcgacttctgtaagttgtaacaatgataacaaagttaattgcgaatatatctatactaattaaaatttaatttgctacttttattacaatttaaataagtaaaatttgagcttgcatatttgtaggataacatattattacatatgaatctaccttgttattttttttttaatttttttataaccatttagttgatagtatgtagcaaaagggtagatgtccacctaagtgattaaaagtgtttcaccgacaggtagttttaccacggatatcaggctgagcccaagggaagctcgcgccatggtcgccggagtgaaaacatctgcggcggcggcggcggcggcatctgctgtatgaccatgatcaccaccatctgcagcgttgatcagctgctggaaccgttcgatctctgaagcgtacatcaggctccagtccactgccgggttccacagctgccgctggaacgcggggacatcgttgagcgggcgatgctgttcttgcccaaactggcgagcgaaccggtccggggcgtagatttccttgaggttgaagctgaccagccatgttctggagaagcagaggttatccggagcagcgcaatgcttcggaatggatgcaggatcaacgcccttgtagggctcccagttgacctgaagttgttgttcatatcatcatatggtctcaaatcaaatggcaagggaaaggatgaaatgctgaacacaaaactgtggtgatgactgatgagaatcacaactcagatggatagacttttacatcagaaacttgaagcaggccgaaggctttcctgatgtctgaaacgttcttggccggttgagagatcgtgctccctgtccacttgagtactcgtgggaagatgtgttctggaggatcatacatgtcagggcgcaatgccggaatatactcatatatccagccctacagacagatattcagaatatatcagaacattttcgcaatggacacagtgaaggcacaagtcacaaacttggtctgtaaggtaaaattttgtgagaaacaaaaatggagaattttgttatttcctatcatctttatgccttactatcaattacaattctcatgttgaagttcattaatccttttcagaaaacatgaacagatcataacaatcaaaatagttttttgatagtttcatagaactggaagatcatttcctactcgaaattcaagtgatattttcctatacaatggttttgttaaacataccatgagcaaagccgcgctaccgaatagcctttttctggcagaatgggccacggcgatggagagagccttgtagagatgagcaagagcagcagcaccccaagcatattcctgtaccttgtcaaagtctgacagaagtggcaaatactttggtgagacatagcccctgtccctctctggaagtaaggctgatccaatcaagaacaggagatatgccctggtgccatacatggtctgatcattggtggggcgttccgggatccggctaaacttggattgcagccaagagagcttcacatggctgcccctgcagtccctgcaatcaggcacttgccccagatactggaagcagaggtcttcgaccgacttgttgagcacagctccggttgtcaccacacggcctgtcaccggaatccccagtatgtaggcggcgtccctgagtgagggtgccatttcaaagccattgagctgagcagtgttggtctccttgctccacagttcgaagaatgccatgagcgcgatgcgatcgatgactaggcctgctgtgtgtatcaggttgccgagcccgcttgcatcgaccaattgttgctgctgctcattcagcttccatgtgtcgagtctctccgtcgtctggcatacggttagttcatgggttccctgtatgtttgagcatcaaaatgttatgatttaggtacaaactatatatcacaagagccaaaggaaggttcagcaaattggtgtcgcttgctcgttgttgataaataataattacctgaatgacgcttttgtttgttggttctgcctctgcggattccatctggttccattaagagaaggaatgttatgtggtaagtgtgcatacaatccaagaattgctcgcagagaaatttcagtttaagcatccaggttaagtacggcaagaatttgcataagtttgataacaacttaacaagtcctcaatgagcggtctattgcttatatgagcaactgaacatgtaattgagactttgttcccctcaaggaaatgaaaaaattaactagcacagaatctggaaactttgacattggtaatcaaaaggactgtatatatcaggcatgatgataataaggctgggaaaaactgtagataccaggtttgattcactaaagttcaccaaaaaactgtagaagtttttaaacagatgacgtgagctctacccttaagaggaagagaactgcaaccacaaagagcaaaagcactaggaacaactgctttaaattttcttcagaataaggagaaagcaaaatgccaggattggccacatacaaggtacaaaaggacagcagcaaccagccaagaaaccatcaaagtttacctgaacaaaaaagatacgttgtgaaacaggaactgaactactcatctaatcaactgtaaaaataaagaaacaaaatctggaggaaaattgaatcgaaatgacgtagatgaagttggttgtgcgcctaacagcagccatttccatcatcttaaaatattgcagcagatgaggaagaataccagcactaaattaacgagtatacacttgatcaagaagatggtataccattttaatcatagaaaacatcacacaaaagagggggaacaaaatatcgaagaaatacatccgataaccatccatttccttctaaaactgactaggaagagcaaaataaaattgaccgctatcctctaaaacccaaccacaaatatggaaatcgggacagaaaacaaaggggaaaggagaaaaaaaaaactgaagaccatagatgagatggaacccttacacagaagctggagaccatccatagcagttgaaaaattcagcaggaaaacagaaacacacaccccacacaggcgattcccagtcataagcacaaggatgaaatgatgaaagaataccaaaatgcaggagcaaacaaagcgatccgggattcaccatgaacgaaggagatgcaaggaaaaaaaaatactggcatatcatatcacacgatgagagtgatagaaaagagagagcaaactaaccaggatcaatgagtagccgcagcagcgagcgagaggcaacaagagcacagcaaagaaggcgaagagcttcttctatgcaggcgagcgttggttgggcaatgaaagggcaggcgatggcgattgccttcgtggttgccttgcctccaccgctgacgtgtggggccccccgtgccagaggtcgctgctagggcgaaacgtggcgctctcatcactggtagctttcccatgtagaatgatcactgatcacatggtaacactgtcctcggctagccactgcctcgccaaatatggctataggagccttcaatggtgcactgccagcatatcaataagctggttttaggatcaacagcagcaggagtagctggtgcaacaaacaatccaagcgtacaaggctgatgaattgatgtgatagcacagtaggctctctacatctctacttggatcattctacaagcagtcaaagcttagcatcattataaaatcaccaattcaccatgttgcaagagctgcagattaaacgggagagggcacaatccagttcacgagcaacacagttaaaagggtcttggtggcatcatctacattttgcccaactacatggtagagactagagagagatagtattaacaaggagataaagcttgcaagctctgcgcagtgaatggcaaggcgctaccagcaaaaagtctacgacgctacataaaccagttaactgtcagcagcccaagtttttctgctactttgtacataaaccatggatgatcagaggaagatcgggttggtcgcctcggctcccaccccgtccctgtgcttgaacattttcagctgcacacagagacgcccgctccttcggaggttctcggtgtccctggggagccggatttcgtcgcggtcttgctgcctccgcttccttgattccggcgagctcgagtccagcgaggaacaggacggcgtcgtcaggtgggagttctgccagaggtccatgaccccttgttccttgaactcctccgctccatcgagcagagggacggtgccatccagaaccatgtcgcacttgctatcctgataaggtatcagcacggctgggaatcggtccgcccttgagttcggagggcttgaaggatcttgaaagaatgacggcttccccctctttcttgggttctttgacctgacattgctgtcctggccctgccctgcttgatctttctttcggctactctgtggtggggagtaactcttgatcatcatacccactctctctagaaagcttgcaacttccacagggagtaactgtccctccaggtaacgatcaattactggaaaatcattcctcagatcttcaacctgcatctcacaaacagcaattacaataaggaccactatgcaagcaaaaacatatgaaggattagcttcttatttgtagcttaccattgaagagaagttctgagatgtgctccgactacatcctgcagcatcttgtttagttatagactcaattgggagggagttgatattggtttctgcaggagtgaaacgacagccaaccaattgatggaactcctcgatttcacgagcatactcaaccctccagtccttccacttgctccaagttcttcttgcccacatgggcaccccatggaggcgaccttgttccctcccaaactgcctagaaaaccgatcaggtacatacacctcttttatgttaaagctgattagccatgtccgagaatagcagatgttatctgctgcaatgcaatattctggaataattgcaggattcatgtccttgtaaggattccagttgacctgaaaatataattaattaatataaaataacacaacagcagttaaaatctttgttataaatctataaaataggtagacttgcacttgcatcagaaaattgaagctcatcgaaaacttttctccattccatgactttctttctctgtccacgcgttgctcctccaaagttccatcgacaggcccggggcagcaaggtgttctgattcttttgttggggttgagttaatggaagatattcataaatccaagccttgagagaacaaaataaatctcattaacaaagataccaaatatcatcgacaatcattcaaatttattcaaacaagaacagtaccatgagcaaagttgcactgccgagaaactgggtagtagcattcggtgttacagcaacagatagtcctctgtacaaatgagcaagggctgcagatccccaggcatattcacgtatctttctaaaatcagccagaagaggtaaatatcttggtgatacaaatcccctcatcgtgtcaggaaataaggtggagccaacaaggtaaagaaggtatgcccgggtgctgtaagcaatctcgttgatagttggattttctggcaattgatgaaatttcctgtacaaccatgtcaatctgattaagccacacagttgctctccatttccagggctctctcctaagaaatgcaaacacatccgcctcacagcttcatcaccaattggctcagcagtcaccacatgaccagtcactggaattccaagaatatatgaaacatcacggagtgatggggccatttcaaatcccatgaaatgtgcagtatttgtttcattgttccatctctcacaaaaggctgtaagcaaagaacgatcaatagtaaatcctgtggtgagggcaagatgtccaagaccactagcattaactagttgttgctgttcgtcagttagaacccattcttttagcttccgtgtctgctggctgggaagcagaacaccatatcgctgtggaaaattgagtgtctgcatgtaattttgttcacgatggccaagtgaaaacaaagggagaagcagctacataccgtccagatttgtgagcttccaaccggtctccgtccacttggtttttgttgttgtgttaccacaccttgagatgcaaggtccatttctcctggaaaacataagagggacaataaggtaattgttctatgatgcttggtccattgttaaacaaaaaaggaaaaaaagaaaaagggcagttgtaacttgtgtggataatacttaataaaacagtgtgtaaaaaaggaactatcaacacaaccagaacaacaaagtccataaataatgaagcaaaaacaaaaaagtgctctctcatacttgtttacgatatcagtgatagctgatgataagtaaattcacgcacaccatttatgaccaattattttgacaagttcaattttttactatattttgctaagataatgatagttgtcagcacaaagagagtcaagagcaaacgaattcaggtagtctgttgaattatttttctgcttactgccaatctaatagctggatataagaactaaccacacaaaagtgtgcagtatctcttgtaataaagagatagccggattcttcatgcaatttgcagggctagattatagtctattgaaagtagaaatgcatttgctatataactcttaggtttatttctagaaacacaattgtaactttcatacaggtatagtaaagaaagctctaaaatatatccaataaatcttcaccattataatctgagctcatcctgatgaacagtgacgatatttctccttttatttgataacgttgtaatttctagcccttgatagagaatatggtggcttctgttcagcctgttctaatagtaaataaatgctagtggtagtctggtggataagaatgtcgtgatgctcacatcaaagaaaaaagggggatgccgtgatgcttgaaaaaatagcatgtgagggcagttctatgtacctcaactgtcggcaaatgaagatcatgtagtaaaataggaagccatgcactaaatcatactacattatggtgatatttccatgtaataatgacaaaatgcaagagtatatagtaaggtcgatcgcttaacacaaggaaaggggtaaaaaaaggaaagcaggaaaaacaaatatcatccatttctagtgtttcctttttacattcttcagtattgtactcttattattttattaagaaatgtaaacagtggcagagaggttttgacagagtcattggcttatgaattttacccctaagtaattgatagttgagatctaccaatgctaatcccttctcatcctaatatctgtctagctatccagcaaataaattagaaaaaaatattctaactatttattttcaataaatgttccaggatacactttaaaaaaatagctccagttgttattaagtgtgtatggatttcagttcagttcagtgtggggtacatggtacccagatacccatagcaaggcgttttgggccatgcggcatgaggtgggccgagtgccctaggcccacatggttaacttgtaaactaagaaagagataagggataagttggccaatcctatcccttgtaaatagatggtaggtacccggattatgaaggctacactaccatatctagccggttgcctccgcacctatataaggagcaccgggaaaccctcattcttccataagcgccacgtgctattcctacgccgtgctgcgcactccaatacagatctaatccactcatctggactagggtattatctcacgtcgagggtctgaaccagtataaacaattgtctccatctctcctagatctagtgcaccctataaattatattgccgatcataagaatcgacattcggctttacagcttcagccttatgaaaaatcaccgtgtaaagatagcacacaaaatctcaaacagtccagcacaaagcccacattttcagaccattgaaaaaccaagagaagacccgcacattcaagcataaccacaaccagaaaaacatccgatcttagccccatcatgatgctccagcacaatgaaaagagaaaaaaaaaggaaccactctacttccatgaaagtttatcccatggcactctattaatcgctgccacacattcagtgatcgaaattaacaacaatctataccctcaaggccacaacatatccagaaaaaaaacagtactaagaacagatgctatgtgctaaacgcacgctaatttcccacagcatttcattgcactcccccaagccatctaccacgggccacgtactacgaaatgctaaaagaaaaaaaaaacctagaccatggaactcgcacagatgcaccaaaaccgctggatggatggatcaagaaccaccaccaccaacccacccaccaagaaccgaaacgggttacaggtacccctgatctgagattgcaggccctcctccgctactgtagcgacggaacgaggcgtaggaagtgcgggaggagcagccggtcaccttactcgccggggaaacgcgccgccgccgccgccaccgccgccgacctccgcttcggagcggaggagaggttggagaaagcgagcaaaatcttcgggaggggaaggaagaaagaaagaaagagagagagaaaagcttatcgagtgcgccccccaccctccctctgccaggtgggccccacacctctcccccgcaacccccatgtgggccccgcgcgtcagcgtcccgagcaccccgcggagccagccagccagacggttcgagccggaccgggtcaagggcttcctctttcctcttccgagttccgaccccgtcgcgttaaaaccctagccaccacaaccacgcactcctcttttttttttccccttccccaccaccaccaccgcctctctcgccggcgaagagaagggggaagcgcggctgcggcggcggcggcggcgcgcggcggaggtagggcttgaggtcctgaggtctctcctccgtctcgatctgcctcctaaccccgaagcgagagggattttgcgcggggagggtgggggtccgtacagcccggccgccgtatcccggggtggcgctgaggctgccatcaggttggttcgctactcgtttccttgtcctcgttccgctaggcaatttcggtgtggtggtggtttcgtggagtggggttgggggggggggggtctgattcaatttctagggtttcgagcgaacaggtcgccttatcatgaaacggtttcgtcgattggggttgggattattgcgattggtactgcgtaggtgagtttatggggattgcttatcgagcttcgtcttccacgggtagagatccggtggagatttccggcgggcctgtagctcagaggattagagcacgtggctacgagaccacggtgtcgggggttcgaatccctcctcgcccacagacttccaaaggggaatcgggacttgtagggttagggggggataaattggggcttctagggtttggtcgcgaactcacgatatttgctagtgttatgctgatgtgtgtctctctgctctgctctctagctgctaggttaatcgagattaattctgtatgtatggatgctcaccctagctaacggttgttggtgcatcaaaaatagaaaccaaaagtggaaactgatctttttgttgtgagttatagccattaattgcttctgttactgtccacatttaagtgcctccatgttttttgtaaagcctccatattattacacatgtatcaccataaaaatggaaatgaaggtatcttggtagttacctacctaccatagaataaatcaagtttacaccgtaagcatatactccctccatcccattatatagggcgtacctgctctagacgcacagaccaaggattttcaactgttccgttcgccccgatacgtgaagttttgcttcatccgtggaccttgatcttcacagtgtgtatcccagcaggccacgcccacgtattgctgggagagagaggccttttaactaagagcaggtacaatagcaggctataagccagctataaacatattttaaggagataaaagaggagagagaagagcagcgagctacagatttgtagccagctgtagcacggactccaagacgcagtgtgtatgacaagtaggaccatatattaatagtgtagtatgtaactattgtacgaattggctattaaattgactatagatgatttggagctagtagttggctatactattaaacttgctctaagagcacccgcaatggtaaagtaaggtgctatctataaaacatgtacatctcagcaatagactagaataatagtaaaccatctcaatagtatgtctacatgggtatctatagctctctaatacattgcctcgtttttctctatagactatctccaggttagtagatagctttgctctctctcttcatttaatctcttctaagtaggaaaatatgctgacatggatctcttatagagagcctatagataaccattgtgggtgccctaagcaaactaatcagcaataatgcatgcttgtaaacggaagccgaggaggtgatgtcttgaatgcttgcatgcatatgaatggaaacgagcaaaacttaaatgcttgcatgcgaataaacggctgtcgaggagatgccgtcttatattgtgggatttgagtaaaatacaggtacaccctatatattggggtggagggagtggtgctgagcaagaaaaaaagagattgctttctctcatagctttacttgattgttcctgttcctgttcctgttcctattttttctttttctgaaaaaaatgaattttagaattagcatgcaatattttcattgcacgagaaaaataataggtgcttagttctttgtcatcggttcatgcatgccacatgacacctcttatcttgctgtatctatatctgcccatgatgtgctagtttgtggtactagaactaagttcaagcatacatcttttagggtatgtttggatcctaggcaagagaaatcttatcctagcttagcaaggacagcagtttgctaacgacaataaaaatcttacttctgtgggaaagcttgcctataactgcccaggaaagcttgcccagcttgaaggacataaggcacttctgtgtgacagttgatgcatgctaggctacaaagccaaatgttgtgcttagtttctttgagctatggcattgctgggccaatttgtgctggatatgtgatgcgaactgataataagatataaacctacccttagtttcgagctgtgttgtttcaattaaaagcactggttgatctgccagccggcaatccttggttgtctgcctgcgcctgtaggtgaaccatcagcaaacctttttgtgagttgaagatagtatttttcggtagcctttgctagacttaacaaagctaaaaacaggattcctcaactgatcaagaattacatttatgcccaatattgagttcacaccatgagtttcattcacaaaggatcccttgctgcccgcctgccatgcactcctctaaccacatgtcaatatattattattccttattacaataccctaattactcgaataaagtaaaaaaaaaaagaacaaaggagcgaagtatagtgtagttactccttccccaccgaacatatctcgttccaatcttctatatctacttccctcctgctcacgtacaacaattccaccaccaaatctgtcaaccatgatggcgtacctcgccaccggcgaccactagaggcctctgtacttgggtttttgattttaggcagttccatgacgtgtcttaaaaaagagttgagttgatctggtgttgtcccccaccaagaccagaaccgccagcacgctgttggtttgcccagtttcgctgcatcccttgcctctgcgctgatgatgcaggcagatcaactgcttcctataacgtcttggcccatgcattgttatcatcgaatggccttggcacagccaacattgacacttacccagcgctgtgggcctgcgagatatggtgagaggtatcggtgtccgatgtctgttaggcaggagcggatgtgtggtgaatattgacacgtgaaaaaaaattaataagcaagtcatatctggttgcatgtatgagaagtttaatgtttttgccagattctatgcaattttgtttgaataatactctcgaataattatgtacaattgaacacctcctgttaattaattgtacataagcaattctcattatttctatgttctgttcctgtttgtgtttactattttattctggcatgttaaacagcttgcctctatctgaatcttctggccctgaaaagaagctaaaattatttttctttgtcaagaccaaaaagtatttattcaaaccaaacactatgaccacacaagcttgtaagaagagaagagcagtttatataagcagtgaatcagaagactctggtacagactctgaggttgagggaagcaaactctccaaaaaagatggggtcacgtcagtctatacatgtggtcaccagccaacctctaagaataaggttgatccgatgaatactagcaagtcaaggcagtgtggaagtattctgaagaagctcatggatcacaaaagtggatggatttttaatacaccagttgatccagtggtatatggaattcctgattactttgatgttattcgcaatccgatggacttgggtactgttaaaaggaaactcacaagcaagcaatattccaacccttatgagtttgcagcagatgtgaggctaacattctcgaatgcgatgaagtataatcctccaggaaatgatgtccacggaatagctgatcaattgaacaaaatatttgattcggaatggaaattattggaaaggaaatggaaagacagaaatttggtacaagagcagccatcactgaaggtattaaaggctcagcctgctgttaccccaaaacctgtgctacctaagggggtgactgcaggcacaaattcagctgtgagcaagacactggcaactgcattatcctccaaagtatgatcacagtcatgtaccctcattcagtgatttttcttcttgggactttgatcaaagtactgctctctttgcaggtaaaaattaaattttctgtgcgaggctctgagctgacctcttccaaaggtgtgaatagaataaactctatgcatacaatctttccattgttgattgtatttgacagccattaccaatgcttttcaattcagacacgcctttgcaagcagttggcagaagagacggcacaattaaccaatctctcccttgcaccaaggttttgggcacgagctcctttgtttatacttgagtattcttatctgagtcttggtatcattagctaaacaattgtgtgatccccctcttgtcttgtcttttatttttaggacaatgctaagacaccaaggatacaatcaagtgaggacagatctgaatcaactggtatgtttatgatttccacgtaattttatcccatactgttttattttactaaagcactcaattattatcttaggaaatgaattgcggccttgcgatgatgcttctacttcacctcttgcttcttccagacaaggttggacatgctatctatttatccatctatttgtgcatgttaatttgcatactagtatctctgttctcaaaaggatgatgtcctagattcattgcaaacacagtcaaacctcaaaaatcttaaatcattaataaatgaaaaaataccaggatttaaaaatcatattagtagatttgtgaggaaaaactgtcatatggttatattttaaatattgttcccatactatcataaaaatacaaactgattccatttgtcatccttgagttttcggccatggcgcaattctgtcgatttcctgcacgtgatttttcggtcgtctcatcattgtttgtttttcatctgagtcctgtgcacactgtggtccgttgtctgcatccgagacccactcacatccgttgtccaacgtcccacgcatgaccctgcctcaccttggccacatgcacccctcttccgtgtgcccatggtgctcccctcctgatccatcctttcctttcgtccatctccctcttcctatgctgcgagaagcagagctgccacaagcagaggcaaagcacagagcgtgattcacttagctaagctgaacatgatcccttaatttttctccatcagataagcatcgagaagaagtggaacaaatttctggattgattcattgtttatgtgagtagttctcaagtctggtttagttacattacgtaaatgtttctgatccacacccttcttttcgtaggacgatgaaaaagaatggataaagatcccaagaatacatagtttgatctgaatactcataccttgagaatagcacatctacaagtaggatttcctctgtgatcgtaccaaaacatgagttccatttggattttcttttttatcattggatttcttcaatgctatagtgtcattcttctggcgcttaatgctatctattcccaattacaattgtgtacagccctacacccgttgcaatgcacggtcattttgctagtaaatatataacttgagaaagtaatgataaaacatgtgcattggagactgccgatgtcctaaatgacaaccatttgagaacagagggtagtaactttatcatctattctttccatatgttcctttgctaatatattgcatcttatgatgtgaattttcagaagaggaatatttgcctgaagaacctttatcaccaagcaaggctcttcgtgcagcaatgctcaagagtcgttttgctggtacaattgtcaaggcgcagcagaaagcacttctggatcatgtattatttctgaaatgtgtactgaaatttgtagatttcaattaggctattccttcgcataggacaagttctagtctacgtctgtgtagctcttgctgatgtgcttttttaatctcctaggggaagaaaatagaccctgcgaaattgcagttagaaaaggagaggctggaaaaaaggcagcaagaaggtaagaatttgcttagcctttgatagcagatggcatggagctgtttgattggcaatacattttttctttaagttcatcaagcattttgatattttatattcgcatagagttctcatctggacttaatatgggatggctgctctttgtgaaagaacttttagaacacattacggtgaaacttgattgacatctcaggcttcgagaaactttgggatcaaaacagtccgtcgagagactttggggaacataaccccggtacatgctagagaattgtttgaacagtacagtgtcccacatagacaagtttgttagtaggtagaaattttatagcaaggcatcatcaagagtcgttttttaacaagtcgatcaggcttccgaccatttttttgttccttgaagcaaataaacttaagatttggatatatagaataagaaaaaagagtaatctttttaccagttgtccccacatagaccacaggttggctaattcaatacactgcttcatagtaactttttgagtcaattcatatactttcacgctgtgaatactcctggtcacatcggatctatatctattttggccaaacgtaatcttgtttcaatatatcaaaactgtagtaattttgttatgaaaagcatgtccatgatattccacattatcacattgttggaaagtctaaaaacaactttattttgttggaaagtctaaatttactttgaagtgtaaaaggtggcatgttttctctgatgggggaatgggtttcctttaaaatgggaacgaatgctcataactatagtggtaactatatattgtatgtattattcttaggttatacttttattttgtattggcacgcatgatttcagttgcatggctttcttttcaatttacccataatgcagagaaagcaagaattgaggcccaggtgaaggcggctgaagctgctgcacaattaaagctagacgaagaaatgaggatgaagagggagcaggaaagacgagcagcacgcctggcactacacatggtattacatgctgccattttctgaccaactagtttgtatgcttaatgttgcacggtgattactcaatctcttctcctacgcagatgaagaagactgttgatattgacaacagtgacttccttaaggacctggaaaacttaagcaaaaagtgggagctgaatccccctggcaaacttattgttgattttgtcgacgggatcgatctaccacctggcttagggagtccgctagagaggcttggccttttcatgaagaaggatcttgaggaagaggtcgaacatgaaatggaggacagtgtatcaccatctacggagatcgacgtggaggaaggagagatcagcttctgtcaatagcacggctctaaaatatccattgtttcttcctttttttctttccccccatcagactctgaagcaacatgctcgcatggcttataaaattgtgcgcgagtgctgtgttatttattctgcctcaagacaacatcataacataagccgagtaaaatgaagcgttggttcatctagtttgtgttgtctaaccagaaaacaaaaatgtcagctgaacactgaagtggagttatcggttgcgtggacttcgccccgattttgtcggttctgtgaaaccctgtatgttgtaggtgttccacgtatgcaattctgtaaaaaaaggaaaataaaaaaaaagttgtatgtaatgtgatgttagactgttagtatataataatattatagttactgatgagtgtagatgtttgctattgctggtagtcgcctcttgctctcagcagtctactcgttaccgtgtgttgatgttgtgaccttgtgatgctgttccagttgaaaccctcagcgggcagatcccttcaagcacggctcaattggatcagcaaatcaattagagtagatatgtgttgctgatgatcagcaaatcaattagagtagatatgtgttgatgttcttttctcaacaaagtggccgtagtttagtggctcaattggatcagcaaatcaattggagtagatatgggttgctgatgatgttcttttctcaacaaagtggctgagtagatatgtgttgctgatgatgctcgtttctcaacaaagtggctgtagtttagtggtgagaattccacgttgtggccgtggagacctgggctcgaatcccagcagccacatttataaattttgcttttcaattttatttcagttttggaattctaatattcgtatttttcatctcagtctcttttaacaaaattccactacatctatcgcataataattgtatttctatgatttaaatgtccccaaataattatccaatagagtactaatgtcatttcaattttggaattctaatattcgtatttttcatctgtctcttttaataaaaaaaattactatacatctatcccataataattgtatttttaggatttaaatttatccccaaataattatccaatagagtactaatgattccattcattacttcccttccattctgacctatacactatttaataagaggcattatggtttttcttctcaaaccttaacactaacaacctagaattataattttttttggacggagatagtattactttattttttccgtctattttctattgatataatttttaattagatttaatggtattataacttttatggttttaaaatatattattagtattcacctatttaaagctgcgtgccattataatttcaagaccattgaataccatgccaatataaaacaagcaggtctataatgtgcgttgaatttctcccgtggaatacgctgttttgacaatagtacgttactcctgtaaagttcagaatgaaaggtggatatccctgtaagcaaatattagcatgatacttcattttaacaacgcaaaagaaccataaacaaggataacagtcttcgtttcaacaacacagaagacaaggatcattacagcattgcagacttgccaaatgtggcgtaatcgttacattcatccatgtgttatacatgcagaatggtacatactacaatagctcaggagtcagcgtagctgtatttgtacaagagccctcgatataacaaaatcacagtacattgaatactttcatcaagttttctcatctatagacccatccttttgggcctcaagtatgtcgagcctttcttcaagcccggcatagaaacttgctgctgctgcttagctctcttctctcgctccctctccttctcaagccgtgcggcctcggcttgttcttgcctcagcttctccatctcctcctccatcgcggtcttgtcctccttctgcctcttcttatggtcgaggagcgaggtgtcggtttccttaacagagaagaacatagggcccaactctgccagccactgcgggtcaacagcggtgacgcactgcatgtactctttggtcgtcaggacaagctcatggtagacaacatagtcaggggtgtaaccaaggccgtagagtgcactgctggggtggaggtggcatggcatcccgttccggcagttcacatactccccgacacccttcaacctcgcggcattatggaagtatgcagagcagatggcttttctcaccacatcccattccatatggcatgatgtcagtgggatcttcagggttttcagtatgtccaatagctgtgaccttacttctcgagcctttcggagacccttgacatggaggaagtggtcattacaccagtctccacgatattggttcgacttccattgcaggtagacattcagaagagttaaatgatcagattctggaacaaaaaatttctcccttgctgcatcactctcctctgctcgatctttgggacgaaagaagactgagggcaccgagagcattgacacaatggtcagtacttcatcaaggcactccagctgttctcccatgagaagcatctttgctagagttgggtccaacgggaattcaaccatcttccaacctattactgtaagagcaccaacattgttcaaggcacccaacacccagagctggtacatggagttgaggatgttctcctgcgggggtgggtccatgaagtcaaagtcaagcaagttttcgactttcagagatttcagtagcagaaccacattccccagattggtcctttggatctcaggcactgggttaggtagcatctcattctggtaagctgattctgtgaacagtctgtagcatgtgccaggaccagttcttcctgcacgtcctgcacgctgatctgcagctgctcgactaactggaaaaacctgaagagcatccatacccatccgtggattgtacaccttcatctttccatacccagtatcaatgacataaaaaataccatccacagtgagcgaggtctcagcaatgttggtagcaacaatgcatttgcgagtgccctcttctgccttctgaaagattttggcctgcaggtcagcaggcaactgcgagtagatgggcaagatggagagcttgggtacagtcttggtggatgatgatatcagctgctccaggcgctcagcaagcgcatagcaggtagcctcaatttcctcttgccctgtcataaatataagtatatccccagggccactggttatgtggattgtcatagcctgcttcactgccgcttccacatagtcttcacatggtgttttgctgaacatgatatttacaggaaatgtcctgccaggaatatggaagacaggcactctgcggataaagaaatgttacaagattagcaaaatagaaaatggattcaaatcttactaggaaaaagaaacagagcaagttatcttaccctccaaaaaattttgagaatttgtccgcatttagggttgcagatgtgacaattagcttaaaatctcgtcgacgtgcaacaaccttcttcagtatgccaaacaaaacatcagtattgagtgatctctcatgtgcttcatccatgacaataacactaaaaaaagtaaggaaaggtgctttagcatttgggaagcagtattttgatactgtatttagttctatcaacggtaagagagctatcagcataccgatatttgtcaaggtcagcatctttcaaggtttcccgaagcagcactccatctgtcatatactgcccaaaaaaaatcccaaacagaagcagaaaccatgttagatctccattactacaacaaagcatcaatcaatttttttaatttcctaaatggcataacattgttctggcatgaagtgtgttgtgttcatttgatgtaaaattcataatgctaacaacctaatagctaatgctgcacccaaactaggctactaacctaagcatattctagttttaggaaacttcctactaccaagtgaaaagacaagtcatcaaccaaggagtatcaaaacacaagaagcaatatacctttattatagtgttgggactagtcatgtcctcaaatcgaattgcatatccaactttatgtcccaactcagtctccatttcttcactaactcttttagcaacactcatggcagccacacgtctaggttgagtacagccaacaatgccggtggtggtatatccatcctcatgcagatactgagtcagctgggtagtcttcccagagccagtttcaccaaccaccacaactacttgattttcacgcacaacctgctcaatgaaatcaaaacaaggtaatcaagaacttgtaccactgcatccttttgaaagaaactaaaaatcaacatcttccaaaggaaacttgattttcaaattaattacaattttctgaagggcaagaattattatcttgacctttctccttgaggatagctgcataggtgtactacaatcatcaaaaccatattcaaaatattctaccgatttgtttttgaataatttacactatagaaaagcaacatacctcaaacataacaaatgctgtaaactagcataggaaaacaaaatgaaaactgcaaataaaatactgaaaatgagtttataaactttagttacaaacctgtagcaagtcatcccgtacagtaaatatcggaagatattgcctctgttgagaaagagattttgattttgcaaagtcgctaacagcttctgcttttaccttcatgtgctgtgaaaattttgcttcctctttaaaatcaatctcaccttggtcaccaacagtagcagtatctgcatcaacctgatttttcaaaaaaaaaataagtaaagcgtaccagctaaacactattaggactatatatattatggcaaataatctacctgttcagccgttttctcaacacccaaaatatttccaagcttagatccagcgagctcccaaaagcgttggcgtgacttattcatgctctgtttttcacgaatttccctgaccaaagcagaacctttgcgtgcaactattgccatatcggaggttgggtccttcagtggcattacaggttctgcttgttttgtgaatacaactcgcccatccaggaatgggggttttgtgtctgcaaaaaattataccgtcagcatttttaagttcaacagcatcaatatattgtaaacaagtagtagtaaaaaaactttgtgaaacaagtatgcagcacgctaggtaatgttctattctcttcaaaattcgatacaatgtagcatgtacaacagagaaaacagagaacatagataactcctaatgcaggttagaagtttcagactgacatagacaggaaaggtggaaatatgtgccctgaaaatggtacataacacctctcctacatatgttcacagctcataaccgctattaattcaatatctgcttgtttcattctttctgcgacatagaagttccgagagtatctacaagaaggatcacatgaagcagccacatctactagcaaatgcacgtaatagtaaatgcataataagataaatagatgcaaggacctcatcagttagtacaactgcgagcttaccttaccaacataaatagtgtctattattttcataagtaaaattgcatatacaccattacatgagaaatagatagatgctttccaaacattttcgtagcttgtttagtgacaactataacatcgataagaggctgcgatattcgaagaacgtaccatgaacaagaagtattactttcctttcgtcctcatcatcaaattctgtctgcacctctgttcctctgacagctccagatctcaacaactgtctatcctcccattgagcattatcagcagtcatctgtgataacttcttgctctgagcaagggtcatcagactgccatctttacgagtctgcacccaataaaaatagtaagaaatcagaatacaagacattctctacaagttaaagatatgaaaaattattacaaaataactatatttactgaaaaactaagtggataattcttgaccatccaattttttgcaggtcttgctgcacatgggtttggcagtcttgaaaaaagttaaatgaatacaatttcctaatgatgatgcaattttcataatatacataaggaacttgaacaaggaaaaaacatacatctaatttggtggtattctcaagccttactttacttcttaccggtgcacttttacatgtctgagtacaaattatcggatgtttacagtaaatcacaaaatgcaagacatttttacaaaggcggagtcttgctagaagatagaagtatcagatccatacattcagtccagcgccacaatagcacgaccttatcatttactaattaatcagatatattcatggtttcatagaggctgtagctgcaataagttctactcaattactcagaacaaataagaacttatgaaggctaacacgaagtgcatggaagcacgggagatgtaaacaagcaaggaacttaccagccgctttggtaattgtgcttccctctttttgtaggaactatcatcttcaagatacatagaattatcaccatcaaacatggtgttgtgttcttcacaatcatacctggagtatatttgtaaaggttagaagaatgtgtaatcaatttgttgttgtataatgataagagaatgtcaaaaatcattgtactttcatatctctacactaccatgtctggatagaactatggcataaaatcagaattttgttacagatatatgaaaaacatcattgtgccaacttacttcagatgccattaccatttttagctattataaatggagccaataaatgcaacagcagcaattgaaaggctttgttgatcacttggtttgcaaatatattttttttctatcagacacctacatcatccttttgaatacaaaaaccagggaaattttatgaggaaagaaaagtaccacgcacgatcagcattataatccatctcctgcatcatttcttcagatatctcatagttgccatcggcatctgaggggcttctatcagattccctgtcctgagataacagggtagaggttattgtcagaatgaccagtgaagaaacaaaatgagaacttgcaatatactataaagtgatccacaaacaacatgaaacttaaagttagttagacttctgtcagtaaataccaaatagactcaatcaagtctattgtttgattgaaagtacatgaaataattaaatgaattacatagtagcctaactgtaatactcttcagacagaaagaggcagaaaaattaaagcaacttagatcagtcacatggtaatttcgtaacattacttcagttatagtttaagtaatgctatacacacgttcagttcatagaaataaatatcgaacatccaatgacaattattctaaaaacacagatagagagaaaaaagtgaacaaaatacatgcttcattacatttatcattgtttcgagcactggtctaaatggttgaattaaattaccagcagagttaccacttctaaaaatcggcattccaggagattcaacattaaaagactgtcgtgctaaaaggaggattaatttctcaatagatgtgatagtgtttaggaatgtatgaatggggcttccaactctctacaatgtatatagcccataggactacaatcttcgtctactctacttcacctcctgggtgtatggatgtcttaaaataatcataccgaacttgcaacatatgagatgaatgcaaaaaaaaaaaacacctgatttttcctgtataaaggcatgttttgatttttcctacataaaggcatgttttgtgaaaacagaatcctgacttacatttgatgcagatgtagacgaaaaagtaagctggtgggatcttccaccagaacgtggataagaagacccttttgatgaaccagaagcgcgaattggtgcaggtgatggagatacgttatcccatggggatgctggatattcaaaacaacaatagaagtatgatttatttgatttaaattaaagaagaaaagtgcaaacaacattgaatagctgagcttttgttacctgcataacgtggcgtattcccacctagccaaggagacactaagcgtgcatcaggggatgcagctgcaagcataggagatggtgaaggatgttgtctatgggaatttgagcgatcatcacggtactcccgacgaggtgtatcttcccattcccatcggccactgtcccaatcagatcttgctaacaatttgcaatcacagccacaattttatcagcaagtgacaagccaattagcctaagcatgaaaagaataagataacaaacatgataccaggtgttcttgagcttcttgagctatgctcatgccgacttcgcttgttcatgtagtcaacggatgtagatctctcacgttcatcacgcctattatgcgattctctatcatcatggtgtccccgccttccactgctactatagccaatggatgcagatctttcccgttctccatgtttatcacgggatcccctatcctcatagtcatcatatctacgaggagtgctacgagaatgggaaccttgagaacttctagatttgtgggtctgtaaaacgacatgaacagaaacagacttggttagtaaggtgaagagaaaataaaacagccagattctttatgaagttcccaaagtaatatgggacacaagtaatcactaacatcttgtcgataagatccatctcggtgactgggtgaaggaccccttccatcctcatcagtgatggtaggttctgaaaatggcgataacgctttagttacaatggacaatcatttgcatttgtaacatacaagagtgtatatatataggacctttgaaagaggttctctcatcagagttggctcctcgatagcggcgagaaacactgccacgatggccactgctcaggctcttctcatcactctccgcaggtcccggcttctcatcttcatcgattgaagtagcagctgccactaccttctgaggcggcggcttgaaggcattgccgccttctgcttcccgtttcctgtgcgcgaggaggtccaaacctgcaaaaaccacatctcagaatcagctcacccgagctctagattttgcaggcctcgacgatttctgagtcaaattcaaattgggatctgctcatcaagttttacacactaatctcgctcgcggaaatcgaactccctagcaactctagaaatccacttaaaatcaaaatttcctgaagtctcgtcaaatacagaagcagaagtaaaaccaagcaccaccatacctagggcggacttccccggcggcggccggtacatgaccctatccctgctcggcaggatcagcccctgcgcgcccgtgtcgtcctccggccccagggttgtcatcgtcgcgtccatgtccccctggaacaaagagagaggaagcgccatctcggcgtgagaccaaaagctcgctgactaccccaaaaccccaacgcgctcgaaacagattactcacctccatggtcgccggcgggcggagcggagggcggcctccgagcaccgggcggcgccggttcgactgggaatcggcggcggcggcggcgagagggaaagagaggggggaggggaagaggtcggcgggtggattttgattttggcccctccgaatctggagaggtgaggtgagggcgtgggggatttgggatttgttggtagcgggagggattgggatgtaaaaatcccaacgggagttttccacttgggaccctgtaggtttgatgttattacaagctgtgtttttactaggtcggttagagaattttgtactctagtgcaaagtaaatggtggtaacggttaaacataatcttggattccgagataattacttatttgccctctaaattattgaatgtattctctacttagaaaaaatgtccatgtgttgcaacgggtaaagtctattttaatcttattatatggtttagttaagataaaattcagtgtgggagtctgcttggatatatatatatttttagaaaatcatgagctgcagttaggaatccgatcgtctcaagttaacatacgagtttttttaaacatatttcttatatgattccttctgtattaccaaaagtgaacgattttaaaaactgactcaaatatggatatgtatttcaaaagcaaacgaacttaaaaaccgactcatacacggatgacgtaccaaaataccggcaaaaacatctttaatttttataatagtatatttggccctcataaaattggctccccttttattgtctcttttttctcaactttttttatttgcccttgagtggttcttcatttaaatttttcaaaaaatgcccatcttacccctgcatgaatagtagaatctaataaattattttctttaaacggaaaaaaataaaattgggatatggtatcataagtatatcttttattcgttgcatcatatgtaaatttttaaaaaaatcgtaatagtattattttctttaattaacatgtgtcatccaaacaacacatattgatgaataaaattatgaacatacagttttagtttcattaatgagaattttttttaaaaaaaagggcagattatgaatttatttggaatgtgtggtaccctcataccatatgggaataaaaagggtaataatgaaaaaggtgttaagaaattcttgagatcataataattagttggtgcatcattaccagttcaattacactcttcatcaagcatcataattatgaattttgtaagtgataacaaaatatttgccatgagagagcacctcttgtgaactaccaagggcaaaaaaaatacttttatggttctttgggcaaataaagaagaatagttaaaaatgaagggtgatgtcacaataaagggagagagagtttccgagagaaaataagggactaagtcaacttccatgaaaaataaagaatttactcttggctttccttccttttattaatttaacgtataaaaagtaacctttgaagcatgaagatgagataaatactaaaaccatttcggatatttttgtcctttttggaacaaatattgaatgttgagtaaggattgtattatagtcttaggcccagttattttcttcaactccaaatttcaacttactcatttttcgttaacacgttattcaaactgttaaatggtgcatattttataataaaagtttatatgagttgtttaaaaaaatcaaataaatctatttttaaattttttataatagttaatacttaataatcacatgttaatgagttttctcgtttcacgtgtgctacaaatctctctaaagtcatggaaagaacgctgcacaaactacatgtaatatagaacacattgctctatgtgtctctctgtcccagaaactcttgcctgcattcataactaaaaattgttacattttaggatggaaagaacggtatttattaaatactcaaaaaatatataatatttactttctactttataggatagtgaattgatgtttgtttgacataattgttccttgatttactaatcaaacaactttagatgggtggggataacacaaatgagaagattatggttgttcaacataattggctaacatcaaggccaagtacacaaggtttatgggtcctaaaataccttatattgcatatcttaatccattcttattctagcacggtactagtaaaacatttcatgactaactacatcctcataggtttgtatagaagattgatattttttaggttaattggatacatgccattataaatttgatgtgttttgagatatgccattataatttgtgtatttggatccgcgccattacaatttgcatgtaagttgaaacctgccactagtctacatattttagccgtattggacataattgcccccgtcttcctcctccatctctcgtttctgtgtaacaccagccgaagccttcttccccacctccggcggagtgctgcctcgcagtgacgtagtccccggcgacacgaccatacgacccctccgcgcggtgagacgatgaccaggaatccggcggcggagaggtattgcgcggctgcccgccgccgggagacggcgccggggaagaacttttgaagttgacgaggccggccacgatggagctccgccaccggtcgtgcgcagctacgcccgagcctccctgtcacagatccaccgacgccgtctagccggagcagtggtgcatcctggcccgagctccgccgcaagtggcttcgcccagatccagataaagcgagagagggggcgccgaatccaccgagagctggccggagcctcgtccgctccgagctccgccgaatcttgagctggcgtccgctcgtccacctcgtatcgccggcttcgtctgctcatcctcgtgtcgccagcgtcctgccgtcttccattcgtcctcgcgccactggcggggccatggccgtggcgacgtggtggtggacgaccactgccgccgtctactgcaacgccaccatcgcctcctcctacctgcccgttgtctgccgcgccttggcgacgccgacgagactagcccccgatgctggtgagaggcaccacgccaagctccaccggcagcatatatctaattaacccacaaaaggattaattagagagtgagtgagaaagagctcctgctgctcctgctataccgaggcaactgagagtctgagactgagaggagagaggttgaagatgagggtatttccgtcacatatatgtaaaatatgtatgtcaatggcaccattacaatttcagacaaataccaatagcatagttctaaataaatgaatagtagtggtaaatttcaaaattaaaaaatttgtaatgttatatatctaattaaccatatttggtaatctttgaatgcgaactaagggtagagccaccatttctttatccattatatctatgacattaatctctatatatcccgtgcctcatgggatcatgcttgtgttggtactttagatccattgagtctacttctcttcctcaatgatataacagggcatatgcgagcttttgacaaaggtagtaaaatgacatgtcccgctcaaatgttaagcccttgaatatcttggtcattgaagtggggtagggtgctttaagtttcttgataattagcccgatgattggttatctgacaatgattatgacaatactatgtttaataaaacaaccaacaaacaagataaatgatcaatgaaaattttcaaatacggcaatctgaaacaagtcatatatagaaggaaaaatgatgagggtgcctaaagcaacaagtgaatttgacaagataaatgagtatacatagaaaatttgagataaatataggctgtgttcggcaccccttttccccaaccactctcccttgttttccacgcgcacacttttcaaactgctaaacggtgtgtttttgcaaaaagtttctatacgatagttatttaaaacatcaaattaatctatttttgaaaaaaaatagctaatacttaactaatcacgcgctaatgaaacgctccgtttttcgtgtgtaccgttccgattgggaaaaaggatgccgaacacagccatagttggcgaggcatccacaaaaaaaatattgggctttcatgttttggtgaaaagtgctcattttgatcgtcatatcctaccttagtataaagttggtatctgttaactcataaagctcaatatgtaagtgtgtcagatcatcacccatatctattttttctataaagttaagacccaaagctgaaacctcagtattccacgtcatcgctaattcttagccgttcgatcggtggatgagatcgcatatgaaccgttggataagaaggtccccggacgagatgttgagcagtgtgtttatgcatgcgttaatttagaatgcatgtaacgcaagcatgtatgggtgagatgttgagcagtgtgtttatgatcagaggccatgggccatggttagtgccatttattctccttctaaatctctattaattcttctagattttttaataatcacatacatgtaactgaacagaaccaacgccatttgagaggttattggttcgatatggaaatgaaaattggtcacatattggtttaatctaaatgcatatatatgcagtagacccacccgattccttttgagcaaatgcaatttcaatttactaggcatttccatcagttatccatacacaaagattagtcttagaatactacaactgaaagtatctcatgtatttccgcagcaatatcaaaccacctttattttacttttcaacgatcaaatcctatatgatataaattgttataaaccccaccatcttaattatttgtagcttttttcaatagttgattaaaactgaaaattatacaagtgtagctattatttcttctaacatcatacaaaaactcccgcaacaacgcacggggtttcatctagtcttactataaagttaatgcccactaactactaaagctcaatatgcaagtgtaccacagcatcaccaactagcaattattatctaaaatgttttagatcacatgcatctgtgccatatcatcacccactagcaattattatctagagtattttaaatatcattcaaacatgacatatcatttacaattttattgtatttttagaactcaatatgtaagcaatgtcatatcattatctccacattattttcatattatttagatatatgcacctaccattttctataatgtataacatgcattcatctacatatctcacggtaagataggataagcaaagttattgctttcttatgtcctccttattttgactttcaacattgcaagcaatttgtagtaaatgagaaagataactataacttcgacgagcaaacttgtttcatctatgcactggtaccaacactctttgcatgactttttgttaacaacgtatacgtcgtgctgttggccccgtctaccagttgatatgccaatttttgttgagaagtaattgttatgtacaagtcatttaaagccgttgcatgtcaaccaatatatagccatcttaacatacaagcgcagtaatcctatgtgaaaaacataacgaaccactacatttcaatcgaatagggtatatttggtgacaatcaatagcacataattcattttttaatacgttgatgaaaaaagaatagagggagtatatgatattattgagctaaactaagattagttcaaatactcatcttaaaattccttagaaattaatgtagaattgatatttcgtttgttccaaaatgctatcgcgcatggaaagcaagtcaaggcgagggaacacctgctcccattcttcggaaactcgaggttattcgcgcaaaatctcctcccgtcggtcgcccgaggtctgacctagggttccggcgactcccatggccggccgccaccgtaacccgccgcccccatccttccctcgcggcggcggcgggggcgtgggcaggggccaccacccgcctcctccctcgctccaccaccaccgcctcccgccgcctcatcacctcgacgacttccgggagccgccgctgctccccccgcaccaccgcctcgacgacttccgcgagccgcaccacctgccgcccccgcaccaccaccaccacctcgacgaattcggcgagccgccgcgccaccacgtgttcgcgggccacggcggcggcgccgggccccccccggcgccgcacgtcgtggcggcgctggaggagcggctcggcgcggagatcgaggaggcgcacgtgctgcttggccagaaccagcggctggccgcgacgcacgtggcgctcgtgcaggaggtctccgccgtgcggcacgagctcggccgcaccgctcgcggccttgccgctgcccaggaggaaggcgaactccgtcttcgcgaggtgcgatgcttttctgatgcgctgattttgtctctgttttttttcccactaaatccttatgagaaaaatcgatctatagcacagaatcctgatgcttatcccttgcatatatttggtctgtttagttcggcaaaactataaattcctcttgcaaatttagttccaactttgacttcctgactcaattgcgctaaaattttattgcggtgggtctgtttgaagtgattatgcaagcataataaccaatgtcgtctattttggaaccctccaaattttgctttgtgaaatattaggtgcatgataatgcgggtctgtttgaagcgattatgttagcataagaacttatgttgtctattttggaaccctctaaattttgcgttgggaaatactgcatgatagtcggagccagtggtatactgtatttgccttgcattgtgcctttgtttgcaaaggtgagggattcagtgagaagaaaattggaaagagggcagtgtaggtacggtagggttaagggctgggcttgcaagcagagccactacaatccatcgtattcttgttttggtagtcttgcaagcagaaccactacaatccatcatattcttgttttggtagtcttcatccaccttagtgttgtttccatccgtctccccctatgctgataatgcacggagctggaggtcagcacttagaagtgcaatgcccgtaactccataagatgtgtgaatatccacattcatgaatcctgggtatggattttattcacatacaaggtgaaccgtgaactgctcacttcatttgaagtcatcttattcttctccctcttgcaagattggtaagcaatggaaatgcggcagggagggagataatgacgagtgagaaactaagaatagaggggagatggcagcaagctagagtagacaaggcgcatgtttatgccttttcgatgccaagcacaataactttccccttcggatgccaagtttgcacaacatttgtccacaagggaaaaagttcattttaatatttgacaaatatgcaacctgtcatggctaagttctagattttcttagtgatacactgaaatttgcatatcataattaatgagtaaatttaaacagcacagagcgttctccctataaatccagaattttctctatgcatgtgtttagttggagggattttggtgggttgggagggggccaacccatttttgtaggtgtttggttgaaggactaggtggaatgggatgaaaccaaaaaggaatattccatcaatatttgggatgagacggtccgccagaaatggccggaccgcgcctatccacttcacccgcgcacatcacgtgacccgcacatacctccatccatacagtgaccttatccttcccagccagagtctattttttccctgtttttacccacccagcgagagcgatgcaacaggagcgagagtggcgatggtagcgtgcgcgccgtcagcgacggccgccactccttcctcctccctcctccatggtggctgccgcgtgcacgcaagtcagcaacggccatggctccttcctccctccatcatgcgtgcgggcgagctgccggcggccacgtgcacaagagtcagtgacggctgcggctccttcatcctcccttctcgcatcctcttgctcgttgctgctgcttgtcctcgcatcctctctcgtcaactgctacgagctgaattctggagctgaggagcagagctagcttggctgtgatgcttgattcgtgattttcgatttctgatagtggatagacatcaccaaagagaaagacatctacgtatatgcaaattaatagctctagcagctctaccagtatagtcaacatgatatatagttgtgaaaatatgtgacggtggattgacatcacaaaagagggcatttttgttagaaaaaaaaaaagctcggtgtgagaggtaacctcactaactcaatgtgaggaggtatctctatccaactatcccaactccatccctccatccctccatccaaacaggtgataggaccattccatccctttttatccctcaaaccaaacaaaaaaatagggttcattcccatccctcaaaccaaacagaaaataaatgacagggatggacccaacccatctcacctcgccctcaaaccaaacacatgctatgcgaaaactctgtttattggagctgtgtaagtattttcacactgcttgatatgatgtttgaaacttctggtcgtacaatggcatatgtaattctttccccccaaaaaaaatcttaactgatctgttcttaatatcttatttccttctattttccccaattatttccacatatcatcttaatccactgcctttaaatacatcatacttaaatgcatattttgtgttgagtataggttcaaagctgcatatctgagtgagaaaggttcattgaaattttcagttgaagagaaactgcattgtttggtaatattttcaaatgtggtcatgtcaagcttatgtctctttgacccaaagctatctgacttagtgagctagtaggttagttctgcccatgccaagtaaaattgacttgtgcctttttggattgtaacatcagaaataattttaataggtctatgagaggtcaatgaagatggaggcagagctgcgagcagtagaggaaatgagggcagagcttgcacaggttcgcctcgacattcagaagttgggtgcagcaaggcaggaactcatgggtcaggtccaggggttcacccaggacttggctcgatcagcagtggacctgcagcaggtggctgcgttaaaagctgagatccaggagataaggcatgaaacacaacatttgaggtagagccttgttaatttcatatgcactttcagtgttctgaaagagagcgatgtgtatttttagtctttttgcaaaaatataatctgtatatgcaaaattgttggtgttatctatttcccactgaatcatcttagctatctcctttgcacttgtgagaaaacaatccatcgctgttttgttttgccattctcttggttctatgaactcttttggtttgtctggtcaagttacgatctattataattaaaatttgaaatggaatgagctcttactttttttttgtccaaaatgaattccagttacccctggagtagtagagagagtgaaattccaagaataaccttatgtttttcaaccttatatggttgtattatttgacctgcagatctggcattgaggttgagaagaaaggatatgccgagagctatgagcagggacaagagatgcagaagaaattgatatcagtggcttctgaagtggagaagcttcgagctgaggccgagaagaggtcacgagctgctgtgtctggaggcaatcaaggtacttaacaaactctggatgcttatttttctctagtactctttttagtggttcgggaccatctgtgttatgtagggatacttaatgttttgaaatcagatcatgtcaaccaaagggcataatttgtaaggttgaccatgtagtttaaatctctttccgtgttgcacatctggaatataacttcatcatgacatggtgctcccatcctgcagtgtacgtcggaggctatgggaatcctaaggccgcatatgccgcaaatccttataatgctggatacaacataaatcaagtatgtctcttattctttgtttccgcaatacctatttgcatattctttcatcctcatttcttgctacttttgaagccacatccccaggcaaacactgctgattccggctcccagtttgggcctggctcaacgcacgctccctggggtgcctatgacatgcagagagctactggacggagatgatttttttttcaggtgtgttcagcaaattacaaaagcatacttttctgggacaaacctaacagctttcatgcaatggtgaatcatgaatgtattacttactagtatactctactgtgagttgtgctgtacatgtattacctccgtttcaaaatgttgcaacctaggacgtgatttatcctaatacaacaaatctagacaaaagttctatccagatttgttgttctacgatgggtcaaatctgtcaaatcccatgatgctgatggagactgcagatttgcgtcgatgtgcattttccacgctagaggcatccatttctggcgcagcaatctctttcgatcgatctatggacgagtgcgggcgagattcgttgagaaacataatggatgatttgtgatgtcggaattcctgtacaggaacagtcacgctgcaggaattggaggaattgtgaagattgtgcaaacaataaggtttcacaggaggaaaaaaagagttaaacttgtgaattatcccattaaacaacgcggtgttttattcttcatcattgtgaccatacgtcaaattcgacaactaatcttgtgggccaaataagcattttgaattctgagcagacaatgacgctacttatgcattcaacaggaaagcacacaaagacgttatggaacagaatcatcaatcaataaacatcattagagaaagcacacaaatacgttacggaagggaatcatcaatcaataagcacatcattagcgaaagaatttggtacataaataactttacattcgaaaggcatcatcatgaatggccaaagcttttagtctactgtctaatctgctgccaggaaaacatgtatactgatcacaagttactaaaacatgtacaaggtagaacaaagaacataccagtcatacggcctaaacaactccaaaaggaccaaaaatcatggcagtcccaaaccaaattacagattttagcagcgcaaatctagattttcaactagcatttggcggtttatgcttgcgggaagactttgtttggcgggatattttcacgcctctccacgtaggcagccgggaaccatcctgccacccccttgcattctccttcggcccaaccattcggagcaatctagagcagatacaaatgaaaaggcaattagatggtaaatttggattgaggtcttaatgcactagacaattcagcaccattgtttgttggaccaatcgattcaaccctacccaactttgtacatcatctggttattccctcgttgattgacaagctaatttattcctgaaagaaggacaatcactagctactacatgatcaggacaagcctccagagactaattggttccattgccagaggaagtaaggcactaattggtcatctagtctagagactattgaaaatcacttaagattctttctgcgggcaatgggggcagtgattaaactgattatcacactacttcgcagatgaaatgattattaggacactgacctgacgaacaacgacataatcaccaacaattaaactcaactccttttctgtggtaccattgaagttatgcaccgcctgcagcaacaagaaggttcaatgcacatgacatgtaaaatatggtataattgcttggtaatgtcagttactcatgttaacctcagcaaggaagtactgggccttctcagcacgcttatgggaatgaatagtaggcggtgcagattctctcttttgcttttcagaggacatctagaaataagaattatgcaaaattcagaaatgcaagagattttgacagtttacatgataagcagagtgaaaattctacctcagcttcaacatcatcaagtatagcagctaacctcaaatgaaataacttttctgcttctaccttcaacaggataagtgacaaaggataagaatcaaatgaaacaactcaatggtgatagatgaattatatgctagaggcaggcaacattaccatgccaaccaggcgctgaagagttatcctttgctgctgagattcaacagcggcaagtgcagcagcagcttcctttcctaacacagccatgcttgctttgtgctctatcattttagattcagactgttgaagcttcgtagtgtgctcagcaagtggagcttctcgtacccgttgcttccttctagcaatttcagcagactgtatgacaaacaagagggttaagatacataatggggaaaagtattctatgaagcatagaagtagcaatagtaagattgcttgcttgcaatatggaacaagttgctaatacatacaaggatctcagcttcatgtctcatccggctataacgttgtgcaagaccacgagcatcttccaggggagcgcctgcagccatagccctcaatggatctatagtctgaaattcaaaataaatggaagtatatttgtaaaatacattgaaggaccaatgcaatactacagatcttaaatttctagagatctttaattgaaggctaagccccagtatgcactgaaaaagaatgacaaaaactgcatcttcaaaataatggtgaattggtgatcgcttgcatgacaactatataaatcacgtgcaccaaaaggtaaagggaaaatgttgtatggtgttttatttccaggcttagatcaatagacctagaaaattgtgtctaagagagaagatagggcaaaaattgggaccaggcggtgagacatcattactgcttggttttaatgcaccgacaagtttccaattattgaataggatgaaccagcataaaaattcggattccacaatcatcagcctaaaggacttccagcatattcaatatgctggactgtaaatgagatctctagtggtcccttccatcagtacacttttaggatatactccaatgtaaagatatgaactggatgagatccatcagtatatacatatctaggcttgagtatgcatgtgcacttctcagcacataaacatttcattgcaaattccagtacattctctctactccagcctaagtgattgagtgctaggctgactgcattatgttggtgatataacaaaaaaaggacagttatttcttgctatggcccaaaaagtcgctaggcgccagatggttggaagagcaagtgcctagtgactaggggcaccaatatgcagtctaggcagctcctagaaccaagttgactagcggcttccaaccaattagcaagcatatgacatacaagaaagatactagaacatcaatataaaaatactagagccctcaaggctgggcagcagcataatgcaccatcaaatgccaaattgaggcagctaccctgtgcctagcaccgacttttagaacactggtagtagcaaggctctttttgtagactagtagctcctcgtacagctaccagagagatacacctatctattgaggcatacaagaataacaaaagaagggttcaaaataccatatatatgtacatactaagaaaaaccaccgattgacaacataaatgcagggtacagagaaataaacattactgtgcacaagccagcaaaatttgtctgtgtgagaacagtactaattaacatccaaaaaagttacctgagaagataaaattctattaaattcttcgtactctttctcaacatttcttagagcacctccatacagagatgctgcttttgcaagggcttcatcactagcactactttcacctccatatctataacaatcctctgaaaattttgttcctgtgaccaaaagaaagaaaaatgtataccggtatcactcgtaagatgttgaatttggggggattcgagcagatcatgcaatgctattctttttgaaaaaggattccttgcatacatttttaaccattgccttgtcttcacaaaaaaggtctcaggctcaagaaattcaaatttttatttgatagtcatattcttttgtcacatattcatcctctgattttgcaagttgagagaacatttctcaattcccaaaagccccttcacaacatttactggcagcccaatcaaaaagtggtaataaatattatcaagttagcaggatccgataatcgatagcgaagtttccattctagtacatttagctaaagatagcaccattcatgatgagcacgtcctactcctattatgatgtcatcacatggtttttgtgggtattgtcattcctcgttttcccattggtgttctggccacgtgaaacatgataaatcatgctctcagacaaagaaggtgaagtttagaagtttggatcaggtgattttacagccagctcatccctcaaattaaacacctcatattctggaaggtagagaggttctatcatctgatcctcattaatattcccaccattcaagcataaaaatgatggaaaagcatgcaaatccaaacatgacataataagctaacagaggatggaaggcatgaaccacatacccacttcaacatgcctgattccaatagaaaccaaaccttcagccgctcgaacaatgtccttttggaaatcctgttagcatatatgcacgcattgagtttaataactgaaaatggaattcttgggaagtatttcacgtaatcatgcaaatattctcttctgtattaatgtcttaaaaacattgtgtaatgaactgaataaatcagacatgtcaaatgaaatacaccagcaatatatcaataacataaatgcaagattaatttgctgccagctgatcatattacataggtatgtattttatgctatctgcaattctccttccttacccttccagaacgagtagaagtgtacaatttctcaagctgttgatgtctctgtaattcaacttcatcaattacaacagcgtctgaatgttcatagcccgtagtactgaactgctttatcacagcctgaaatgtaaacatgtaagcaaagaagacttgaccatgaatatagcacatgaagcactagcagacacttccaagaagaaaatatttagtcatttacagagagcggcatggttttataagtgacaactaagccaaattaaagcttcccatggatataattgcactatgacaattgtatcaaattgtcaattgggcgaccgagcctaataaaggaaggttaacgtacgtgatgtcttccatttgtaagaattgcgaacatacccgaccgacagactgagtaacttggataaaaactaaaattacacataatgttaatgtttacaagcatatgttgcccctcattacaaaattactcctgtattaagagtaaattccacaaaactacatatactttgaccaaaacatcgcaaaaatacagatttaacaccaaatttttcacataactacagattttagagtttaaacccttaacactaatgttatcttcaagctataaaatgttgtagttttgtgattatactggtgctaaacttgtagttttgtgacaatgttgctattaaatctgtagtttgtgatactttatcttaatggttacactctggtggaaaatatatttaatctaaaatcagtaacaatctaacagctggcaaacagaaggggaaactatatctaaaaaggataaaaaatagctcttagtttcacatttcaaccaccacccagagaacagatcaggcgatacaagaatagtaattcacagcttaaatctgatatcccagggacaaaaaattcctgcaacagcgagccatctcgtcgccatttctatttggttttctcatggcgcagaaccctccgactaagtccaaaacggaaacggagaaatcgcacccgctacaaaattaaccattccttccccctaacaaacactgagactgaagggccccagatctgggatccgaacctgctgctgcttggcgacctgctccttgaacttgctcgcctgcttcctcagcacatccatccctctccctccccttccctcactgaagcggacgtcgtgctgcgaccgagacgaggaagaagcgaagcgggggttgggggaagagcgcgaaggtagtagggctaaccctaatcctcgctagttagaaacggaggaggaggaggaactggaagcgcgagggggcggcgaggaaggaagaggttggccgtgtggcggccggcgacgcggcgggcgctcggcgaacggaggaggcggggcggcggagcgagagcagagacagacagaaagcgagcgcgagagccgagagagggagcgaccccgatgcgagagagaggagcagttgggccggagtcagcccggatgggtggatgggatggccaccaaccaaacaatttttcttttttctttttggtagaactagaaagaaaacaaattttaatactccctccattccaggttttaacacgttttgattttagtgaaagtcaaactactctaagtttaactaattttatagaaaaagtagtactcatatttttaacccaagactaatatattatgaaaatttattcaattatagatttaatgaaactatgatggtattataaatattactatttttttcctcaaacttagagtagtttgactttgaataaagttaaaacgtcttataacctgaaacggagggagtagtactaaaccatttacagatatactagtagtacaaagttattgaaaataaagaaaatatttacaaaatttatttgaaaaggtgctactagtactttaattttgaagtaaattgcatcagcggtacacgagcttgttaggtgagtgtaatctagtgtatgaacttataaaatactcgttttggtacataaagttatcttgcacgtgcaaactaaggtcaaaaggacattacataactaattttgttgatttatgtgctaattaggatactacgtaaacatatactccctccatttcgcaatgcaagtcattctagcattttccacattcatattgatgttaatgaatttaaacagatataaatgctagaatgacttacactgtgaaatggatgaagtgtatgagaaggttgctacttagacatacacatgttcaataaaaagatagaatgagatatagtgatgtagagaaagatataaaaaaaccgagcaatgatacaaggattagaaacaaacgaaattcaaaataaagtagagaacaaatttataaatatttatactcactatatgtatccacgccacatcttaatcaacatcagctatgtaaaattaaccttgccaagctattttagacctagttcgcacggatcagataagtttgtgtatcaaaacgagcattttgcaagttcatgtactaaattgcacctacctaataagtttgtgtaccaccaatacaatttactcttaattttttttatcccaatgtgaaatttaaatttttaaaaataatttttttatcgcagtttgaaatttaaatttttagaatacacttctctaggctttcgaaaactgcaactattttatttttaaaatccggatttttcaaccacacgataaaacgtgtgttatcttatatatatttattaatatgtatattttatcttaaagcatatgtaaatgagtaaatctaactctcacattgtaggatcgaacgtaaaatatcaaggcagccttggtagaaacaccaaaaactaaattcttttttccaaaattaaaaaaaccctcaaacttgatggagatgtgttggtcaaacagatcaaagccggtcaaaccgcaatgaagtcgtcacgaaaatgctcacccccggacgaccaacggggtggagaaaaatcggacactgtctgccactgcagcatgccagtatgcaaagaatcttttcttttcttatttcttcaaaagatttttttatcgtaaactatttatctaatctacgatctaattgcaccactaaattcgttacaattaaatctttataacaagaccacacatgattatatttcgacaaaaaaatattttaatttttttattgatttttttaatgttgcatgtggtctcttttgatgtttcaactaatagttttataatgtttcagctaatgtactcatgatgtttcactgtgtatggatcaaatgttgcagtggaacgcgccgttgcaataaatcacccacatattttggaaaccctatattaagggaatgtggtttattttttgttccacaaaaaatgtttcacctagtgcactaacaatgttccactatttatagatctaatgttgcagtgaactgaaatatttcattgcaataaaaaacccacatattttggaaattaagggaattcatttcattttttgtttcaccaaaaaatgttccacttagtgtacttataatgtttcactgtgtatagatctaatattgcagtgaactaaaacatttttccgctatttgctgaaacattgtttttatataaggtgaaacaacaccagatttaaacgagtgaaacattttcgatctacttagtgaaacaattccgatatacctggtggaacatcgtgcaacatttaaaaataattcaataataagcactaggcggtttcctattgctcgatccagtgacggtagtgcggaggaggagggaggaaggggtggtagaggctacgttttgggtcgccacctaaatctcttgcgcggggtgcacaaggttctagagatcctataatccaccactcaacctaatttacaaatttcaactcaaaagtgaagttttaatatgctcaactttttttttgctctttgcaaacctttatgtgttctcttaagaaacactttcaaattgctttgatatatttccgaacgaaactcaaacaaaattaaaactcgcactactagaaaaataatttatcacaaaaaaaatcgtagcatcaatgctaaaattgtggcaatagatacatgttgccacaatcttaaaatcgttactagccgtggtaataaatagcgtggtaataagttattgcaacgatttttatttagttgtaataaattttgatattgccataaaatggatgtggcaaaaaatatatattgcaacacttcacatcgttgcaataaataactatagccaccactccatgtgtggcattagttctacgtaccaaattaaatgtttcaatattaatttatcattctacctattttcttttgatatcttgtcatggctaggatttaaacccaagatctctctccctcacgcgcgctctccatgaccaactcacctacgcatcaattttgtttaaaaatgcatataattctatttgagacttcctaactgagatttgaatcatgaatttaagtatttaaaagatttcgaatgaaaaatttaagttgtagatctcatcgagagctataaatttcatataaaattcgtcctaatctgtatccatatgaaaagaataagttaaattatgatatgctaatttttttattgcaacgaatttgttgatcatggcaatagaaaatagtgaaaagtaccctgtactatgtaaattgccacaaaaattaaatttgtggcaatagaacatgttttttttgcaatagtaatgttttttgtggtgatagctcatttcctattacaacaaaaatactgaataaaacatgatcgtaaatcgttgcaataaagtatagttatttgccatagaaaaattatcattgtgatagtacaatatattgccacgaattattcggatcatgatttggataagtatcttaagagaaaaaccagtttaaaaatagttttgcacataaatcgggcgctgacgtcagcgtctgatttttccctaaagcatcggacgtccgacgcgtagccctctccaagtcgtcagtctcttcgccagcttgctgttgttgtcactgccttcggtctgcctgctcctatggtgtacgctagaccgttgggatgtaaagaaaaccacatttattgcatcaaattgtgtttgcaaagtgcatctaaagcacttctctctcaactcatgaattagaattgaaaccccgatatgaccggagaggtatcgatcttcgctagactaaggtgccttttctacgttgaaattgtcttcattagatgaaggggacctcaatattcgatggtgctgttatgattgaaagattcttctctaggtctttgatgatcaaacatgtctttaatggtcaggggttgggaacacatctccaacatccggcaaccaaattttctctaccagaaagtcgatgtattctagtcttaaaccctcatctatttataccacaatgtggcttcctctaaccatgaatccaactagaactattctagtcttaaaccctcatctatttataccacaatgtggcttcctctaaccatgaatccaactagaactagtacttctaatcaccagcaaacctactaaaccagggaagcagtatccccatacaactccacactccaatcttttcaaacttggactccaatccaaatttaattactctctccatacacacataacactatatgtatgccatatgaaaaacttcacctccacactcattgttctctagcttgagcatctagcgtgatattctcgatcgtctagacctcaacttctaccaagtgtagccttaatccatcaccgggtatactctcatagtctcaagcaacacctacacatggaaaaaaacttcatatgtgagtacaatctcgcaccaacttgacttacatcagcacacaataatatcacatatgaatataaaccatctataagtcacaaacatgaagaaaatctataaatttcacgaaatcaacccaaaatcgactccaaccttatctgactgtcggcaacacggtcagaccatccaatcaccactgacctgatcggcctcctagagctgattgaactattcaccgtccgaaaactcgacacaccatattttccaaaacactcaccttttgataatttgttcagcacatagattaaatcaacgccttaatttcacacgcatgacacataaaagtcagtacttcttatttttcttttatctattctctcgatatatgtctattttgccgtaatttatctactattaaaactgctcttgtagtaaaaatagagctgcgcggttggaaacttcagttatggtaaatcgaagacggcaactgtttagatttctaccacgaaacatgtcatacgcttggcaaaaatgtatagcaattgtttcgtaatctatctatctatcttctatctatctatcttctatctatctatctatcttctatctatctatctatcttctatctatctatctatcttctattatatactaaaggtccattaaacttcctataaacgctctcaagccgccacgtggcacttctacaaacgctcctaggccgccacgtgacaatgtctaatctcaccgtcgattttcacttaaatcggtggacccaattatttggaccattagattagattagatgtatttgatttaaaaagaaactaataccttactattcaccggaaaaagaaaacaaattaaactgattttagtcctcccccgtaccccacgcggacatatgcatccatccctgtatatacgtatgtacaggtaacgtactaacgtacatacgtaagaatagaaaacgatgaatcttaccttacattagatgtattttatttaaaaagaaactcataccttacttcaccggaaaaagaaaacaaagacacttacttcaccggaaaaacaaaacaaaaacacgagtactccatatgtacgtacatacgtaagaattaaaaaacaatgaatatattacctattgtttatttaaagaaaaaaactatgcacggacttactgtaaaaaaaacaaagaaaaaacatacgtgtgtagtaccataaaaaatcgattatatttaaaatagagttttctaatatttaaagaaaatctattactatataaatttaagcaaatatcaccgccgatttttaattaaattggtgaaccaaatagtttaaacaattagatatattttattttaaaaactaataacttattactctgtgtacgtatacgggagaactatataacaattaggctagaaaaagaaaaaaaacgtaagtaatccctacgtacatacgacttggaaaaataaataaaacttaaccgctatccatcgaaagttcggaacaaagaaaaatctactcacggtggtctttttaaatagtattttcgaaatcctttactataaaaacaaaaaaacaaaaaaaagcgtatcattcgaaaaagatcgatggtcttttgaaatagtattatctactatttaaagataaatatattactctacaaatttacgtaaatatacgtagttaaactaaatctatattataaatatgaaatgttcgatcttaacatacaaggctgatatatatatatatatataattaatgttttgataatttcttatttcacatcatattttagggtgtcaaatatcactcgacaaatatacaatactaatttaaatttacatttgtgaaaatgaaaacaacacaatttagttgtttcattttacaccgttagattaattgtttctcctatatacatatatatgagaaatatataactgttgaccggaaaaagtactccgtacttatatatggttgaaaaaaataataatgcttatattgtttgccggaataacataaaacgtatttatgataaaggccaaaaaatgggcagtccttaaaaaaaatttctacaatttaaagataaaaatataataatcttcaaatttacacaaatgtaaatataaaatattcaatcaatgcttttaagtattctatcttttaaattattttaaaattatatatccaatttgtgatccggttgtattcctttaaataaataaactactaatatctatagccataaatacatcacaaatatggagccggcatgtaataattaatgttatgataataatttcacatcatattttaagtgtgaataacacttgacaaatatacaacactaacttaaatgtacatatgtattctccaaattactaaaggtgtctcatgtgattagaaacaatagatgtggaaaacaaaccagacaccgaacgaacatgcactacagtatacatatttgtcaaaatatgatacggtactttggagattatcgtggtaatatttagaaaatcactgtcttggttacgtataaattcttctattgttttgggataaaatttacctccttcgatttatgtgacaggggaatataagtaatataagtctatctttgatcagatgaagaagtatcattagttatatttttaatagaaaatatatttcattaatatataataaaattaaaatgttacctaaagtcatctatagcatacaaaacaaaaaatgttatataaagtttggaaactccaaattttttttaaaaaaatcacacacaatataaatagatatgaactaactctattattgggacatattttttctaataaatttgaggatatacaggttcaagtaatatgcccaacagttattaatgaacatacgtttaaagtagagtaaaacaatatttcaaaaatatcatccacacataaacattcataataataaaatttcaaataagattaaacaacatgctcgcgcgtatgcgcaggctaccttctttcgtttaatagccaaacttaagtataatcaccatactataacaacaaggggtgagattacctccacaaccctatacatatattgaaaatactaattcaataaatattatattaaattaagcaagtactgaaaaacacaacttaacatatacatatctggatatattagtagtgagaaaactaaagcatatacacaatttacttgtattactatatactacttcttaaaaaaaagtcgtcaccaccaccaccaccaccactgacatgttaaccataataatatcaatataactcgtgagtactacgttgctttatcctgcaatggtgtggagtactctctccatcccaaaatataagcaatttttggtagatatgatacttcttaggagtctgtccagattcatagtcctaggagtgtcatatcccctcaaaatcccttatattttagggttaattggatccatgccatcgtaaatatgccttattgaaaatatgccactactcttcacattattagctgggtgccattgaaaatttataaaattggaaccatgccactcctgtcactttttttgtcctcctatctcacgtcgccatcctccccgtcaagtcgccatcctcatcatcacctttccacaccaaagtcggagctcctatccccgccattggagtcggagctcccgtcgctggagcagagaggtgcagggccgcggggcgacgaccttaggcacgccggcgtcaacatcggtgaagggaggaggggagagacatcaactccaccgcgccgccggccatcgactgtcgatttccccttgtagccgccggccaaccgccggatccgcgtcaccagagaagagctcgaggttgtccaccaccagatccacgccgtcgtggtgggtggtgttgatggtggtggtgggcctggtggcggcggtggcagagtgtgggtgctggcagggcaagatggcagtgatcgcggcggagaacgagagcagacgccggtggatgagacgaggagagctctgtgtccacagcctccagcagcgtcatgcggctcggcctcctccctggcatggaagaaagaagcggaggggaggttgtcgctgcgcctgggcagcagctcctcatctctcccgtcaccgccaccgcgccccatgctccaacctgttgtcgcttgagcctgtcgatgctgaacgggcaagcggcgggacagatgaacgacagtgggacctcagcggctcggtggtggcttctctctcaccagatctggacagagatcctagcccgtcatcgtcgcgctcatcgacgagctcgagcagatgcgcggcccgctcactgccgccctcaccgaggagctatcctcctatcccgttccttcaccatccgccgtgccctcctcctccggctccctcttcgacagtccacgatcaccgcgtggagtcgtcgccgtccacgaccaccagctagccttcccggagcttgctggccagcttctggcgtaggcgtgctgcttgcagtggcatctacccgaagtagatgaaggcaccattgatagaaaatatgacggagacgacagaaatcatgatggagtggcattgttctaattttagaagatcgcagtggcatctatccgatttcatgaatagtagtgacatttttttcaatatggtatatttacgatgatatggatccaattaacccattttaggacggagggagtaggtgtgtattaatagtgtttaactgctcttgctgcaagatagtcctttatttttccattaatttgcttcttgccatcatgattaaaaaaactcacaaactatttagtttcttttagtttaaaatgagatagacaacataatttagtaacaagtacatactttataatcatataacatctgaaaaaaaaatctagcaatgccttttttttttgccttttaagatcaagtcttgtttttaccaagttgaagctaatatttttttttcaacgaggatgcacgagatatgttttctattttgaataatccgttacaacatataaatatttggctagtacattatacgataagaaagatacttaaattgtgttctttccttccctttcccaacttctaccactcgtttttcgcacatatgcttcccaaaccgatgattttttttacaaaatttttctatagaaaagttgttttaaaaatcatattaatctattttataagttttttaagctaatacttaattaatcatatgctaatgtaatcctccatgttacataccgaaggattagttactaacctaccataccgaacacaacgttaggctgagtttgttctgacggtcactcaacacatgactaattaagtatattaaaatttttaaaaataaatcaatataattttccaagtaatttttctataattattttcacaaataatatatcgtttagcagttaaaaacctgtgtgtgaaaaaaagaataattaaaagttgagagaggggagaaacgaacacaatgtgtgtttagttcgtgccaaaattagaagtttggttgaaactggaacgatgtgatagaaaagttgaaaatttgtgtatgtatgaaaattttgatgtgatgaaaaagttgaaagtttgaagaaaaattttagaaataaactcggccttacatttggggccataaaattgcatgtttatccatcctccacaactcttctctctctcaccgatctgattgtgctgtgcgcttgttcagctgtgctgctcggtttttgctcgctatgtgcacgaaaaaaaatcccaaaaattatattggtccattttatatcttcaaccagttgtaaacactaaacagctgtagtaataagtgggcttaaacctcaaaaatggctacacaagcccaagcgatccgcatcccaaaccattcgaaattcaaattattcccctcttccgctccatctccttcccgtctttctctctccacacagacagcgcacgcatccaccaccccccaacacgggagcggagagctcgccgccggcgatcgccgcaggattctgagggcttcttccggcggccacgggagatggttctgctcgaacgcacgccgttggtggtgcccgaggcagcagcagcagccgccgccgcctccagcccgctccggaggccgtcgcctagggttctgagggaggtgcccccgccccccctcgatcccatcctcccctacctcaggtaatggctagatcagtatccatatcagcacctgttcccttcgatttaggtcctatttgggggcgtgggattccgccgtagcgctgcgtggaataatgcttggtttcgcctcaagttgtgtggcgtacgcatcgtactgggattctgtcccttcctctgagttatgtagttaattgggcgtgtgatttagattttgacacttcgcctctgcgattcctgttcaattgctcagtggcagtgtgcagttgaacttggacgaacggaaatgtgagaaatgggggcgtgtgtgttccgaaaaaaaaaaaagaaaagcaaagggtatgaccaccactgtttgagtgtctggcaacgacagaagtgcattttgccgagacattgtgactggtcactcgtaatgtccagtgttgggacttgggaaggatttagttttggagctgatttgttttgtgcagctaggttgatttttcttgtgaaggattagcttgttcatgtggagacggttctcttattcctttatcagttcttgaactgtcaagtaatgtaatgtgcccactttctgtgctccttctgtactaatgtgctgctttctgataggtccttttggtaaaaactttgcatatataacttatttttatgttcctggtactattatatctattttataaggtaaatctaatctttcatgcacatgctggtattcatgcataatttatctatgtatcactgcggtttgtttgtcctggtcagggccccagtcctggtgtatgcattcgtttatgttagtttctgacttggtattcaggtctatcaacaaggctatggatgagctcaggacaggcccaaaatttgaagcagcagcgcttgatcggctcaagatttgtgtaatggaatgcattgataagtatggtgacgattaccagtactccacagacccccgactcctcaagatctggatcctctatgtaattgtttggctttgaagtttcaattcttaccttatccattttctatccttttgctcatttcccccccactttgttctatgttaggcggatgcaataggtgattttgataaggcatataagcagttggaggagaaaagaatgtttttagagcatgcactgctctatgatgcatatgcactgtttctcttcagtaaggggaaagtgctggaggctggtaaggtgtatgaagttggtatttccaggttagtatgacactgaattatgtttttgttgaagtgaactttttgggcagcaacaatctgatgtcaaatttgtcatgttgatgtgatcgcaaatcatttccgtggaccagaaaagccgagccacttgatcatttgaagaagatgcatacgatatttttaaaacacttggagaagattgtagaagaagcagatgccgatgcccaggtatgataactgtgtggtggaatggacattagttgagtccttgaatatttgtcaaatgattcacatatttcatattcaattgcatttttagtaatcaggacattgtggctgtgttgtagatttgttagtattttagctatggtcagttggtcacaaggctgacaaacttgcagcagtaagaactaagaactgctttgatattgtttcttacatgatatttctctgtggtggaacatttgtttttccaaaaaaggttggcaagcaataggataattgtcttcacatttctgtgcatgtgaactgtgatacattctacataatttattcatttatttgcatgtttgcatgttgtgaacttaatatttatttggggctaatcacaatgatatctactttgtacttgccgatctttactagctcgaacatctataacatctatttcaactaaatacatgacggtttattttacattttcatggaaagagtttctgttctgtcattcctgcaactctatttatacaaaaatagcatgattctagttatttagagtggctttttttattatatgtttagggatatattttatttagtttaatcatagttgggaatgaatttcaggttgtactttccactgattcttgtggtgtatgtgttctattatgagtttgtctcggaaatatattatttatgctatgtggtacattgatagaatcgggagtgcatttgcacagctttaccatagtgaagtcagaacataaatatagggcactatcagcataacagtgccataccaaacaatcttcttatacggttcaattcataaataaatagagaaaatcgagcaaattgcaaaagcaaagaataaaatgaaatatcgggctgaagccacatgatgtgccattgaaagctacatccctgcccctgcttgagtggactaatcattactagataaagaaacatgagacatgcaatttctatatgttttcgaagaacaatatctatataaccctgttaagcttgtgaagtaacttatgcaaaaacctttttttgtttcttttacttgtcattactggccattattgtagccagcatatattatagtcgcctaatgctattcttctttgtggatgattcaccatactaactccatttttttttgttactgtctgctagccgaaaccatcgaaaatacaaaagaaagaacctattttgctggatccatggtctgagtctactatgaataatttattggagaacattaatgttgatctgaagaagttcgctgtaagttgcatttactctatatgattcgctagtgtttatcttagctctcatcttggacggttgcccgaatccttgacagggctatcataagagcaataaggtctatcatggaaaggtgccattaacttcgcctcagaatgttttaagaaacaaagtcattgaattaggtataaactataatttcttgcttgtcagtcttttaccaaaactataatcatttttgtagtttggctcctttatgatccatgctctgtaagtcacaatgaatacataataatgctccttgaaaaaaaggaagaaatatacccttttttatttagaaaaaggccatttatattgatgacataacaaaagtttagttacaaatcccttttgttgcaccaaggtggtagaaagtaccagatcaaaggttctcctggtactggtgcttttgcaaaagtttacaaagccagtgtcgatggtaatacagaagacctggttgctttaaaggtgagtcatacttccatttgtcttactgaagcctgcttttttcatcagattcctctactgaacttgcccgtttgcagattcagaaaccaccatttccttgggaattttacatgtatcgccagcttgatacgcgcgtatctgatattgaggtacagaaattatctttaagaagaccataacatttgtaattgtaaaattatgattcacactgcaaaataattttacttccagagaccaagctttggctacactcatgaagtgcatgtatacgctgatgtcagtgtgcttgtttgtgattacctgccatacggaactcttctggtaaaatactttatgtattaatttttttttttgagatcatgatcatgcaaaactagcattttgtgcccggattagtgaatctgtgtttgataagatgcaaatcttttgcaggatgttataaattctcatctagtacttgaacgccatatggatgaagttctatgcatatattacactatagagatgctgcgcatgttggaaacactgcacagcgttggcataattcatggtgatttcaagcctgacaatatgcttgtttgctacccaaggtaagtagaggtaaccagcttagctttcaagttagaacacttgatggagcttcctccctcttcctcttgtgatctctaactgaaatatgggcaaaacacacacacacacacacacacacactctctctctctctctcacacagacacacacaaaactatccagtgaccattgacatcttacttttcataaaatcgacagatttattctagttgcaatatttgtgtgccgtccatttgcccagtgcccatattctcttgctatttgttttggacagatcttgttaccatgtttgtgggtgatgatgtctgtgctgtaaatattttactccaagcttcacaaccatctacaacttttataaactagatgttatatttaaactgatctaataacatagttttcaatgaaaatatttgacatggatggtcataacaacaagcatgttggtaagtggtcaatttgttggccccagatgttgggtttggtgggggcaaagatccttgctgatttactactgtttcaattactttatatgagcggttactggaatcttgcttgatggctccatcctccatgtttccgctgagatgacgattttttttgtcatttttgttggccatttgctgctattggcttgtttcggccaaaactcaattataacccatctagtacatgttacgcctgaaaaaaaaagaaagagtaaacctaatgctagtgtctgttcctttttgttctcgctatccaagtcttcacctcttcaatctttagcccttgtctcgacatgtaattttcgttcacccgcatctttgttttgcgtgtggtggtctgtgcagtggagaaatcacagacgaaaccttcaaaggcgagacaagatccgagcggaatcaggtcagcttctcaatcccaagttcccaacacgccgagaaacttggttaagatgttctggatatctcctgatgcttataggattcccattccaggggctctgccttgttgactggggccgtggcatcgacctgaacctcttcccatccggtgcggagttctacggcgactgccgaacctccgggttcagctgcgtcgagatgcaggaacagagagcctggacgtttcaggtatctgtaccctcccaagctacttactcaaaacctcctctcacctagacatctctgaaagcaacccctgcctgacgctgccagtttgtttgttggttggttgattggtttcttcctgcaggctgacacttacggcctctgcgtcatcgcgcacatgatgctacatgggacgcagatgagcatccagaagacgcccaggcccgatggaagctacatgtaccagcccacatcgccgttcaaaaggtgctttgatgccattgcctatacacctctttgataatttcctctatcccaaaatatagctactatgagatatttttcagtactatgaatctgaacaggtttagaaaatatctcatcctatgctagttagttatattttaagataaaggtagtagtaattaccatgattcgcagtagcgtaaataaatcagagattagattagatggcatatgtaacaggagctgtttgctgccattttgccccttgacaggtactggaacgtggagctgtggaaaaacctcttctccacgctgctcaacgcgacctccaacggcagcgacgcggccgtgctccggagcctccggatgtccttccaggagtacctgtgcagcaaccggcagctcgtcggcaagctgaaccagcaactggccaagcagaagacctccctgtgcctatcctgaccgagacatatacgcatctcgcgtttcatcctcatcatttttcccgattccctcgtgttgcctgtgtgtaaagtggtggagtataagataccttccgtaacttcgtagcacttcctctgtgcgtgcgtgtgcagcagtaattaacgtgccacatctccactttgaaagctgaaacatctactattgggccagatggaaatttcgtacagtatcttcttctccaactagcggctactaggtaccatgcgtctgtcacgtctagaggagttttttctttctttcttttctttttttctttttttgccatggtggtcgagatcgagtgagatttgtgggcagtgggcgacgagcgagaccaaacggaaacggacgaagcaacgagcgtacggctcgtgaagtcaaagggcgcgatcagataagatgaggcggtgatggtgtgtagtaggccacaggggctgggcccaattccagccgtccccggcccaggctgacggtcgctgctggcagttctgtttcgtgtggtcgcggaggccgggccttcgtcggtcggggtatcgtggacgtgatcccgtcgtcggaggacgtaaggtggggagcgtcatgcgccgcaactagctattcttacgacgtgttctaaaccacactagtggaagtacaaattattcgtgtcacgtttttatatttacgatttccctaaaatcttctgggagtagctatatttatatttatggtgtcatatttttcatcaataaatagtcaacatgtatttacattgtaagtatctaaattacatatgtaatttcagtgtatatgtaacgtaagtcataaaattacatatgtaaatccgaaaattacatatgtaagttttaaaattacatatgtaattatagtgtaaatagtatgtaactatgatgtaaccaacgtgtcatcatccatacaggaaaaatccgatgctaataaaaaaaggcaaaggattaataacgataaaaaggaaagctgcatccctcaagcctttatccaccgtacatcaaaccatcaacggccagagatccgactgttttcagacaagaaaaacatgcgacacataactttttacctcggtattgcttaaaaatatactatttcctaattaagctatttgctagctttataatggttaacttgtcgatatgagcaatttccgtttggttataatctatctattcatgtcatccagttataacgctcaggttgggtgaatattgttgtgctggacggtttcttccaaaacaaaacgtactctgctaacaaaaagtggctatagaagaacgtagatggttcgcgtattgcaaccatgcatctactagtaacaagtacacaccattgtatttagtaacagatctctgtcctaagttaatttattccgggacactgattgtactacggaattacttgtaagtaccagctaccaggtgtagggtgtgttttcacgctaaaattgaaaatttgattgaaattgaaacgctgtgacgaaaaagttagaagtttatgtgtgtagaaaagtttcgatatattgaaaaaattaaaagtttaaagaaaaaaaatttgatactaaaccaagccgtagtacagatggctcggtttgacttgccggccggccaggccggttgaaggatcactggtatatatgcggcggtcgtgcacgggcgcgtgtggtgcggttcaaggagtggccgtcatcgtggctactactttccgtcaaaaaatcgtggctactactatagccgaagaatgataaggatgtttgctgtgtgtttgacgccccgttaatccaacaccgtttttgcatataattgcattgcacccatggaccatggtcgcgcgcttgtggcagtcgaaattttctgcgtctgtgactgacgatgagaggtactcctgtagctagctagaagcgtcggaaggggtgaaattaaagatcgatttctggtgttgtacgtacgtggtcgctagatctggttggtgcctcttgcttttctgggctcccctggaaaactgttactgctaattttagccccatttatcgatcggcccgagttccataccatgtctcagctcctgtagccgacctacctctgtcctagctctgacacgtcacagaaacgttaacatggtcagttagtcacgctgatacataggagtcgtagtacacagccgcgcgccgacccgaccgagccaaccaacctcccaccaacccgtccatcgcacggcgcggcccacgccaacgcaggcaagtcatcagtcaggcagccggccgcccgcgcgcgcccgcaccgtagcgtgcaccgaaggtgatccggttgtttccccgtgatcagctgtgcctgtgcacgctgcccctgctcgatctgcatgcgcgcgcgcgctgcagaggcagagcccgatcacatggccagcacggggcctgtagctctccacatgccgttgacgggatgacgggtcggcgcgcgcgatcgatcgatcgcggcgaaacgcatggtgatctctgatcaaaaacccgtacgcgcgatagggtttggtggtttgctgctgctgctggctgctgcggctgtgcaggggggcgcgaccacgcacgcaccggccacgcgcctgcggaccgatcgatcggtcgatcggcggcggtctcgcgcgcactcgagcgagcggcagagcgcgcggcaccgttggtttggttgggtgcgtgggtggttaacagcagctgggtggttgtgattggattggatggtccctgcagctggagctggggtttgtgcggggttgggtcgttggagttagctgggttcgctgctgttgtcgccacgcttgctggctactaggaggagtacgtactaggcgtggtcaccgtgggcgtattgtgcagcgagtagtagggttgtagggcatgcacgctctggacagtacgggtgtacgggtctgtaacacgcgcgcgcgtggtaataattaacagggaggaaccaaatagctatagatcgtaggggggaaatgagttacttgtcgtgataagagcgcaaaaaaaaaaaaacacgtacgactacgtacgccggtatgtaatttcaccttacgtatttttggctagatgatttggaccatcgaccaatcgatcgccgctaatatcaaacctcaagtataagagcacacgatcgattgaccacctccaattaatctccatgccaaagtagcaaaatatcacatcactcatcttcgaagattgtcctccttaaaaccaacaaatctaataagaaataatagaatgtgacatcctataatatctcagatctcatagtaggtatatttactttaggatgaaggtagtagccgtaaacggcgtgtgtccttgcgatgcttggttaataaaggaaaggaaattgataaagaattatgaatgatcaatggcactatttaattctcaggatcaaattaaccgaaattgtttattactctcaccgtcctaaaatatagcaacttttagcctttaaaatctatcccaaaattatatctacttctccaccgacattttttttcaaacaaatcacaaccttccaacattcaatttccctaccaaccttcacttctcatccaatcacaaccttcatcacatctaattctacctatttctcaatggttgtgtccaatctaaaaattcttatattctagatgaatagagtagcatattttagcgcggatcaactaggtggttgatcatctgtctgctagttagccaaaatggccgaaagtcatctgcgcgtacgtgggctgaccatggtttgcattaccatcggtaaccacacggttaccggccttaccgcagggtacggtaatagaaaaaccacaataactttcttaaatttaaataaatttaaaaataatttaaatttttgacaaattttacacggtttcgtacgatttttcacggttaccacagttatagcgtgttaactgtgcttaccgtctgataactgtgcttaccgtcgaggcgcagtaaccctggccggctagccccggcggtttaggaaaccatgtgaccgaccgggcgagtcgtgccggtgggatcgtcgactacacggccgcgcacgggcatgcagcgcacggcagcgcaggcaatttttgatcgatccctcccgcgcgcggttcgactgttggagatgagatgagtgcgtacgtacgtgcagtgcgcagtacgtacgtggtcgcgcgcgcgcgccatgtcaggctggtggtggttaacgcgcgcgcgcgggccggcatgcggcatgccccagtagcgatatagatctcgatgccgagaccgacctgcacagttgcctaggtttgcatgcagagtgcaggctgcacagtgctgtgcacatgcagctagctagctctagctacgggcgcgctcgctgatcagttggccgatcgaattagcgtttcgcgccgtcggccaacgattcagtttcgaaactcgcacttgtggagaaatcgtttttatacggttcgtaacccctatagtcccgatttgaaaatcgagactatgaatccgggactaaagatccatattttagtcccggttcaaatactcgggaataaagatgggagcgggcaatagttttttttttcatttacttactatttaatctctaatttattttctcccaaattaggtgggatgcatattccttaatcaaacccaaatacacaaatcaatcaatcatatacactacagattatacattccaaatcaaaccccaaatcaaagaaacatcccaaatacacaaatcatgtacatctcagatccatacaatgagattccaaaaaagaaattatacatctcaatccatacaatgaaccacagattcttcatctcaatctatacatggatcacaaattctttgaaaaaaaaagaaaaaaaacgaagcaaagccgtcggctggctgagccggctgctgcctcccctcctccccggccgccgccgcgccggcccccgcctcgcgtccctccgccggccgggccgcccaccccctcctgctgctcacacgggatcgagttgggaagggataagaaggaaaagagataaggaggaagggaaaggataaggattagagatggagggagagaggagttggtgtggatgagaaaagagtggatgagaaaagaggataagtaatatggattatatagtgcgttttgatctttaattccggtttgtaacaccaaccgggactaaagagatccgatctttacttcctgttcgtaactctaaccgggactaaagatcctggaggggcctgacaacacctgacagcatgtgaaccgggactaaagatcatgtagtctcgttctacttataaaccgggactaaaaaccatctttagtcccggtttttactgcatccgagactattgtggtttttagtcgaccggccaaagatggtttctttactagtgtcgatccaatatatccacgtgtacgtctcggtgggttattctttgcagtgttacgtactctctccgtcgaagttttagtgttgaacacggttattaagaaagcaggtagaagtgagtggtgaagggttgtcattggatgagtagtagaggtaggtgggaaaaatgaatggtggaggattgtgattggttgggaagagaatgttggtgaagttattatattttgggataaattctgaggaataaaatttgttatattttgggaccatagggatttttttttgaactgataactcgggaattaatcaatctgctagctagcatgcactatatgcttgtagcagcaacagactcgttctaattaaatacgtgaaaaataatcgaagtcattagtaaggttgtagattcataggttagccacatcaaaaaggaaatcaggagaatataaagagtacatactactccctccatctcataatataagacgcgcacatattttaagattcaacctttaaaacacttgactaacacttagtataatattaaataaattttatttgttaaaaaatatattattagattgagatttaaattactttcatatggttataattttgttgctacaaaccttatagtatataagaaattataagttaaacattagttttggagaccgtgccaactttgaccatgccttatattccctccgtttcgaaatgtttgacaccattaactttttagcacatgtttaaccgttcgtcttattcaaaaacttctgtgagatatgtaaaattatatgcctacataaaaatatatttaacaataaatcaaatgataggaaaataattaataattacttaaattttttgaataagacgaacggtcaaacatgtgataaaaagtcaacggcgtcaaacattttgaaacggagggagtattatgccaactttggagatgattgattattctctacggctagctagttccaattacttagtactccctccgtcccataaaaaaaccaacatagtattgaatgagatattttctagtacaacgaatttagacatgctcttgtccgtattcattatactagaagatgttatatctatagaattggttttttttaggatggcgagagtacagtagtacgcatgcaagggtggcaaatgtaagaagcagcagctagctagcaaggccgggttcaatttcaatcgatcgatcgaccgactgcatggaaatttcgagttggaatctgaatgtgatgatgggccgtgcgcagggtgcagtggggtgcatcgctcgcgcgcgtgccgacattcctttctcgagttccgagccaacggatcgatcgatcggggaatcagggaatcagatgcccctgcccccctagctaccttctctcctttagtttgttcttcccatcatactctccatggccatcaccatgatcgatccctctcctctctccacaagctaccttaatcagcttagcttagctatccctggaccaggaataatattagtttacgtgctactggtgaccaagtattggagcactactactactctagtatgtagctactactaattactctatcactctgttaatcgatgctgtcgtttcctccttttaaggccggccggccagccagccaaatccatccatctctaactctagttaatttaatctcgaaacatgaacatgagaataaggttttttatcactataaacactgacatggtcactgtgacacttgctatttgatgttaattactatgtataacagagaaaagttataagagacattaacaatctcttataagtataaaaactacaaaaatatatagtagaaaagttataatccattttctaaagttgcatgaattgaaatactaaaagagatattaacaatcaaaattcaaacatattgactgcacttatttagactagaggagtacataaaaaaaatatatgtatgcatcctaaacgtagagaccgaggatataattcatctttccttatataaaaaggtcagaaccgatgacactagctagctaaacaacatagtacaaatttggctagaggttttcctggtctcacttggatgtacatcatggtatggattcttagtacactagctcgtagtactatactactactattcttatatgtgataactccagcccatacagagaggaacatggatgcatgcttgctagctaggtatacatatggtcccagcaatcaaatattggaagtacgtatactagcttatcaacaagcactaagtaataataatactagtatagttgagaattttgacctgatacattcgcatgcttacccaaaaaaaattgtatatatccagctaacacgaccaatgcaagtcattattcacgagtcttaaatatatctccatgagtatgacttgtgagacgacaactaaaagacaaggccaagctttcttaatttgaaagctcacctaattaattaactaccaccgatcgatgtatccccagccttcttaattagtgcatcaaatgtggctatgtaggcgatgaagggtcgacaaataacgtaacacccaattaatgcaactttcacacacatgaatgtgtgtaggtatgcatgtgtgggctacttaactactccatttcaactctacgtatggtactccctccgtttcatattataaggctttctagcattaatatctagatttattaacaactatataaatgtggctaatgctagaaagtctaataatgtgaaacggaggaagtatatagtactagtagtacctactactatcacatatgaatacattgtgtataaaacatctcaattcatttagacacacatgcaagctaaaccctctagctgcttcaattccttcatcatcaataaagttcaggaataacacagcaatgatacaaagtgcaaagagacaagaacagaatgcttaaaccaaacacccacacagcccaatgcatgctgaagccggccggccatgtaaccctacccatgattgctagacaaggcatccttctccaagaagcaaagccacagacagcagtcaaaatcaaaaatcccagaggcctttaagaaaagtctggttaattaggtttactacctctctctatccatccatctctatctctcttgtctctcccaatagctggagttactagaagaatagatgatcatatatattctacttgcaacagtaaccacttcaactacgacaacaagatcactcttttcaaaaaaaaaacaagatcaagacacatgcatatgcttccctgaaatttcttaactgaatttgcccatcctgtttacagatctggtgcccactgatagatgatcatgtagctggcccattaatatttcatttcaattcaattctggtctatattattttctactctctatggcatctttgtttcatcatcaggtcatggagttggcaaattggcataccccatgtgatggatgcaaccatccaattatatatgcggcatatgcatagctagctagcttagggatgcgtgtgagattcttggcaggagccaatcctttgtttgggccatccatttttgcttgcaagatgaggatgacgcatcactcgcctataaataaattaagcccctgtcaagtagatttgcctgctgtcctctaattagtgtacttttaataataaacatagcattatgtattgttgtgcgattatattctctttccacaatattctaagttcttctaaagtttaaaacaaactaaattattgttaacacgacacctaacactgtcctggaatatgtctgcagtaaaccttgactgaccaccgactgaaatgacaatattcatatatttatgtcacaatttaattactaattaataaaaacagtgtgttacgaagaactttcatggccggccatgcatgtcccatgcccgtcctgtatatttctatgaaactgaagaccacctaattaaacaacacatacagactagataaatggatcagatcgatttcaacttgctcttttattcggatagaatcgtcagcattactgacatgttttccttttaaaaaaaaaggaattagatttcatggttatttattacatttatattaggttagatagattcaattaaacacatatagattgagaataagtgctgcagctagcatccatgcttggaattttacacatactctctctttctataaaagttacacctattacttttgtcactaagatcaaggagtgtatgcacgcatacaaccaataagtaataatatgacttctggggtctgatcaaatatttaatttacctctccatttaagtcttggatgcataaagactacaaatatgattaacttatttgaaaataaaataaaatataaaatatgtctaactcttgtggatggagggagtacaagctagtgcgcccagcattttctgctgaagaacatcaataaattctaagcatttattttacacaacatttcaaaaccagcagtctcaggtggatggccccaaactgattgtgatttccaataaacattccactagaaaaacaaaaggaacagacagacattcccctccgatcaaacaagaagaaaacaagcaacaagtgaccgacattcccctgggattccgtgccggtttaattccacaaataatatataacaaaactatacatatccgtgcatgcaatttgcacccaagaacagcctaaacaatgcaatccgcgtaatacaattcccacataaactattagcacgcgtaggtgcccctcatgtgattgtgcgtacatgttcttcgatctcttcctacctaatcttttgcagtattttggctgtcgattagtacccgttggtttgtttattgcttcacacagcgcatgcacactgccccagcactgatctaatccctgccatgacagggcaagagagataattaatcatttgcatcgatttggattggaacgttaggggtgagatatgatagagggagggattaaacaaatgtgcttagtttgatgatggaatgtttttgcaggatttgtgtgtgtatggtggttgcgaggaagatccacctgttcttcacctacattcgattcttttactctccatccgctctgcagctagcgttgtggccgccatggagaccgagatagagagagaaattaagtcccatgcattgtttactccgatgtgttaggccgggctgcactgacattccatgggtcccatagagacagccagctgctctatctcaccttctcccttcacaatctctccctcttttcaccctcttcgatcatgcgtttggtcaaactaatcggttgtatatatgcactcttgatataatgcagaggtcggatgcattatactctttcattgttaactaaaagaaatacgctattaagtgctgtcccttttacatgcctaaaaaaaactacatttgactcttataagggtgtatattggcttggtctaaactctagaattagagacgtattcgcctctgccaagtgtattgatgtggacagtttcatctccttttgggctatagtttcacaatttgtgtataatttttgtctcggtttagtggtcacatcgccaattgtgaaacacgatggatggtggaatgacaaagacagttggagcatgccatgtcgtttgttgctccacacagatgaggctgcattgtgtggtttgcaacagagaggaggttaaagaacacacatcgtcctttgagtttagagtgacatggaacacgtacaaattatgctttagccacctctacgaccatgcatgtcttttatgaagtgatcagtggcagagccagcgacaccgtcgagcccgggtgggtaattaatggtgtttctccatgatctaccaatttttttatacgtcgatcgtaatccgtagtgaagatggcagtgacggagcatgggcggtcgcccaacctgttcaggagatgtccccgccgctagaagcaattgaaacgaaccagagctttgagatatttaaataagaaattatcgaagaaaaaacatatgagagtagtcgcgtacacatgctgctcagtttcaacttttaacatgttttgtttcatcataaaagtatagccaaattcgcaattatttttaacatctgaatatctagcttagatgttatacatacagatctgtatgtataacatcatggtatactacgtacgctactgttttatcaagtcaatatatgtgagacgtgcccctttatttagcaggcgccttttaccttcagtaaacaacaagtgatcagccatcacaatgatttgcatggttgaatcaacattatattcatctctgtactctgcattattactgttttacagagtactaattccactagaggatgcatcagaattattgcatgctgcctgcacgcaggaggaggtgcggatgagaacaaacaatgcatgcattgcatgctcaataatcatccacattttatatatatgcgtcgacaaaaaccgcacacatctccatcctagtacaacgtaggctagcccatgcatgcatgcaagcagcatcctcacatgccaatcgatcgatcgatcgatcgagctgatgtctcttgtacaaaagagtggaccgatcgatcgatctagcttagatggagccaccgtgttttgtatttctgcgacagcaattcaatcagaaaaaaaaatttcatcagagcagatcaagaagcagcagctacgagacacacaccttaacgaaaaagccatatcacgcatcgccatcctctacgtactttgcatccatatattttcgtcagaaacaacatatatactactctagctagcttctctctctctaaccatagccttgttccatccatccatgcatgcattgtctgccctatctagctttgttagctagaggtggaccatgcaaattgcaagcaacaacaagcacaatgagagagagagagagagagagagagagagagagattccaaggagacaagcatggcagatgggggaaggaggagagggagaagaaggagaggagatagatgcaaaatgtggtcctcaaagtactagtgctggtccacattctggcagcagcactttgggggtggtggggtggggaggagttggtcctcactcctcactcagtagtagtgggtgcccagtgcatggatgcatggatggaggtctggaggaggaagaagctaagccaaaggccggtgcatgctgtaacagtagtacaaatatgttgaaaattcagtacaccacaccacagtgacagtaccaccactgattatcagctggatgctgctgctagctgctcctagctactacatggatgcccaattgcccatggaccagagagagagagagagagagcaagaggggtcctggaattaatctggttaaatcaggggagccatcatggctaatgaggctgattattatgatgacattgaccatgatgatggctttggggcaactaatccacatgcatgcatggccagccagccagggcatcatatcatggcgggctatagtacgtggacggccgtgcatatgggtcagaggccggactgtgttgggagagcatgcatgactaatttgctctgattagctagctaggtatagcagctctgacccctgcaagtctgacacctcaacctaatcaataattattcagtgatcaatatgagctcgatcgatcaagcagcgcggtgggggtgcactggtctaggatattgttgttcttgttcgaccgaacctccccctttttcttcgctcggagatgattgatgctgcgaaacacagacagaaatcttcgggcagttaacacggttgctttcgcgttaagaatgggattagttataagggtctatttaaaaatatggtgacaaatataattatagcataaatgtaatataattacagatgtgattagtgtaattacatatataatttaggaacttaaatatgtaattttcaaacttagacttacattgtaaatacagtaaaattacgtatgtaatttagagatttacaatgaaaatacattttttcatgaaaaatatggtgtcacatttatagcaaatccgtagttataattgattgagtgatactatggttcctgagaaggcatatttttgtaacgtaaaatttaataatatctcggtatacctcttaaatcacaatttttttaattgatttggtcatttttcattgtcgctagcttggacaaatgtactttaggccgggttaaattaaatattttccccagaggtctctgtagttcaattcactgttcttgtgctacagtgtactactatatatgcttcaattaattccgagtcatggggaaaaaggccaaaaaagaagaaaaatattacttgagcagaattgaatttactcggttattgattatttacacgcacacggatgcgtgcgcatgaatggtgacaaattttagtacgtaaaattataacagtatacaatcatgcagcgtgcatgcatgcaggcgtatgtatataccactgtagaaccctagctacatcgatgttgccaaatcattgctggcccatgcccgcttggcttggtcctagttgccctgtcactatatgctgagactgttgctgtcgacgactacgacgaatatgtactctctacatactccctccatactttaatttatgacgccgtagacattttaatcaatgtttaaccattcatcttattcaaaaaaaattatgtaattatcatctattttattgtcacttgatttatcatcaaatattctttaagtatggcatgaatatttttatatttgcacaaaaattttaaataaaacgaatagtcaaacgttgttcaaaaagtcaacagcgtcatacattaaaatacggaggaagtacgttacagagacatggatgcatatatgcatgacatgccttgtacgcattcatacacgtagtaatacgtacatggtgcagtacacgtatgcatgcatacactggcgacaggtaggagtgaacagtgccttgaacggcgatcgatcgagggactttcgatcgtacgtttggaaagaatccggccctgcagctttttaaattttatttaaaacttaattacattatttttaatgtggattttcacccgctcagaatatatgtataaaaattttatctataaattatttttttattgctaataaaccgtgttagcttatattagctctcggtaatcaatggaatgtaatgactggttcggcgtagagatgaaaaagtgatccacgccttgctagctcgaacctaccactacagaaacgatttttatctccgatcaaaattgactttgttaggcgggtggatgtcccgtctgcacctaggtgtatgtggaaattgatattttttatgcgggtagagcaaccgcatgcgatgtgggtgtttaagccgtccgaagataaaaagaaaagttagtaaaaaaattccaaaaaagtccgaaaccctagcaggtcccgcgtccagtggtcgtcaccaccattcttgtgcccgggcttcgtcctcgccgtcgccaaagcactccttgctgtcagagtcaagcgttgtatccatgcgcgtaggaagccgaggcggtgggatccgcgtgggagagggacagcccgccgggtccaccgttgccgagctcaccgccgaatccaccgtcgcgtcctccacaccactggatccaccgccgtcgtcccttccctccactgacctccccaccaccagatccagcgccgctgccctccccaccgtccgctagttccccgccactcccgctctcgcccaccgccgatggagagatgaggaggaaagaagaggtggagaggaagcagtggaggagatggaggaagtggagggtgaggatgaggagagagaggggtgacttgatattttaagggtgagctcgatctggtagactggtagcaggcgggcctattaacatgttactttcactattaacatgttactttcacaagtgaacttttaacaaacacacttgcaaaaattgtcttttgcatgcaatttttgaaccattctcaagggaacaatttttgtaggaggtagtagttatggcatatggatggttattgatttttttaagtagaaatattgatctatatgtgatatttcgtttttgcaagtttcagatctcatctaaaaaatcgcacgtactgccgagtagatcatcgaccggcgccggtcggcaagattattatacgatcgaataatgtttcgatcatgcgtgcatgtgatctgtgtacgagctactggctacgcatgcaataatctggtacgtaccaataagcaagtaagctagaggctggccgactgtgtgtggccagactggttagatttgtggctatgtggcctactgtagatgacgtacatgcatactacattacgtgtacaatactattaaacacatgggattgtctggttttttaggcacataaaaacactcacaaattgtagtcacgcctaaatcataccaatatttttggataaagaataattttatatcatgcaattctttctccccacaacgtgccatgttagtgtgaactcgcctcacacacctcaccccatagcgctgtcaccaagcttgccagggccggaagctctccagcggctcttccccacctcctaataacctctcctgatttgacgctctctgccgtcgaccctgcccatctcccccctctagccccatagacccaactacgtacactactgtcacctcgctacatgctcttgtttgccatccaccatgaatccaccgtctccctgcccatccctttaagcctatgggagttgaaccactctcttccaccagccaaaatccccacccccaaaaccttaagtctaatccgtgggtcctctatcatagttaggtgtcactcatgatgcggaagatgaaaagatcgtaaagaagtttgatgttgtcatcgttgttaagccatggctaccatctccctttatctcacctcttttcttgcctccccttattctagatgctgcaggtgactgaaatttctcataaatttgaccacctgaaacaagcaattcactaagtaaatttaccatttctacggacacgttttttaacatgttagagttcagtctcacattggtggtgaaagtacaatatatcttgtttaaaagttatcccctcaactcgtaagctagctattaaaaatgtgtaaggtattttaagtccttcaattagtatcagaatatggctagttcaatgcatttaacccaatgaacattattagtatgagtgcaagcggtgccctgatggtacaggtgcatataaaatacaatcgtttctatataaacaaggtttatgagatgtatatcaaatatagttctagtgcttgtggtgcctaacagtatatatagttatatataaaaggaaaaaaaagaattacccctaaactatcgaggtcaattgaattaacccactgaactcaaacaccagacattttacaccattagctatgcaaaccggataaataaccccctttttcaaaccggagtatagttttggtcctatgtggcaatccagttagcaattttatttttaaaatccatgggccccgcatgtcatactctccccttctctatctctttaatccccatcctctctctcttctcccttccctcacctccatctctctctctctctctccccaaactgagcagggaggactaggccgacgacgctgcttagcggccggtggcaggaggggctcgagcccgtgtgggcatagccgtggccagtgatagaggcagcaggcgacgcatgaaccggcgggtcagcggcgggcgacacttggcagtgtgataggtcgcgatggcgcgcggcttgggcgacaccgtaggtgttgcccctctctgcgtcaccttgttcccatcggaaaaatcggtgctagcggtggagaaattaaggatgtggttgcggcgttggcatggttgccgagcttacacctgaggatggtgccgccaccactagctgaagcgctccaccttgaagcaaatccggtctccgccctcatgccgagcccgcctccctcacgccaagcccgcctccttcacaccattcccatccatggagagagcagagagggaggggagagagggagagagcagagatgaaatgacaggtggaccctacaaatctattactattatttttctgactggattgccacgttgacaccacgtgtgtaagctcttggtcaaaaccgcccaaaacagtcctggagggtaattcgtacggtttagaaagtccagggttaaaaatatatggtatttgagttctaattcgatcatcctcgatagttagagggttattcgtagtttttctatataaaatacaatcatatttttataaataaagttatgagatgtatatcaaatatagttttacttttacaatctgatatacacaaattacaattatatttttgaactagtttcatataagggagatcacctatcaatttgtaataagataataagatgaaattgacagactgaccacaataaactagtactcctatgtcttattggttttttttaagtggtacactggtacaaatacaaaaaaaaaaaaggactgtgcaggaatagtccggtgcctctccaagctagggattggggatacgatcgtcgttgtcgtttccctgtacgcccacaggaataatacagtacagtactgtataatttatattgctttctcgtttgtttttcaccgtggaccggacaagcaacaaagggacgacgtgacacacggtcgtccgtcccggcctccacctctctctgtccctccctcctcctctcctgttcatcggtccattccgacgtgtcacgcttacacttggcgatggcgacacccactacttagctcgagagcttagctccagaccggacgattcttcccttagctttcatttgtcccattcaaacgcacacgcgtcgtacgttcgataatataatctagttaatctgtcattattgagtaattgatctgaaacacactcagatacattcgatctcgtgctgattgagctctagctaatccagagagaatctctcctgccacacctgcaagttaaagtaacactgtgtatcccactcatatatgcatgcatctgtcgtgtaagccacagctagcaaaactgaaaatgccatacttatgaagtttttgacggtgtcagtttcccctaaatcttcagcgcgccagacaaagatttgtacttaaaatctaagattcgatatgtaggtacaatttttttttaaaaaaaatctcatatagttcaaatcttaagaaccctagaattatcatgttctttcttctcagaaatccagtttttctgtattcttatcagctgcacgctttaatttctcagaattagcaactccaaacaagcaggatctcggaaggaactaacgaccccatcgtggaataagccaaacggtatttttacaaatgaaaagtaatggtaatttgtaaataaaattttttatatacgtgttcttagagatccaaaagcaacaactgaaaaataaacttcgatgaaaaaaaaccttaaaatcaacatcaaatttaaattttggctgataagtaggagtatgagcataagcaaacagacgagatcgtaagctaagagcaggtacaatagcatagcagactataaacctgctataaacatattttaagaagataaaagatgatatataaaagcagtggactacagatttgtagtcagctgcagcacggactataagacgtatgtgtgtatgataggtgataccagatattgattgtgtagtatatttttatataactattgtatgaattgactattaagttgactatagataatttgaagccagcggtgagctataatattaaacttgctctaattaagcaataactcgcgctttcaactgacggagtgggtgcgtgtggtgggtgtgcgcgggcgaggcacacggctttgacccccgccccgccgggcgcggcggcgtgggtgcgtgttgcaatcaacaacggcaatttcttcggccgctgccgctgccgcttccgtccacacacgccacgccgcccggccgcgtgcgcgcgtcgacgtcgtacgtcgatcgaccgcgcgccgatcggccaaagccggtctactctcgaatcgaataatattacgcatggttcgatcgatcgatcgatcggtcggtcgtcggtcgattcttttcttctcagcaaagacacggcaggcagatgcacacaccgaccgaacaagaaaaaaacaaagacacgacacgacacgacagatgcagagatgctactactataggagagtaccctctcccccatgtgcacgctcgtgtccacacatgcgtgtaagttaattattggacgcgacttgtcagttgccatgcacggccaccagtagtactcgatcgatcgatccctcaggtactaccacgtttcaattcgcgcgcattctcgtagacgccgagaggccggccggcggccggatcatccatccatgtttcgacagtttgaacatcatccatcacaccagtagcttagctagcgagcgcgacgacacacaacgtgacaagaggcaacgacacatgagctagcgcgcgcgcgcgcgcgcgtgcgtgcctgcgagatggctgcgccgccatattcgcgcgcgcgtgtgtgggtgcaggcgcattggcactgtgcataggtcgtcgccggctggaaaagagtagtagagtaccggccggtgggtcgttgcccagctcgttggctcgtgagaaaatttgctatattgtgccgtctccagacacgggtttcatcggaatgttattctgcggtttggattcgttaagttgtattgatgtatagcgagctagtgaaaggtatgtaaatttgcaattgcctcaaaggtatttggtgttgggggcgacgagtacgtgtagtacgtgtgcctacatgttgcactgcgcgcgcgcgcccacggtacgtacggacacgcagagaccctggctggtagggactagggacggagagccggagtacctaattacgtatacgtacggaggggctctacgtacccgacaggtgggtccccgttatgtatgcgggccgatcgtcagttcgtcaccggaggtagagcgatgatcattcacgtactacataatgactcagtctcagtctcataaaaaaccaacataatatcggatatgatacttttaatactatgaatctgaatatatacattatattcggttctagattcgtttttttttataggagggagtgagtacgtacgtgcgcgtcgctgggtggccgggttgttgggttgtggtttgtccgccaccacgctggacattttccggccggacggggacggccggccgccgggcaatggctcctcggaccggcttaattgcgttgtcggccgcctctatcggcacaaacatatgcgcgtacatgacacactctgcctctcactctctctttctgctgccctctcttctcctcgcagtggaactaatcattctctttttgaaacaaagtggagctaatcattgctggtttggcgaggtgttggccttgcttgggaaacccccccaatctcgggatgcgctcagatcgaccctcgatccatgcttgcttgcttgatggttccttgcatctctctgtctgtccactactctgtctctctggtgttcctctcgttaatttctctgttttcttgttgacacctcgcaatgtagtgtagtactactagtagtagtacagtacagtacagtacagctagtatatttgttggtgacacgtttaacttaacggatgggagcacatagctttgcttttggtaattagtagtacctccgtcctaaaatgtagctatttctagcacaatactttgtcctaaaatgaagttatttttctacctaccttctcctctcaaccaatcacaactattctttttcacctattttctcttttcaaccaatcacacaccttcttcaatcattctcacctacttttttaatacccgtgtcaatctcaaaaatacttacatttagggacggatgaagtaattagagagcttgatatgtaagtacatgtaattgtataacggatatggaccgaattaagacggcggagtgtggattggtggacggacagtggtcaacatagtacgcgcgtccgttgtccttgtcttaagatatgcattgttgattgatgaactgcaatataatggactgtgactgaactgagatatgctcggatttgatcgggtacatgaacgaatttaaaagactttttgctgcgcctttaatttcgagtcataatgtagttgcattgcagctcgttttcgtcatgttcttttcgtgtattaggaccacagttttcatccattacactctagggtcttaaaatatatatgtccttttttacttttcaaagtatacagttctttcgcataactaattaaaaaaacagtttaaattgcaaccagtaaacagttttaaaccagacgagttttgctcctgcatacacgtggcactgatgatgttatctttgatatccagctctttatgaaggcgtctatcctggcatgcacaaagactgtctttatgaagaccatttcctagactctgcttgtgtaagcgtaatccctggaatgttcatctgtctttaaaagactatgtgtaatgggaacatatatccaaatatccaatcacatctaaaacgactagttttttaaatgacatgagtaatttattgacgatcaactatactcggtgataggttattgtttggagcagagttaccgttgtacgagttttttttttctttttcttccttgttttttaatctttgttttttcctctcttgacataggtcggtctggctgagtgtgtcgggtaaaaaaaactctattcttctaatatattcagggctggccctaactttttggtggcccggtgcggaaaaaaattcaccattaaaaaaaagataatatttaaaaactcattgtcattaacgaatttcacactaataagtttaaaatacaatcaagcagtcacgatatactcgatcgtcgatcggtcttctgtttttttctctaagcccatcaagtctaataccatagtattaatattttggaggcccctaatttttggaggcccagtgcgatcctgtactgccctaaggccggccctgaatatattggcgtacaattttttttgcgcgttcgtgaaaaagataggttgttgtttggctacataaattgtttaatttcgcgcgcgcacctctcggtacgttcaacctgcaggaccaaaggcgtgcgtgaaacaggtcgtggtaagctcgtagtggtgtcgatgcgcggttcctgaaagtacgcacgtacgtacgcaggctcggtgctttgcgaattgcgagcggcgtccggttcccatctcgttcgtacgtgcacgcacgcaagagaggacgacagtgttacgtactggcactggctatatctatatagtacagtatatattttgtacagggactgtgtgttgcatgcatatatgcacgcacgcacatatgtaagtgtatcattacatatttatttacatgcgctagctacgcaactggatacgcacgtacacaatgcgctactagaaaaaaaacatttttatatgtggctgtcggtgaaaagggctcgggggtacgcacagtcgagggaagtatccttctaatctaagtcgcgtgaccacgtggcctcgttttcccccgcccctcgggtagcgctgaagtggccagagggcctcggggtgtcacgtcacacccctcgggccttcggggcgtgctaccccgaggcccttgcccggcaaccacgtggcggggagagcaggcggggcgagaaacgctgctccgtgccttcaatgcgcggcgtcccaaccgtcctgcgccgcatttaatgcagcgtgggaggacgtgcggcgccgctcgattgactcatgtcaatcaagcttgaccggtccgtgactagtcgcaggcgatgggacgggtggaagtgcccccacgttccgccctgtgtcaagcggagtaggggcaggtacgccccgtcccattgataacaatctggtccaggtggggttggccgaggcccaacaaattaaggttgtccggaccccaacagttcttcggcacacgcactcggggaaaggcccagtatccctaaaagactagtccaataggggaagggtggctctcccttttaaggtggcttcatcctcccaagctaagtaaggtgggattattcaaagactcacagggttgccgcccgactttggcgtctttgccagcgggtaatagtggaggatgtcctcatcattcccacccccttaacaagggcctagctctgataccaaatgataacaatccggcccaggtggggttgaccgaggcccaacaaattaaggttgcccggaccccaacagttcttcggtacacccactcgaggaaaggcccaatctccctaaaagactagtctaataggggaagggtggctctcccttttaaggtggcttcctcctcccaagctaagcaaggtgggattattcaaaggcttacacggtcgccgcccgactttggcgtctttgccagcgggtaatagtggaggatgtcctcatcacccatcgacacactaccaggggcgcccctcacgcgcatggtgagccgccaaagtctctatgcatttaagagggaatgacagggatgtcccccgtatcaggcggagaatggtgctgggccccacctgggggcgctgaaccatcttgcttccggttgaaggcacggagggcggtctgatccaggataggtggatccccctcccatggaggagtaggtatggacggtgcatgtggtatccccttgaactataaaaggaggaccgtcaccaccgaaaaaggggatgactctcagataacttgagctcgaaaggaagaacagttgggtttcccttaaagctcaaaacctcttgtaaaagttaaccacaattctacacacaggagtagggtgttacgctcgatagcggcccgaacctgtataatctcctgtctttcacagaggctaggtagtgatctagcagctagactgcaagcggaagtacgctcttgatcatcgtgccatcttccccggccgaactaataaaggggggtctcacgaccgcccgctagagaggatctctcctcgacaatggccaaaacatatttttgcaggcggccataacctccgcctgcatccaaacgccggcggaaatcaatgatttttgcaggcagctaaatctacccgcatgcgaaaatattttcagcgtaaaaaaaattggctgcccccagccctacccgccgccgccctcccctccgaccaccaccaccacgagctgtgccaccacgatggttttgagagggagagggagggaaagggagctgcgcgcgccacaagctcaccgcgccagcccgccgccgccgctggccctccccacgacgtagttggatccgagaggggaggggaggggaggggagggaagccgccgtccgaatctgggagtgggagtgccatcgccgccgccaatgatcgcgtcgcctcagccgccgccctccccacaacgtagccggatcatatccgtgagggaaggggaacgccgatgacctcccgcctccgccgacaacctccggcgcctccaccgctgcatgcagccatcgctgcccttcctcacaatgctactggatccgggatgggaggggaagggccgccagccggatctaggaggtgggaacgccgccgccgacctcccgcgtccaccgctgcatgcgtacgttgtcgccgcacggccgtgcctcgccgccgtccgccccgcgccgccggccataggcctccccctgcccccttcaaccggatctaggagggataggggaggcaaggcgcgtcaggggtggatgtcaccgcccccgagcgtcactgtccccgtgccttgtcgtcgtcgacgccaacccagcgcctcgccgtcgtggatcccgccgcccccacgcgtcgccgtcgtcggttcccgccgcccccgtcgccgaatgcccacggtcgctgagggagaggagagctgagggctgagggagaggagaggtgagggagacgagaggataggacttagaaaaaaaatctagtgatgtcgcgtctatttatatttcacgccaatttttgcagtggtctgcctgcgaaaatagattttcacaagcggatagcgagcttcacctcgtttacatttttgtaggtggtcatttaattccgagggttatgtccgcctggaaaaaaaactcacgtctacaaaaatgctttttctaagtagtgatgcaaacgctaggcgatgcttagctttcgagctagcgcattgtccattggattcacatttatacgtgcacggtgaaaattagaactagctgatgatgctcactcgacacatgtcattgcagattattgcaccggccggccgatcgccggccgtgcgaggaagaagatgagatcagaatgaacgagccggacgtacaccgttgccgccatcgccggcgaggagagatctagagagagagagagggaggcaggcggatgaggaggtacgaatgttactgtgctggagcagcgtcatgggagatgtgaaggtgctcgcaccgacgtaccaaccacacacgcacagtgccccgatcgattcatcgctgcagtatagtactataccactgccgccatgctgcgcccccccagtagtgcgtactacgccgtccgtcctgatctcaacacacacgcacagtctctctctctctctctctctctctctctctcggtcagtgctacctcgagggctataagctaagccccatgcatgcattcatgcatacgcgcaacaagacttccacgcaccaggtgcgtcaacaggacgatattgtgtgatctagagagagagagagagagaggggccgggccggccgaccgatcggtcccggccttcttacaatctgtcagcgacaaaactggtagataccaaactcactgttccttcactttcacctctctctcctcatcctctctctagcttgctaaacggcctattgcagctagctagcagctattgcctgcatgcagcgtgagatcgatcatcgacagataggtagagctggacgagtacagatagatagatagatagatagatagccagtgcactcactcactgactcactcatcgaaagagaaacagagaggcttacctgcacgcatccatccatcgatccatgcaatggcatccatgcgttgcatagtgcgcggccggtagaagggagtagtagtggagctgtgagctgtccgtccacatgccctgtcgtcgtcgtgcacaagcacagcccacgcacgcctgttgcatgcaccaccaccaccaccccgtacgtaggacaccaacggcctcaaccggcctctctctaggcacgaactctctgtacgtgtgtggatcgagactatagtcacgtgaggactgatcgaaccgtgagtttgctatatggtaaacttatcgtccgtgttcaatccaaagcattagtttgaatcaattttcgttgttaagcctctcagccacaaaaaaaaaaagcatgtctacttgatacaaattagaattattaacaacatatttaaacttggcggctgtttttttactgccaagaaatcagttggccgttaaaaaaattacggatgcttgtagtgattgttcttggttttgcatgcatcacacatttggcaagataaagaaaaagctaggctaagctagcttgctcacactgagatttttcttttatttacctcgagggataatctggcgctcttggtagtacggaacgttcgatcggacggttctggctggccaatagatcgatcgatcaggcagacaccgttcgcagcacagaggcaacgctagctgcacccggctggccggctcccccaccgtggggcccacaggcaaggtgggtccacgtgtcaatctgccctgccgaccgatgagcagtggacggccgatcgacgccttgtcgttttccctccggggaattcttactcgtgcatctaatctactagtagtacgtactccgtccatctaattgattttggccttttccatttctccgtaaatatattatagggttttaaagtactgctttatcaatctatacaaccactacatttattgcttctttgctcggcataatcttttccagtgagtaaattttcaaggaaatcaaaataatttcagtttaaatcttaaatttcggtaaaataatatgcatggttaaatccctcgtatttatggacggagtattatgcagtcgcactgcttaattccgtgcgtcttttcctggggccaatctcacgggggacccccagcgaaattatgcaaaagtaccagcagtgtagtataaaacgagagcaagaggggacacacgagtaaaaagaaaagaaaagggaagtgactgcaacaacagcgggcaattgttcttctcgggggacgcgaaaaactttgggggcctcgggattctcactgtctacctcagcaaatttcttaattttagctatagctagctagagctaagcatagatggatgagctagaggtagctagctagccagtatctttgttcggtttgttgctactcctacatcgactggtcatttggttgagataatcacagataatataggggtgctgtggtgtgtatatacacccttcgttctaaaataaaccaacttaaaaaacgtaactcctattacaacaaatttagataaatattaaatatttgtacaaattcgttatactgaagagcaacgaatctgaataaatattaaaattttattcagatttattatattaaaatgaatatgaacaaatatcaaaattttatttagattttttatattcgaatgtgacacatatccttctggtttgagttttttttatgaaggaagtgtagcactgtgcgagttgatgctttactgtttggggacttgtagtctatcaggagcggccgggtcctaccgtgggattgtacattgatctgacagcgtcatttatgcacatcgatctaagattgacgtttctagaaatcgagttttacgttggttaatgaaattaacactgtggtgtgttttctccatcccctaaaaactaatctaagatgaacatgacgatttctagtataataaatttaaacaaaccttcgtacaaactgcagcgtagtttagatgtataagttgtatattcaccgagcttgagaagtgagtttactaaacaaagaaaatgatgttagggaaactaacatggtgtactgcaattctctgggacaggaaaaatatcttgaccaagattgaaatgtttatcaacagtaactttttttaatacagtatgtcattacagtgcatttctctttttaagtacagctccagccaacttaaagaaacatagaagttgggtacctctaacttaaaaaaacaaatatcatggagttggagttgcggctaaattaggggaatgagacattttgttcatgttgataatgatattatattgtcaatcacttagttttaagttacaaactccattttctgcaaaagtccaggacctttttatatacattcatttgtacttaacgataacaataaccaaataataaatcatgtatatgattatatatagtcaaattgataatagagttggatcccggagggcaattaagaaaccatagacatatcaaattgatatttgaaaaccaatggcacaagatagggctacgttgattttatggtcttattagtcatcaatgaagtcttgagcaggggtttgcaatttcgtttttcattttccaaaattcagggacgaaagaaatatggagtttaaaattcagggacgaaagaaatatgaaattcagggacgaaagaaatataatgttagtgagatacttctacataaaatggcgcccacaaatatttcatgtttgaattgtctaagatgacatctaatttggaattgatttagtacaaaacacaaatattcgaggctttttctgaatctatgatgtaagaataaagtagtcgcaatccaaattctacttttgtgcgtaacaattagtaatacacaaaaaataactaccctcacatgccaccgacaccaagtatatataaccatagtgcaaattaattaattaattaatataattattaatatatatatatatatatatatgtgtgtgtgtgtgtgtgtgtgtgtgtgtgtgtgtgtgtgtgtgtgtgtgtgtatatgtactcaacataatgctgcacttaatacgaacacaaaaaggggagtcccttgcatcacaaaccagtgatattttggactatgatgcttcctcaagggattgccaagaccacaaattaacctttgtaacaaaattggtagttacatgtcaaactttacctgctatatatgtaaaacaacctcccattttatcatttgcgtgcttccgacacaacgcatgtccatatacacacacgtaccctcacactcgatataacgctatcaaagttaacacggctcgacgccacgcacatacgcaccacacaaaaattcgctactagctagcacagtactagtagcagttagtacaagctaaaacacacttgatcaataacccaagcccccccaggctagctaagctaagctaaccagggaccacggcacacacacttgcataccgtcagtttgttgacaagctagcacgcacaaatggtttgtagcaaccgcggcgggcatggccagatgctatcacgactcgaccaccacaccactggtgctatatacaaatatatactaactccaactccgctcgatcaatccccgttatcgatcgaccacgctttctacgacgacggcatcgctatataactaggttttaaggctacctctcaatcttcctcttcttcttgttcgtctccccctcctcacccaccctgttcatctcgcgtgtgtggcggtggtggtggtattctctctctctctctctctctctctctctacttggtgaggaggaggaggagagtggtggtatcgccatcagagctcaataatactagtgcacgctcgccttgttttctagctcttgtcagcgaaccttcccccctgaaaaccccacccaccccctcccctcctcctcgtctgcttctcgctaccctctgtgtttgtgtttgggtttgtttgtttctctctctaggcctcgcgcgccgtgatcgatcgatttctggagtgatctgttgtttttttgtggagttgtgtgatctgggagatggctggagcggggggtgcggctacggctgcagcgggaggaggaggtgggggaggggtggcggcggggaggagtggaggtggtggtggtggtggcgcggcggcggcggcgggggcgggggcgccggacccgagggcggaggcgctgcggtgcccgcggtgcgactcggcgaacaccaagttctgctactacaacaactactcgctgtcgcagccgcggcacttctgcaaggcgtgcaagcgctactggacgcgcggcggcacgctgcggaacgtccccgtcggcggcgggtgccggaagaacaagcggtcgaggagcggcggcgcggcgcctggtggcggcgtggggaggggcgggcctggaggcggggcggcggcggccgtctcgtcggctggcggcggtgcagctgggacttcgcccgcgtcgtcgctggcgctgccgcagccagggtcgctgccgtcgctgtcgtcggcgctggggctcaccgggggaacctcgctggcgtcgctgctgctcgggagcggcggctccgggggtgaccacctcgggctcttccaggccatgcagtcggtggtgtccgacgcggccgcgttcgagatgcaccagcagcatcagtcgcaggtggatcacctgctcggcctcggctacggcgccgcgggggcgcagatccaggcggccaagccgtggctgcatgacggcggcgccaccggtggcctcctcgacggcttctacgcgccgctcctgtccggctccatcgtgccggggctcgaggagctccaagtcaaggcggaggccaccaccggcgaccaccagcagaagtcatcggcggcggcggccggtgagcagagctgggacctgccgacgccgtcgtcgtccaacgtcgaggcgagcatcatcgcgtcggacgcgctcatggccgccgcggccgcgtcgatgaacccggcggtcagcgccgccgccgcctccacggcgccgtccgcgcagtcgctcctctactggggcaacggcggcattggcgccgccgccgcggcatggccggacctcgccaactgcggatcctccatagcgacgctcttctagctagcccagcctgccgcgcgcgccgcctccacgccgccgactgtgctagctagctagctagctcgtcgccgttcgccgtcgtcgttaactctattttttttccaccttaattttccctgagttaatttcccgatctcttgactaaaaaataacatgtaatttgtggggaaaaaaaaagctgagatgagagagagagcacactgtggagagagatagagagaagagaagagaagagatcatcatcatctcataggcagaaaaatagctagctagagcagccaattcaacaaccaaacgaagaacccaaaaaaaattcctgcaagatttcatcgccggtggtcgatcaagaaggagatcaagaacacagatcgactaccgaccgcgttcttcctcgtctccggccggtcgatgatcttggaaaggcggcggcgagcggaagatcaatttgggatgcattgatgaacaagaaggaaggagagatcaacaaaatcatgggaggagaagagaagcaaagaaagtgtaagtgcactagctagtgttgctactacttgatttgctagctagctagctctacttggcttcttggcttcttgatctccttccttgggtggtatgtagtagcttattttgtatatagggcatacggtgtggggggatagatacatgagaagagcttgaagttcttgcggcatatccatggcggtgtggtggtgcaagaacatatatgggggaccttttctctctctctcatctcggcattttaatcggtgtgtttaattggttaattaccctaccttggctttgggaagtactctagatgtataagttataatagtactctttagatcaccaccttgcagcataattagagaactgtttttgagttctcatgcattggacttgttaagggtcgtccaattccttgttcctcttctagagtgaattttttctcttctttcttttctcattctcttgggggtttcctttgttcaaaactttgcttgtatcattgatgactttgtgagctatgagaaattaaaacttctgtttgttcattctgatggatatatattgtgaatttcttttcacagattaattaatttgctcatatatacatccctcctctgtgtgtacctaggattatagttctcttcacacatggatactccagatacatatatgtatatatgtagtgtgatagctagctagttactccatcacttttagtgcatggatggatgcatgtctcactttagtgatgctcttgcagctttaacacctttgttagctctctttttcatggcgacggtgttgcgtgatctgatctttgaattctgcgctggctggcttcttctcatggatgtgtttctttctctcctttttttttctgccatggatcataggattctccagtagtggtgatgtactcaaatttagtgctagtatcatggaggtgttgctagcttctggtcagaatctttttttgtgcatgctcttggctgctggagaggccaaaaacatggctgctttgcttgttcttacctgcatgtctcgtagcaactcggagacgcattttgatgcatgctggctatgttcacaccaactgctaggtaattacatatatatagtacatatcactcaggaaagggaaaggtagatagaaacaaaacaattaaatggggggacaaatggagacaatttatgtggagatgcatgcatatgggggaaatgggaaaacgatttgatttggaatttcgtttttttttaaatattgttgcttcagctatatatgtgttttaacttaattatagtagttatattaattatgaattctcatctgagtttagtttgttccttttttttaaaaaaaatactttgatgcttgttccaatgtgctaaatttctttacttctaggctaacatttgtcaaaaatgactttgcatttttttaaaaaatccaaaatacaaaggaacttgatgtcgccgaatttaagtatctcctttctgggccaacacctattaccttaaaaatcaccctttttttttacatatgagtgaaagaaattaattatttgacactgaaagaaaattagccttctgaaataggatgggttttgcattactaattaattaattactgacatggttttaaaattaatgttgaacttcatctagtatatataacagatcttacatggttgagaaattattttaggaacatataaccggtataagctatctatacgtctagcacatatatgtacgtactatataagctctagctagtgagaacatatatctatctatgtatcaaattaatttatttaattagcatgaaggtcggatatgtgatggacttattcagaacctagctagctaggtgatggaataatgtcgtgttctaggaatttgctttgctttgctttcctaattggctagctagctatagtttatttgtcatggctctccatctttttcgagaacacttgtcccattgatctcgcatccatcttattattacaaaaatcaccatatgcatgtctttctacctctgtagctcgcatgagttctggtaggacagttgtacaatcactcaaaatctaggtgtataatccgtacctactcatccatatcattttgattgttgaatgacactgtttgatgttgttgcaacagcttaaaacccataaatgccattaatccttttgttagaaccgtacggttgtataagtatatatgtcggttccacgtcaccaaaaatgtaagaactgacctattaactgtagatgggtacaacagtaatagtactcggaatacgcatatatcctaccttcgataattaatattatgcattttgatgcgtacttaatattacagtccttgctagcttggttgtttctacacatgaagattactctcataagtcataatatatgcgtgtgacatatacttgcatgcaacacgcacatattcattctgaaatcggcattatatttgtaattaatcatcgatccaagatctgcttaaactaaaagtacaatataattaaagttgaaatttatgcatagggataaaaaaaatatagtcacacatacaggccctgcaaaactacagtactggtgtgcatgcatgagccaatttatattagctaagcttaattaccagtggtactgtgtactactgtctatgtgctttacaaccaatgccattactcgatcgtgtactgaaaagacataagtagacaataaaatgtttgcttttctgctatagcagtgaggaatatatatatgtatttccttgattgatgatacgcatgcatggaacagcggaacaattatatatagtcggtgaaaaactagctatagctagtaaaattgttccatatataattaagtcaataatgtgtatatattaattgtaggcatgcattttctcttttatatacagaaaatgttgacaagatatatagagatccatgacgttttctctggttgaaatgtttttttttaagtaggatctgcacttcgtactaacaaattaaatcagtatcacaaaatatgtgaattggataattttactatccttagaaggtacctagaggtaccatattttcaaatgtaaaaatttgtacctctaaatattaagtatctcaagataccaaaaattttagtgtaacatttaggtacctcaaaattattttcttaacgactgtaaaattcctcatatgaattggtctctgtgtgtgtctatacacacaccattctcttcttaaggacacaatatatatggtctactccatatatatataatccatgtgtgtgagcattccatttctatcccttttgttctgtgatctcagctcgcaattatcatatttattaattatgcatatcatgcctaatagtaaaccataagaaggctgtttcgtatcacgtcaccacgaggactattcacaactatccacatctcacgattagtcaacaattagggcttttctgcagtggtgaatggttgtatatgcatccatatgcatgcatttctattttccatcaattgtgttagcatcagtagtgtttacttttagtgtatatatattcgacgtggcacatgcgttgttcagtattgttgtctaacagtgagagtgatcgataaatgattttgaattgtataattaaaacgggggtatttaaatttaaataaagtataactgtgaacagaatttattatgaagttctaggccgggtttgagtacgtacgtaagaaaaaacggcacatttatttatgatgaaaggagaacataaatagatttaatttgtatacatttacaaagtactctccaccactgcaatacacacgtactggaattagaatattgatgtataccaactttcatatatagactactaccttcatcccaaaatatttatcgttctaggttatttagcatatatgtactaaggtttaaagataaaaactataataccccttaattaataatgcatagttggatataggatgatggttggggggtaaaatggggagaaattttaggacaatttttaaatgctagaaagactgggacggaggaagtatttaagaaggatctcaccaacatgtccatcctaagtattttcctagaatatacatgcatatatacgtaggagctacacatctttgttcatcactaagtacaataattaagggtatttgatgaatctgacatgttgcaccacaacatacgtactgtagaagtcatgcttattcagtccaatgtttcttgccatcaatttggatcgatcaatgctcactatgcatggaatacagtactacacacagtaataattaaccctaccgaattcatcaccattctacgccacccctgcaggcttcgactgaataacacttttaaaaaaaatacacaagaacatattgcaaaataaaaaaaaccaaaactaatccttaaacttcatacaaatccttcattagaagtgtgacttgagctttcaattaatccttgtccaaatatatcaacaatccttcgttagaattcaacattgtttaattatacatgtagatcataagaataattcatataagtccactgactgtaaaaaatagatactcccgatggtttcatgctcacaactttgccccgaaggttgcgatcgaaagagatgtgggcttcagctttttcattgcacacaaaataaaataagtcattaggttaatcaattacttcatccgtcccatcatataaggaattttgggtggatgtgacacatccttatgtgacgtctgtacagattattatactagaatatgtcatatccacctataatctcttatattatgggacggacggagcaagcagcaactattacaagcttcaaaactagatttatataatttttaaaaaaacgtttttgtattatttttttacacatagcagttcataaaacgtacggtgagcaagaaaatggggtggtgatcgtctgatcgaacgagaatcaaagccatcgccgaagaaaaaccgcctagccgatgagagcgcacgcgcgcgcgcgcacacacacacaagcgcacaaagggaaagcaacagaggatcgatgtagttggaaagatcggcttggttgcaccggttaaaaatgagaaagaaattaggagtagcaagagaggaaagttgaatcgtctgacgcgggcagcagcggccgcatttgcagcaggcagcgagagattggaacgcgatccttgcggggtacggcggagtaactgggggctctgaattggatgaccgcattcacatcgtgctagtagtagtacatgatagctagcccttgctcccatcaataggtaactgtgctatctacaggagccactgctgccaaagaagcttatcatcccttcactcccatcttctgaaaatgcctgtagcatgcaagaacgaccatatattagtgtgtgtgtgtgtgcgtgggtgggggggggggggtgttaacgttttggatactgttatttgcaagatcaagacgggatacagttttctacaggacgttgttgattaaagaaaatgaagaaattacggacgaaaaaagatgagtagtaagaccgccctcgcagtgatcgcaattaatttttggtttctttaaatttgattaaatttattactgtaaaatttagtcaaaatttgttaatttaaataatttcatgacaaaaaaaaaatctgacccccaaatttcgatggaaacgaaagtatagaccctgcactctcgtgtcgctcccgtgggacgtcatgggaggtgaccaaagcgtttctccatcgctatccaacctcccacctttcgttccctcgttgccaccgaagtataccgatggagctctatgcggttgtgatgacgacaacaacagagccttcatgcatcttcctcggtggccctcgttctccaagaagggccgacggtgacacagtcatgcttaaaaaggatggcaacaagcggatgggaacaaacagatccaacgcttcctcaactggatctggcgtcctcctagctagatatgacgcccttcaatcggatatgtgcatggtgaccagagatgcccgcaaggcgcggttggtggtctaatgcgtggagaggcgggttgttgtatctagggataggcaaataaggcgcactcagtgggcaagttggctagacccgtgtagttcggcgaaccacgatggcggtcgtgtgctcgacggttgtgcagtgcggacaagcaaacgtagaggaaggacaacaacctctatgaagctagttgtccatggccaatggtaggagaggaagtgggagggagagacggccactgcggagtggttcgctcgatggagggacgctgatatggcggaggcacggggcagtgctcatggaggcagaggtctgatctggccaaataacgacatggatggtagtggcatggatgtcataggctcagtcaatgggttagatgacaatctacctccctttattggctaggcttatttttcctccttaggcttatttcttcggttgtacggagcgccatcagggaggaggcattggctttcatggcagagagatgctcggcataggggtgatggactattgtgtctaggtgacccatgcctcccccaatgcagtgtggtggcagctgcggagtggctgtgcgtttgttgattaggcgaagtcagagctactatcactactatagaaaaggtttttgcatacagtcaaaatggatctttgcagacggttgggtgcatggcccccttacacgcagctctgtgaaaatcaacattttcacatgcgagcggcctaaccgcgtgtgaagatcaattaccacaagtgggcctaatgtggccgcctgctataatatattttcgcaagtggatgagttatatggtccgcctagaaagacatttttttccgtatgaatgatttagaatgcctacatgctataacagttttcgctcaaaaaaataaatttcaaaaagaattttgaaatccctagcacttcttggaaccctaaaatcggcatccacatgacaacattcagagatccatccacattcacacaccacaaacaaagattcatccacatccacaaactacaacaaacaagaacaaacatgaaaaactagagcttcaatcaaaacatagtagaaggagtagcagaaccgagttcgcagaggagatgaggtggggaaggagacgaaaaggcagaggggtggaggtcccgcgaagcagaggaagagtgggtggagaagaggctagcggttagacccagggtgcgcagcgacgatttagaggcagaggagcctgccctctcgaggtcacccacgccggagcaggcctcccgttgctgcaggcgagaagaggcgggggaggggaagcctccccgccgcaccgccttatgggggttggttcgtgctagccgaagaaaattttgtcttttgcaagcacgaggtggaggtttaaacccatgatctactggtcacacgaagagcatactactgatgcgctacctccatttttcaaacggaaacaaacatacactcaagatacattgtagtaatgctaatattataatttaattagttacatttgaaagtatttgacaaaataatataaaattttttgtgataatctcaaagagtacccgtattttttctccttcatgtcgataacaaggtactctctctgtcaaaaaaaccaacctgtctataacaatgaatttggacaatcctctatccatattcgttgtattaggagttaaagtttgttttttttagatggatggagtatactataaagcatgcccgaccggccagcccagacacacgtacgtactggcacgcatgcatgcaaaatgcgcttgtgtttctccctgctcgtcgattaccgggttgactcggccgcgccctgcttgcgcacgcgcgtgtacgtgctgtgttaatttgctgctgccatcgatccgatccagcgtcgatcgatcgaacgatacacggatcgatgttttccttgtcgtgaatgatggcagccggagacgacacgtacgccggccggccgcgtttttcctccttgctgatgatctcacgttggaaggagagtagccaccacgccccccgtcagacaaaaatgacatcagaaactgcaacttcgggatttccccaagtgtgcctgtgtgtgacggcactgacaagcggggtcccatgatgtttttccaaacaaattaattaaggacgaagcggcaccagtctcggatcggataaacatttgcaactttttgcaaggttaacattttatcatgttcctcgtaataaaaaatggtcatgttttatttaacgttcgaaatctctcattatagatggttcatatggagtaatcttcggtaaaattatgacatacgtatagttccacacaaaagacactctaagttaatcttaccagaaaaggaagatttgtctgcaatgtagcctttgcatggtctctcacgtggaactgaataacacagccatcatttcctcagcaatttactctctccatccaaaaaaacctaagggtgtgttttagtagaaggggattgaggagaatgggaaaagcgtattgagtattaaatattttatttaatactcatgattaattgagtattaaatattttaaattttaaaaatagattaatataattttttaaagcaactttactatagaattttttttcaaaaaacacaccgtttaatagtttgaaaagcgtgcgcacggaaaacgagactcaatctcccctatctccccagaacgaacgatgccttaatttaggtgaggatgatcgttcatagtataacgaatctagacaatttgtttaaattcattgtactaagttgagttttttttttaacagtgggagtacactatgactctatgactggtaaatcgtgaaagaaaataaacatagcaacttaaaaaaaataaggtaaaacttttatatttatgtcttaattaaacaatttgaatttaaaggcaatactaaaaataaactacgagaaaaatcatcaaaattaattttaactagcatggtggcccgcgcagattgcacggctagcaccattatattttctgtcatataataacatactccatatgttttctcaatgtattattcagatatattaaaattatatatgtcatataattttaaattttgtactaccctgacgaaactactaatatataatatttatattgtattttatatacgtgttagttattaatttaatatcaaactttagttatttgtaaattatattcctatatggactctaggctcttcttccaatattatttatttttaattctgaatttttattatttctaattgtatttctatgtggactctaaactcatctttcaatactctttaatttagaagtattaattctaaattgtattcttatattgactttagactcttcttccaatgtttttataattttgaattttagttattgtaaattatatttttatacgaactctaaactctacttataattttattatgtttattcagaattttagttagttttaaattcttatatggactctatactctacttctaatatttcttatttttaattctgaattttagttatttcctaattgtatttctatatggactctagtctcctcttctaatatttcttattttttaattccgaatttcagctatttctaaattgtatttctatatagactctagtctcctcttctaatatttcttattttttaattccgaatttcagctatttctaaattgtatttctatatggactctgttttttctttttcttcgattaatgtgagaatttctagaccatgagagcgaacgtgaaggtttttttttctattcctttaataatataatagatttgtttttaaaattgtaactttggttgtggtaaaattgcaaacgatgccagttggggtatagttttacttttgacagtttttctaaaccatctaggataggatgcctggaataaccattcagtagcacagctctatcttaattacggccgagaagtatgacagggagagacaaaaatctcaccgcagattactagagtaaaaaccaagcttaactttgctgcgcggccatggtgaggacaaggtacgtgttcttagtactctattgaccagagggggagctgcatgctcgctgaacgctgaggcagagagcccagaggcgctggcttggctgccactgcatgcgcccaactgaatttgttaggttcccagggcggtagcgccaggccgtgcagatgcagatgagcgccgcacgcagcatctacaggacctgccggccggctgcggtgaaaattccaatttactgcacactactacccggtgaaaactctcgtcatcgatccatacataaacctaataatttagtaatagaaaaatagcaaacactgtttcagggattgctccctccgtgccaaaaacacttttatctgtaacgtttaaaatttttggcttaaaaatgcatgttcatttaattggaccttagaaattgtgaccaaaagtattgatgagggaaaacggtaatcatttcttctcactattctatccatcccaaaatataagaaacaatcacttttttttaaaagaaacacacattttacaacctttcataacaaaagatgtgcattcatacatgtattgcactagcaccttcctcctctttaatttgttttttatatcctttatcctcaaaatctctattcgtatggggtatacacattgttattatttggcaaattttactacaggacactgctattgtgtagttttagctgtgggacactgccaaaactcacttttgggggaaaacacttcataaatgtggtaatttgccaatgaacacgatgtcgattaaaataataatttctaattgagtaggagtgagaaatcgcgtaaaatatcaaaaatgcccttggccccatgtcagctctccatctctctctttcttttctttctctcttctcccggtcgctgtttcctcggtgacaccgcccgacgaagcatcgccacgacgacctcctcttcctcccatgccgcctcccttcgttccaccttcgagccagccagcactcaagcacggccacgccgcaccatcaccacccaccacccgcgcgtcgtcggcccgccccccctgcacgagaccactctgccgcgccggccttcccgcttccccagccgagccaccggtgcccccttctttttccccaccgctaccggccaccacctacgccacccctttcctcggcgccgcctccctcccatgccaccgtgccgccttcgttcttcctccgccaccacaccatggcaccgtcgccctccccagcgcgtggccaagccaccgccacgccacctcacaccggccacgcgccgagccacacccggccgccggcccgccgtgcacgccccgaccctccattcctcctctccaccaccgccggccctctccctaccgctgccagtctgctcctccttttttccccgtgccgcctccttctcccccccggtggctgccgagcccctgccgagctcgacccggccacatgctccgccgcaccagctgcaccgccgtcgtcgtcgccgccaccgccgtgcttgtgtgctcggtgccgccgcttgcacctcgtcgtcgttggcattgggtacccggcggtgcgccgctgcttccccggccgcacgctgggccgtcccggctcgggccgtcgtgccgactgtgcgttgcgcaactgctcacccgccgcgggaggaagaagaagaagggagaaagaaaagaaagaaagagaggaagagagatggagagctgtcatgtaggcgcaagggtatttttgacatttcacgtgatttctctctcctccttaactgaaaattattattttaatcgacacggtgtccattggtaaattaccacgtttatgaagtgtttccaccaaaagtgagtttggtcagtgtcccatagctaaaaccacacaataacagtgttttgtagcaaaatttgccttattgttttcattagagtgattcaaacgaggtgataataattctttcatgtctttacgtcagaggtatttgctgggatggaacaaggagggaatattagtttatcaagaatggctataaatatattctttatgaaacggaggaagaagtaggtaataataatctccctcaaagggaatgattagcgtaagtaacactcctggtttgattggttaattcctctctctctctctctaaacagtacacagctgagaaccaggcaaaagaaccggaggattagttgattgattccatggacgccatgatatgatgcacccactcctagcgacatcatacacgcatgttcctccccactaagctgtgggccacattgcatcacacgtgcccttcccgccttctctctctgccatcactaactacaccaaatggcttcaccaatcaccaatgtcttaatccatggaatgtcactcctgtccatcgatcgatcagccaatagtagtaacaaggatcatcagtacgctcatcaccattagttactaactgcaattaatcatgaggggatgaggacaactgtccttttcttattcactcacctcagactcagaggtaggataaacgtacgtactacgtactcatcacgtacacaagcattgcactatattcctagctatatgcaccatagagatgtgtactccttctgtccaaaaagattcaaattttagggatgaatctagacattcaaataacgtgcaaagtatgtgcttgtgaccctgaagccacaaggtaataacacttgggtttttaaagcgggatttttaatatagaaaaaaaatacaagattagattatcttagcactttaaatcctatgattaaaaaatacaagaaaacttcgaaaatgaccatttagatatagcacagaatacactggaatcacaagagcgataggcataggattttttttcaaaaggttagacctcatgtgaaaattcttctaacattcaaatttctatgttttgaaccaatccaaagaaacttcaacggcttgtttggtaactggatgaaatgggattgggagtttgatgataggattaagatgagaatttgatttttaatcccaatatcttgtttggtagaggtgatggaaattgatagagagtttagttgaagattaggtcattaataaaaacggatggctgagatttgcttagataaagtaaaggaggaattccctcccaattacctgccctacccaggtattgaaaaggtgggagttctttcctcaattctccatcctcattccaccaaaattctcatgtctcccaaccaaacaaaacacttaataatctcatccctctaaactctcaatccctcctaaaaactctctccaaccaaacgggctgcaaaggaatttaggacggctatttctttgatcggaaaatattttcattggattgagttcctccaaaaatttcaaaacaccctttgttccaaagaagcccttgattgtgaacaccctcgattgggaaaaggccgaaagttatcaccgcgtagcggtataagaaaacttaccaggcatggtaaggactctgtaaaattcagttactgtaaaattcctctgtaaatcctcttacccaaaaagagctaccagggtcttgtttggatccttcaggctattaaatagccctccggaatcttgttatttaggagtattaaacgtagattattgacaaaatttattccataacccctaggctattttgcgagacgaatctaacgagatatttaatacatgatttgctaccatgctgctacagtaatcaaccgctaaccatggatcagaagtagctgtgaaagagctactagaagtagctgtgaaagaaatggacgtgacaccatggtaaacgacacgtcttaaggcgtcgaaactgtcaacaagacccggcctggctcgctcacgcagggcttggatggatggacgccggtcactccaggctccagtgcccgtatctcgcattccggagattctcggttccacccatccatcaatctttccttcccaattccaaacagccaatcaatctcttcacgcttatcgcgacgcgcaccacggccgtgagctgagctgacacccaacacacgctgccgcaatcgcgcgaaccatcgacacgcagcaacacaacatcgtcgtgactggagacaaacgctcccgatgcttcaggtttcgagtgttaatactccagtgatcatcaagagcgcctgattaaatactgagctctgagccagtagtagtggtaagcagtacactgaaggagaacgaccgatctgatctggggagccattgatttagagcgggcaggaggaggggcgtacggcgtgtacaaggatactcggtgattcgagtgattggcgcagccgtgcagctgtgacaattgatagctctgccctgtctccgattcttctaaacacaagcggacaagcaaaagccgccagggcaggttttgtgttggctgggacatgacaaggcttgcattcagcagattcaggctccagtgccttcaccccaggaggacagcgtcttggtgaattacagcaaggagacattcagacataaagatgagtgtaggtaaaagtgaccttttgttaatgtcgctgaatggactagttcttttttctcattggcttcggttaaacagtagtattagctttgttagtgttttgatgattctgttggtggtaagcagcctgtttgaaaacctcttgccactctatccaatgggagttaaagtgcccttaccaccgaagtacaaaatggtatgcagaacagctgaaggcccttaaaccatgtattgcatagcgacctgcatcatccgggagggcggtatgctcagcgccgcgattcctctcctgcagttcctcctcaagaaggcgtagaaatagttgatcaccagcttcttgacaaagaaggactccttccgagctctgatgtcgccgtggcccaggaggtacaccacgccggactccttggccttgtggatgaacgagagctcgtcgtcgaggcttcccctcccatcgatcgcctcatccagcgatccgtcgaacgacatgctcgatccaatggttgggtgctcggtagtaccagccgcctcggcaggtggaacaccgagagaattgatactgccattgggaccgacgagagctcttgacgaggctgatgcaacctcctcttctgagtctgtaccgtcgtattggtcactctctagggagcgctcttgggcttcccgccgcatgaacttctcgagactctctatcagaagctgctgaaatgatatgtagtcctccttgcgtatgtccttgtacccatacctgcaaccatccatgaatgattaacatgcaacaagaagaagaagattacacaaggaatggctcaatcagtgcttaaaaaaggatagatcatagctacgtaaccggctcaatcatcacacactgcatcattttattcaagacagcagattacatattcaatatttcaatatccagctatatggatggggtctatcaggccagcttcttgacatataactactgatacgaactgctgggggtagatatgcatgggtagaaagttgcaacagctatatttgccaggacgaataaaacaaatgttaatcaacagacatagaatcactgctagtaaatattagcactatcatactttggtacggatatgcataaagggactccacaaaacaaagtagttcaatagctacagacaagtaactgaagataagtttttaaagaaatcaattttcattcactgaagttagtggcagagatagaccccatggcccaaaggaatcatttcatgtcagggactagaaccaaagctcaatagaacctctgacaagaatttaaaggagtatcaaaacatcagagatatagaggaaggcatagtccatctctggctcccccactgtgacaacagtatgatactatatcaaacatattacagctttaaggggataccagccccagctgcacattgacaaaactgtcagatgccaacaaagcaagctgtttttagcagattcaacgcattacgtgaaacacaaacagatggacacagcataaaacacaagtacctacatttattatctccaaccttcaatggagcacaaagagagaatgcaaggcaaatattacttcattttaggagatacttcctctgtttcatattataagactttctagcattgctcatattcatatatatgttaatgaatctagacatatatgtgtgcctagattcattaacatctatatgaatgtgggcaacgctagaaagtcttataacctgaaatggaggtagtagaaacatttgtagttactatcaagtctggaaaagaattgacatacatacctagcaatgcagcgaaacatatgatagctctttggacagacccgacgaaagagaaatctttcattctgaggtacaacaggaactggaacccacttgatgcagacaaaaataatcattgaatgaatggctggcattgtggcgaggaattgaccaaagattccaggaactcccctcgcaagttcgttataaagtaatccaattccagggactctgactgtacccagattacaacctagctccatcaacaaatccattgaaagtttttgcttaacctcagtttcgtacttcaacttggttccgtagttccatatgtacattatcaaatacagtacagcagcaaataccaaaagaacccaactcccatctgctacactgcccaatactgaagaaaagaaaattaactccagccccagggagagggtgagaaaacacagaactacaatgatgttgatctgccatatcaaaagcattatgatggtcaccaagactgtagtcatcatcatgaccccaagttcagctatgcctgcaatagttaccaggcattagaaagattatgcggtagcaactgtggcactggtttcagtagaaaacaggttacttagcagccagctctccatgttaaaaatcatttgttgacaatcttaagacagtgttgttaatataaaaggaaaaatcatacaaataacaattcagtgcttaatgatatagggcatcactttctagttagaaaattaaaaaaaatgatgaatttgctgtatattttatttttgtatggagcaattcacgtaccatatgcatttccaatctcattgatgctcccaaacattgtaacaaatgcaaggcaagaaaccagcaaaaaccagttcatcattgggatatatatttgacccatgaagcttctagaagtgtgaataatcttgaggcggggaaaacagccgagagctgtggcctgctttattgttgagaatatagcagttgtcattgtgcgactagcaattatggctgctagaattgctatgaataccactggccaaaatgcctgatctgcgacacggaatgaaactatttagaatttaggggataatagattccatttcattttgtgtgaaaacaatccatagcaatcagaaaatcagatttaaaagaggtacatagatgaaccagtttatcttactcgggatagataaaaagaagacctgctgattttctgttagattttccataagaaatgcagcttgccctaggtaacccagtagcaggcatggaagaacaagaaacacaaaggtaagctgcaacacattagacatagtaagtacaaggatatgaagtgcaacattgactcttaaaacaacagaaaggactacctgaacagatttgacagagaaatagcataaatcagcaaacattgcctcagatcctgtaagaagacaaacttgttaacatctttactgttcaagtcaaaagaacagcactgctcttttacataagctataaaataaaaggacagcagcttcaataggtttagttatgacctactacgaaataaaagggcaaagacagggtatatcaagtctatatagctcgaacaaaaggaactcaacaaagagtaaagtgcacgggtggtccctaaacttgtgtgggtgtcaactaggtccctggggtaccgagctcaaaatgaattattaggtccctcaacttgtctcgggtgtcatataggtccaaacgggttccaacccgctccgtgtgctgacgtggcatgccatggtggcacctacgtgtcagtagaacccatatgtcagccacatatagaaaaaactaagaacatatttttttctcctctctttttcatttatttttcaaaattaaaaacatcattttctcctctctttttaaattttatttttttctacatgattgacatgtggatcccactgtgtggacgtcatctcacggagcgggttggagcccgtttggatctatatgacacccatgaaaagtttggggacccaaaaatgcattttgagagtttaaggacctagatgacacatctatacaagtttaaggaccggccgcacttcactcaggaacaaataaggaaaaaagacatgcgctagaagtaagcacattcttagataatttagcattcaataatatatcacaaatagcattaacaacatggctaaaacacataccagtagcacatagaagacagcctccaagggacatccaagcttgggttgggttcctttcaaaataatagtatatatacataggattaaatgcctgtaatacagctgaaccatatgtcttcatgttataaattcctattccagcaaggcagcaaaaccatatgaacaaggcaggtccaacagcaagcgccactttgcttgacccaaatcgttgtagagtgaacaggacaataagaactgccacagttatcatgacaacttcacctgccaaagtttcacattaatagtaagtatgatgtactcgtagacagtacagacttaattcttttcctgaatcaattagtgctatgtgtcaataaactgaaattctgaggtcaccttcattaacactagatattccaacctttaagccattgacagcagacatcactgcagatttttaccaatagaaagaactggaattagttctacaggaaagagaaaacctggtctagcacaatatcactcataaaagcatatataatgatcattaaacacggtgaagagaaattcaatgagcaacgcatcagaaatatgtgaacctgacattgctggtgtgacaacaccatccgctatcaccatagaagtaccaaaaagaacaagcatcaaaagcagcttctttagcatagatgaagtctcaagacgctccttgatcttcaaagacctctccagttctactgaaggcacctggagttggaagcttgatatacgagtatcagagcgtagttggttaggaagcagactaacccttgcattcctgcatattagcgagtataaagcaaatgtccctcctgccatagatacagaacacggtttcattaaataaaaagattaaccaaaagtgctgtgttttagtctactcgtagtgacctagtagtacataatgagatataccttctccatcatcgtttccccataaagcaatgagagtatacttcagcaatggtattagaatcagagtgtatattacaagtgagagtgccccaagtacatcctccttcgaagtaatagggtacttgttgaacattacatcgaaagcatacaatggactggtaccaacgtcaccgaagacgacacctagtgtctgaacagccagcacaatactcctgcctacggtaatttcctgaaagaaaatgcatgattgagaaatcagtagagttcagatactcatgcatttagaatgaggcttgcacctcatcgtccaagcatcatatgaagtgatgatgtttggatttggagtatcaatgtccaatgagaggtacttatcaaacaacttgcatgacaacatagaaaccaaaatactgccttcattcatttctagatgttgttttagaataagtgaacctcaaaatttaattcacaaactaatttgtatttaatatgtgaaaatagcattagtagatttcacatgaaaactactttcatttagttatttgttaatacatagtgatttttgtaaatataaaagcaaaaagggcaatgataaaacaagtgcattggagattgtgtcgatgccctaaatgacaagaaaaaaagaacagagggagcagtaatcaaaattgacaaagtctctaaaatactactttggcagataatttctagtgtgataaatttgaaaaatctatgaacactatcatataatgatagacagttttcagcataaatgtactggtaatacatgtggttaattcaatttgactacattaatggtgaagaaagaaagagaaataaaataactcgtctcgctcattcatcaccagtagtttcacttaggtgactcaatgcaccacatgctgttctttccacagcatttagtttcacagaacaatttaactctgaaaagccaaaccaggagatgaaacaaaacttttcatgtcacggctccttattcacatccctaaggttctaacttctgatctcgagtagaagacgaacaatgaattgcaatagaaatcatgctccggcacatggcgaggtatgcgtccattcatggaaaaaggctcagaattttgtcacatcaattatgcatgttttcgtggtgttttttgcaatattgtagtatacattttgtgttgggttcacttagactgcagaaaatggctaaataaaagaatgtctgggacagaaatagaataacagtccatgtgatctgataagcattcacaataaactaaaagccatgactgaacaaatattatatcgctaggtcgcaatatcacatcaacacggccatcgtgatattcctgtggatattgtagcttataaacttctcacatcacaacaaagaataagacatagatatgctatgctgctacaagtatcaacaaaaaatggagactagggtagtaattacaattcttcaaactgtccacaatctgcatgtaacacttacatcctcagatgtgtcacctacaaacaacaagattacgccgcaaaccaagaatttcactcatcgatcaataacccaaccatcaagagcatgcgtgtagcttgtggaccgaattgcactggttcatcagaaaagcattgcaaacacgttgcatccatacacagatggatacaacctagaagaaccacggtacatgctataaactagtatgattttgctaattcactaaccagaccaaccgaatgaaattacgcagtccacaccacaagcatatagtgagctcagtatgatgttcttacagcccaaaacccaataataccttatcggctccaaggctgcaatctcaattgagcagcagcgcaaagccgcctaatctaacactatcactagagtactagaccacgattgataagtgtcaggaacacgcaggcaatacatcgaacagttggcgcgcacaaaagtagaggcagccaattttaagcaaggccccgtgtttcccgtgggggctcgggcgggtgcgcgcacctggtggcggttcatgcctgcgacgtcctgcgcctcgacgtccagcgagtcggcgcgcgggccggtgcgcacgagccgctggcggagcatctccgcctcctcgtagttgtcgtcggagtccgagcagccgccgcgggagcccgaggcggccgccggggtgccgcccccgccgtcggagctctcgatctcgtcctcctcgtaggcgccgccagacaccacccaccgcatctccgccgactccgtcttccgcagcctcatcctgccgccgccgccgccgccgctggcgctgccgctgccgccgcttcgggtctccatttgggtcggcgcgggaggcgccggtggccggcgcgtgggtgtggggcactggctccgtgaagcggaggagaacggcagaaggggaggatcggagcgggggagaagaagacgctggagagtgatgaaacggaaactgcagtagcaggagatagctgccgtcttcgtcttttcccctcctcatttttcacccctcatttcagtgcacttaatagtcggttaatttatgtttttattttctcccacttcttttgaaaaatactccctctgtattatcttttttgttctcaaattttttaagaaaatactgccttcgtattaaattttaatgtatgtcgtcgtttacttttttatccacgtttttaccattcgtcttatttaaaatatttatgtaattatgatttattttattgtgacttcatttatcattaaatgttctttaaacatcacatataaatactcttgtatttgcacaaaaaatttgaataagatgaatggtcaaacgttggtcaagaagttaacaacgtcatacattaaaaaatgaagggagtagtttctttataaaaatataccctacactggctccggtgaaacgaaggagaacgacagaacagagggtcggagcgggagagaagaagatttaagagacttggacacctgagtgatgaaatggaaactgcagtggtaggagacagctgtcgtcttcgtcttttccccctctttctctctctatttttcacccttctttaacttttctttaacacaacagtcggttaacttatctttttttcctacattttttttaaaaaaaatactccctccatattaaatttaaatgtatgtcgtcgtttactttttatcaacgtttgaccatttgtattatttaaaatatttatgtaattataatttattttattgtgagttgatttatcatcaattgttctttaagcatgacataaatacttttgtatttgcacaaaaattttgaataagatgaatggtcaaatgttgctcaagaagttaacaacgtcatacattaaaacattaagggagtagtttctttataaaatgtactccatattggctccggtgaaacggaggagaacgacagaagtgagggttggagcaggggagaagaggacgttggagagtgatgaaacggaaactgcagtggtaggagacagttgccgccttcgtcttttccccctctttctccctctccattattcacccttcgtaagcttttcttcagcgcacttaacagctggttacctttcttttgtccatttttttttaaaaaaatagacctttcatattatctttttttgtccaatttgtttttttataaaataccccctctgtattaaattttaatgtacatcgacgtttactttttatcagcgtttgaccattcgtatgatttaaaatagttatgtaattatgatttattttattgtgacttgatttatcatcaattgttctttaagcatgacataaatacttttatatttacactaaaattttgaataagataaatggctaaacgttggaagtcaacaatgtcatacattaaaacatgaagggagtagtttttttataaaatataccccacactggcttcgctgaaacggaggagagcggcagaaggaaggatcggagcggggagtggggggagaagaagatttgagagagttagacacttgagcgacgaaacggaaactgcagtggtaggagacagctgacgtcttcatcttttcccccctctttctctctttatttttcacccttctttagcttttcttcacggactgttaacacttaacagtcggttaatttatcctttttccctctatttttttaaatactcccttcgtattaaatattaatgtatgtcgtcgtttactttttatcaacgtttgaccattcggtttatttaaaatatttatgtaattatcatttattttattgtgacttgatttatcatcaaattttctttaagcatgacataaatacttttgtgtttgcacaaaaatttcgaataggatgaatggtcaaacgttgctcaagaagttaagaacgtcatacattaaaacatgaagggagtagtttctttataaaatatatcccacactagctccagtgaaacagaggagaatgacacaagggagggtcagaataggggagaagaagatttttgagacttggacactagagtgatgaaacagaaactgcagtggtaggagacaactgtcgtcttcgtcttttccccctcttactctctctctccatttttcacccttttttagattttcttcactgaccgttaacacttaacagacggttaacttatctttttttgcctccattttttttagaaaaatactccctccgtattaaattttaatgcaagtcgtcgtttactttttatcaacgtttgaccattcgtcttatttaaaaaatttatgtaattatcatttattttattgtgacataatttatcatcaaatgttcttaaaacatgacataaatacttttgtatttgcacaaaaattttgcataagctgaatggtcaaacgttgctcaggaagtcaacaacgtcacaaattaaaacatgaagggagtagtttctttgtaaaatgtatcccacactggctccggtgaaagagaagagaacgacggaacggagggtcggagaaggggagaagaagatttgagagacttggacactggagtgatgaaacggaaactgcggtggtaggagacagttgccgtcttcgtcttttccccctcttcctctctctccatttttcacccatctttagcttttcttcacttactgttaacataacagtcggttaactaatttttttcctccagtt

SEQ ID NO: 10034 - DNA, 759 bp, Oryza sativa
catcatcttggccggtacacagatgcgtggaccgcaccaaaccgtgccttgatcgtctatggagaaattgggggtgctttcttcttctgtattctttttattaactcttttatcctttcgacgtctttctgggcttcccggatttgcgactctagcggtaggctgtactgtcaagctggcagggacacctgactgtaccacggtcagcctcaacttctctaattctctgcacaggcgatcttggtcaggccatatttgagctacgttgcaatagaccttgcgacttagcgcatcagcgaccacgttagctttaccggggtggtaatgaattccaagatcgtaatccttgattagttccaaccatcttctctgcctcatatttaactcggtctgagtgaagatgtacttaagacttttgtgatcggtgtatacttcacatctgttcccgattaaatagtgcctccagatcttaagagcatgaaccacggctgccaactcgagatcatgggtgggataattgacttcatgaggcctgagctgcctggatgcataggccacaacctttcgttcttgcattaggacacatcctaagccttgtcttgatgcatcacaaaagatctcgaaatcttttcggatatctggcaaggtgagaactgaggcagtggtcaaccttttcttcatttcttgaaagctgtcttcacaggctgcagaccattgaaatttctttttcttcttaacagctcggtcataggtctgact

SEQ ID NO: 10035 - DNA, 7683 bp, Oryza sativa
ctcggaattggagcgttcaagtgtctaatttctccttaagaagtcaagaacccatttttgtgcttgcttcggcttgttatatggagtttattagagtaaaagccttttcttttccgttggtcgtgtagacgctgcagcttcggaagatccgctcttcgtggaagttgaagccgacgtttgggaaagcgagcaaggcaagtcacatcatccttgagcatattgaatcccagtttataaaattattttgattaaattaatgcattatcgctttatttaaattcccgcgttatcactgttttatttagccatgcctatttacctttgttaagacattattattgctattgttattattaccttgttcaccctagaataaacaaaaccccaactagtggacactctactcatggtaccactagcatgattttaggtagatgcttcgctattttaattaggtaactttaggtggtttttcaactctagacttggggatattcatatcacctggacactttggaattgttggtttattgtggaattggattcacaccgccccctctattcaaaatccccaaaatggttttaggctgggctcggggtgcatggttttgatagtagcacctcggccacataaggaccggtcttcgggcctctgttgcaaagcactaccgtacttccacatgtctagtgggtaaggcttagtttgtggctcagtctggttataaacaaaagtacacggatggagatggacgaagtcgggggtcgatggacatctctaggacaaatgaaggctacacgagctgcggcccggtagtcgagatgtcatggcacagggctggtgtcctgctgctaggggctcaatcctgcctacctgtcccggaggttccggccgtaggtggggttgggtcggtactcttgtctatagctaggatgggttggaaactatgtcacgtcttccgtctgtataccgtggtggtatgtggcacatggttgcacgtgaggaagatgtgtcttgtgggtaaagatgtacacctctgatcagagtaaaacctattcgaatagccgcgccctcggttatgggcaagccgagcaatgtacccaagttagtgttttaattcttaaaatttgctcaacaactaaaatgtggaatggttggcctgggttggcttgggacgagctgggacccagggtcgggttgccagttcggtctgaatcatcgtaggccttgggttaaggcaggttcgtgagggttcactgccttgattaataatactgtgtagctctaggatcgtctttataaaatggctttgggcaactaagtgacttttaaatgctgtttactgcaaaacttaacccctatattattaccccttgtacccccttgcattaatcatgcatctgccggtgtgacttgctgagtactgtggttgtactcattcttgctctatctttctccccccttcagtaagagaagctttggagaagaagtcttaggtggagtcttggcttataccccagttgagcgcctgtgaagatggagccgtaggcccgctagtccgctgctgtttatttttgattgtcaggccttaagtgcctttgtaataatgtaaatattatcgatataataaagatgtgtcttttatatcatgtttgtatggtgtaccccggcttttcctgggacggggattaatacactagcgttcgggaaaatgcaattttctcggtcgcgacagcgcgcgggccgcgggagagaaaggagggattgggccgaaaggggcccaaagagaggaaggatgattttatttgttttctatttattttaattgatgcaatgatctttatgctattaaaactatttctcgagctccgaaaattcacgaaaaattccggagagtacattagggcacaaagaatattacaaaatattcccggccaatgattttttttaaaggaaattttaatttcctctataatttcacttgattaaattgatttaacttttaatataatttctagaaatgcattattaattgatttttaatcccgaacgaaaatcggggcgttacagtccgactacaacaacaacaggttcgttgtcctgagacctgaggcacctactccaagaagtgaagacttacgacaagaacttcacgagttgcaagaccggatggctcaacttggaaggcggctacaagaccatgaggcaccatcaacacatgctgggggcagatcaagacgatatcaaccaagctatcgtcctcaacatggtcgccgcacattggctcctcggcatacacccctgccagcccaagtgacgaggcaaaggcagacggcgccaccaccacgctggaaccggtggtcaagacgccaagatcatcacgcatcttcacgccctgctcaagaatggcgagttcgaggggctcccccaattcaggcgccgcctcacgctccatcttctccaagacgaggagtccaaatacaaaggtgacaggaaacatatgcatctaccgcagccgcacgacaagttgcgcctcctctcctaccaacaccaccaattccaccaagacttcaacatgcacctaccgagaaccaacgcaagcgggagcggcgtcgcaacaaccgttacgccctctaccgagagctcgaagacttggagctgaaacacacccaagttcgtgttcatccagatggagaagttcgtcaagaagatgagaggattacgttccgcatctcccccaacttggagagagacgcaagatatagctaccttatagctcgcttgaccccaagaccacgaagggtgagacctgtggttgatgaaaagagggagacgacggctatccaacctcgccccgtaaccatcttgcaacgatccaagggtcaagcacaagtttccccaagtacatcatcaccaaagaaccagtttgagcggaatgaatctactccaatggagggagtcgagcaggcaccaatagaacatgttgacatggcgccgcgtcaagttgatgccatccttgagaaagatccatcccccgttcctcccttcggagttaagcaaaagatgggaagcgagaaccgggaagaaacacaagagaatattgtcatgtgcggcgcattagtcgcacactccgagattgagtctagtgctgtgtgggttcctccacctgtcacgcaagaactcacttacccttctgatgaggagattgtaccaaacccaagggtgaatttctccaagacatttcttccacgattgaaccaagttcgttcatggttcagctcagaagactcgagacaaaccactattccgtctcaagaggaggccagtgcttcggccccttgtcttcccattggcataggaaagggatgcctagcccaactaacacagcccaatccctattatcttgtacaaagtctagaattgatcctaggggaccacatcccactcaaaaaccgtggtttagttggccttcttctccccttgcgcgcgttgccctggcgttcgacttcgccgcgcgccgagctgccgcgcatcggcctcggggccgcttgcgcgtgcccaaccgccttggcgcaccgtcgcccgtccgacgcccttagaccgtcgctgccgcaccaatcttgacgacgacaaagccaggacgacctccgccgcaaggaatcgccgctcgacgccgtgcgcacctgtccaaagccaccgccgagtccgattttgattctactcggggtgaatcgagccaattcttgccgcacggttggattgaagatagacggtggtatcccctctcacaattcaaaccattcacccccgagtcggccgttttcaccctcgccgccgccgtgcgtcgcgcccggattggcgccaacacgtcgccagccgatttcacacgcggtcaagccaatccttcaccggtaaatattcaaacgtggcctcccgccactcaaattgatcttgcccgccctctcacaacctctgccgccctagccatatccaaagctcgagctcatccatggcgatgtcggtgcccgagctcatccattcctcccagccctataaataggacctcaatcccttccttgtccatcatcgatcatcaacaaccatagccccacaacctcgaagctctgcttccccaatccattccatcaaccaccatcgcccgtcggtcaaacaccttgtgcacgatcgactccacacctctccatccatcctccgccctaaataccccttagaacactttatatcaactatgttctagtatattagaccctaaccgaagccctgcgttgagttttacctcgctgcaccaagccgagcaccgccgcccccgcgctgctctgttcttcgccgccgagaagtttttccgaccgcaatccttcatctcggcatatctcggtgagttcttatgtttcaaccatctacatactctctagattccattttagcaatccctttgcactatcatgccaccccctgagctgttgacgtgagcacgaccgccaccaatggaggcgctcgtcggcaactattctccgcgtcttgccaaaggacggcaagctgtcggaatccatctaggtgcctcgtagatgctctagaacccctcccctagccatgtctaactcatatcaccttgatcaccatcacgacctaaccgtgccaccgccgccctagccacaacccatccacacatcaaattaacccctccgccgccgctcgccgttgccggagaaccctagctccctcccctcctcggcggcaaccactttccccctccatcgccgccgtaatcgccaaccctagcgccgccggccgattttggggaacagccaaaggaagaagaagagaagagagagagagagagagagagattgacaggtgggacccgcacacagtgccatttcacatttatttgattttcaaactttagaagcccatatcttttaaaatatagatccaattccagtaaaaggaccaatattcttctaaaatcattctctatcttttgagcccctttttcctatttttgtattttattttattttctctatttttcatatttttggattttatttgaattccttttgaatttgaattttatatgtctaaccctaggtcttgaggattcttctgactcaatagataatatcaatcaatctcaggacatcgagcaaggcaagttaccatatacctgttgatcatttaagcctatattttacaaattatttatttatagccttctattcagtactctattttatatgcacaattcaaccatagaaacccagataatttagtattgcttatttctcttacaatctggttaaaatatcttatacttagattgggacagtacgtaagatttggttgatttccgggtgactaggattgtctcgatcgatataagttttgccaggtacttatgtcaaacgaacgggtacgaccgcagtttctagaatggggacagacctagttattatgttaattagcaatatggcacctctgtatagtggttcttatttttaagtcctcgcgcatgaggcaactatagccgcgaaggacgactttaaccattaccatgtacaggtaaatggtttgtgatactcgagtataaactatatggtatatttctaaaccctgatcaagatgacgtggtgtcatacgatcagttccccttaaatatctcgggaacgccagaactcctcttgttgctgttaacaatacgttcagagcatatgaggatataagttcatggaacaggtgccacaattgttaatgacttaatactgggccatgactaaagccgatgattatcagcaagtcgtggactgcggataaagcgtacatctgctgcagtagaatatctttgaaactattcgaatagccgtactcatggaattgagtaacgagactcatatggtaccctggttagaaatctaaagtctatacgttttataaattcttgctataacacttccagattgtttattactgctttttgcaaagaaccctactatatattaattcataacatatttccatgataatttgctgagtattgcgaatacttatccttgctcttataacccctttttcagatttgggtcaagaggacccttatgactattactacgatgaccccgataacttagagaatccctaaaggttatacctccctagtcagaatgtatagaagcttctgctgtgtattaattagttaggtaagtacctattattgtaaaacccttagtattgtaaaactttaacgtatgcaatgaagaaccagctatattggatgtatcaatatttactgattcagggattgatacattaattctagtcggatccaagttgttagttttgagctccgacaaggggagccgcatcatcccgtccccagcgtcaccgtggccaatcgtggaggatctacagcggcagtggcagtgctgtagcggcaaactctcgagagagaaggaaggagataacagtggaggagagatgatgtcactggggtccattgattttttattttttttcatgagacttacatgtaggtcccctgtttgtaattttcacttttattttttctggtgttgtggaaaacgatcgtactggccgattaatcggccgtatatacgttaacggtagtaaaattgttccgttagcatgatacgatgtacaattatcatttgtaaacgtcaaatctccgtttttagcgattagttggccgttttccgtttagtcacccgaataatcgtctgtatgttgtattagatgatgatttagagtagtttttaatttaatttagaattgtttatgttttacttaatttagaattgtttgtgttttactcatttaatgcaaccaattctacataaatgcggtgttaggagatttaatattccacttatcttctaaaacatgaacattaaaatcagtgaaaaccatcctcaaaacaatgaagagagcccagttgcacggttttaatagtcaaaggggacggcatacctgattttacgtttgggagagacgcatcagaccattactcaagggactcaaattggattttttttttctcaagggccaaaagtcactgattgggtccttgaacggaaaggccgtcagatttgggtcgctgtaggcctactgtcttgaaattcgtcctgtattaaaagcataagaaggtcaaatttcggccttgtcgatgtccagtacgggccgcaccgacatcatcggcccaaactagcactaatgggttgttacggataattttgcgaagcaaatcccccctcccctaatatcggagcctccgtcgcaatccattgttgcgatttctgccgttcgggccatggcgatcacacggcgaccggagaatagcagacgagccgcgctatacgaaggccgccgccctggctagtccctaggaaggccgcgcgataggcgcccacctcccaacgcgtcctttccgccagctccaatctgttccgccgccacccgatcgacccaactcggcagtccccaactaggcgacgaggtaaatacacgaaatcccctcttgttgtggttgtacaaatcgatatgcatgcttgtttgggatttcttgcaaacttgaatgattactgcttagtagttttgacctcaagatctaggtaattggctgaagaacattatgttgtccgtcagaatat

SEQ ID NO: 10036 - DNA, 8346 bp, Oryza sativa
ccgcggtggttcatgctctaaaaatctggccgcactatctcattgggaattccttggaaatggtttccggtccttaaaagtttgaaatccatcttcactcattcggacctgaatcttcggcaaaggagatggttagaactcatcaaggattatgatgtgggaattcactatcatcctggtaaggccaacgtggttgccgacgctctaagtcgaaaaagccattgcaacactcttaacgtccgtggcattccacccgaacttaatcaacagatggaagccctgaacctaagcatagttagtcgcggattcttggctgcgctggaagccaagcccaccttgctcgatcaaatccgcgaggctcagaagaatgatccagacatgcatggactcctcaagaatatgaaacagggtaaagccgctggtttcacagaggatgaacacggaaccctatggaacggaaatcgagtatgcgttccagataacagagaacttaaacagttgatacttcaggaagctcacgaaagtccttattccatccaccctggcagcacgaagatctacttagacttgaaggagaaatactggtgggttagtatgaagcgggaaattgcagagttcgtggccctttgtgatgtgtgccagcgcgtcaaggcagagcaccaacgaccggccggacttctccaacctctccaagtacttgaatggaaatgggatgaaattgggatggatttcatcaccggacttccaaaaacccaaggtggatatgattctatatgggtagttgtggatcgattaaccaaggtagctcgattcattcctgtgaagaccacctatggagggaacaaactagccgaactctacttcgctaggatcgtaagtctccatggcgttcctaagaaaatcgtatctgataggggaagccaattcacctctcacttttggaagaagctccaagaagagctgggtacccgattaaacttcagcaccgcgtatcacccgcagacagatgggcagaccgagcgtctaaatcagatcctagaagatatgcttcgcgcatgtgtcctggatttcgggaagacctgagataagagtctcccctatgccgagttctcctacaacaacagctatcaagccagcatacaaatggcaccttatgaagcgttgtatgggcgcaaatgccggacaccgctaatgtgggatcaagttggggaaagccaagtgttcgggactgatatcctgagagaagctgaagctaaagtcagaaccattcgggataatccaaaggtggcacagtcccggcagaaaagttatgcagataaccgtcgccgtgacctggaattcgcagtggacgattttgtatatcttcgggtcacgccattgcgaggtgtacacaggtttcggacaaaagggaagctcgcacctcggtatgtgggtcctttccgtatcgttgctcgacgcggagaagtcgcttaccaattggagctgcccgcctccttgggcaacgtgcatgatgtgttccatgggtcgcaactcaagaaatgccttcgagtgccatccgagcaggccgactcagagcaaattgaagttcgcgaagacttgacctacgtggagaggccagtgaagatcctggacaccatggagcgcaggaccaggaaccgggtaatccgtttttgcaaggtccagtggagcaaccacgccgaagaagaagctacctgggagcgcgaagacgagctgaaggcagcccatccagatctcttcgccagttcttccgaatctcggggtcgagattccgtttaaggggggtaggtttgtcgcgtcccaaatcgactctaaaatacatcctcgaaattatgcaaagaataagtaaaatccatgtgaaagcctccaacaattaaaatgtgcaaagctaaaagtcaaataaggcttggaggatttttgtatatttcctaaaagcctaaaatgcgtaaataaattttagtggaattttcagagcacaaataataattaagaagaaataaacaaagttaaagtggttttataaaaagaaaaatccctaaaagtcctttttccccccttcctctcttgggccggctcggcccagctccctccttctctctcctctcccccgcggcccatcggccttcccccgcgcgcgcgtcgctgacgggcgggcccgcccgccaccctcgctgacgggtggggcccacccgtcatcccctacctcgcgccgcgcccgccgcctcgcccgtgccctagcgccgccgccgccgcggattccgccgcatcccgccgcccccgcgcgcaataaagagggggaaatcactccccgtgattccctccctctttccccccacttttccctctctctctctctcggattcgtttggaaatcctcccgcaaacttcgccggcgtcattgatggagccgagatcgccgcgccggtttccttcccctccggccgccctctctcactcccaacactatttaagcactccctgtgcctccctcctccgtttccgacccttgccgctttctttccccgtcggaatcgagctcgcgccgtcgtcctctctctccgccgtcgccgccgagcttcggttcgccgccgtcgtcgccccggacctcctcccgcttcggcatcgcctcctttggcttcgccgcgtcctcgtcgacctcgtccaccccttcgtttcgcccgccgaccgccggaacgccgccgtcctcgtcgacccgagccgcgccgccgcctctctccgcttcggtcgccgttcccgtcgtcgcagtcgacccggggtgagccgaggaccgccatttcgcttcccccttccctcccctctctcgggcgccgctccgtcgcgccggaggtcgccgccggtgaccatcggggcgcgggcgcgccgcctcccgtcggccgtgccggcgaggccgccttcgggcgcgccctgcggctgccatgtggggcccggccgtcagccgcccgcgccctcgggtgcggctgacgcgtgggacccacggcgccggccggcgcaagccgcgtgcacccggtccaccgtggaccgtgaggctgccgcgtgggccccactcccgtggacccggtccgcgcgcccctcccctcggctgacgcaataaatccgattttaaattaaaatttaaatgaagaaattcacaaatatccatttaaagagcatataaacttcaaatggccatatcttggccatttgaactcggaattggaccgttcaagtctctaatttttccttaagaagtcaagaacccatttttgtgctttgtttctgcttgttatatggagttgagtagagtaaaagccttttcttttccgttggtcgtgtagacgctgcagcttcggaagatccgctcttcgtggaagttgaagccggcgtttgggaaagcgagcaaggcaagtcacatcatctttgaacatattgattccccgtttgtaaaattatgttgatttaaattattgcattatcgctttatttaaattcccgcgttatcactgttttatttagccatgcctatttacctttgttatgaccttattattgttattgttattattaccttgttcaccctagaataaacaaaacaccaactagtggacactctactcatggtaccactagtacgattataggtagatgcttcgcttttaattaggtaacattaggcggttttacaactctagactttgggaatattcatatcacctggacactgtggaattgttggagtattgtggaattggattcacaccgccccctctattcaaaatccccaaaaatggtttaggctgggctcggggtgcatggttttgatagtagcacctcggccatataaggaccggtcttcgggcctctgttgcaaagcactaccgtacttccacatgtctagtgggtaaggcttagtttgtggctcagtctagttataaacaaaagtacacggatggaggtggatgaagtcgggggtcgatggacattctccagggcaaatgaaggctacacgagctgcggcccggtagtcgagatgtcatggcacagggccggtgtcctgctgctaggggctcagtcctgcctgcctgtcctgggggttccggccgtaggtgggattgggtcggtactcttgtctatggctaggatgggttggaaactatgtcacgtgttccgtctgtataccgtggtggtatgtggcacgtggttacacgtgaggaagatgtgtcttgtgggtaaagatgtacacctctgatcagagtaaaatctattcgaatagccgcgccctcggttatgggcaagccgagcaatgtacccaagttagtgttttaattcttaaaacctgcttaacaactaaaatgtggaatggttggcctgggttggcttgggacgagctgggacccagggtcgggttgccagttcggtctgaatcatcgtaggccttgggttaaggcaggttcgtgtgggttcacggccttgataaataatattgtttagttctagaatcgtgtttacaaaatagccctgaggaactaaatatctttaaatgctgtttactgcaaccctaacccctttatggtataactcctttgtactcccttgcatttattctgcacttgtgggtgtgtcttgttgagtacggtggttgtactcagtcttgctcaatttttcccaaccccagaagaggagttccaggaggatgaaggcttcggtgtctagctcgtgcctgccgtcaagcgcctgtggtcgtcgccctagtcttccgctgtttctcgtttgtctctgtgtgtgctgggccttcgttgcccatgtaataagttatctatttacgcttccgcttgttaaactctgaattgtatcaacttttggtgtaccttgcctcctgggacaaggattaatgcacgcacgtaaggaatgcccgttgggttatttccggtcgtgacaccttgcaggtatcagagcccccttgaccctaggacgagccgtagatcccaagccttagcaatattttcgaaataaaaatcctttgtatttgtgaaaatcctcgtctctctctatcttgctgcttcatttatcgccaaaatctgacctttaaaatgttgcttttctttttgtttttgtttgtagatggccggcagcgtcacccgtcgtggtttggacatgactggtttcgtcttggagctgcggggcatgtgcgtggccctggggtatccacacggagtggactaccaggccaggccgcttccggagcaggagggtgacgatgcagagccccacgctgcttgggaggtcactgcagtgatcctcgctggctctcccgagcggacttcgctgacagtcaccgcgggtggagactctttccccgccgcttgccagagcgccgctctcctcgccatcggcactcttcaccagcgctacccggacgagttgcagcactcgccctaccgctaccaccctcgtcgcggaggagcccgcgaccacaccaccttccgggatgctagctcggaggatgacgctaccatcgtgcacctggcgcgcatggtggaggcgtacgacgcggctcgtatcgacttccatcagatggtgcgccgtgggatggtcgaggacaacctgaagatcctggagctgcgtcaagagaacctgcagctcaagaaggacctggacgcagtggaggcgcagctgcatcagctcaagatcgcccagggagagatctgccgccccaagcgtcgccgcgtctgccgcagcctgaagatcaccgcccgcaagagcacctccaggcccgagcttgttcgtcagtccctggcgtggacttgcttcgtcgagacccctcgtgccgagcccgcgcccgtggttccccaggagggggaagcctccggcgttggtagcacggaggatgcgctgttgctcaccttctgtcctggcccgtcgcagcagtagacgagcatttagtaggcttgcgcgtgtgttcattctcgtttgtcttcttgttgggttgtgtggggcacggttatgccggtgtgtggtgtaactgtgtcggagcctgtctttattttattcgcctaagcaacttgaactttaatgaacccatttaatagcagtaataaatttaagaattatggtagtcgtgggtggttagctttaattgtcagctctctctgtttgctggttctgtgtggggttttcagatggtgatgaccagagaagtgctaacaccggtgatggcaaccaacctgaaggcagcaaccacaaccatcagggcaacccacctccacctcctcctctgcctccaccaccaccaccagacaccaacgccattctcacccaaatcctcgcccagcaggccaacatgatgactgctttcctccaccacctccaaaatccgccacaacttaatgctccaccaccacccccacaacactctaaactcgccgagtttctccgcatccgcccacctaccttctctagctccaacaaccccgtggatgcgttggattggttgcatgccgtggggaaaaagctagacactgtgcagtgcagcgatgaggagaaagtcatcttcgccgcccaccagctgcagggacccgcatctctatggtgggaccatttccaggctacgcagccagagggacagcctattacatgggctcgcttcaccgccgttttccgaagaacccatgtgcccgccggagtcgtggcccttaagaaaagggaattccgagagtggaagcaaggcaaccgctccgtgatggagtatttgcacgagttcaacaacctggcccgttacgctccggaggatgtgcgggaagatgaggagaagcaagagaagttcctggcaggaatggaccctgagctgtccgtccgtctagtctccggggattatccggatttccaacgtctggtggacaagagcatccgcttggaagccaagcacaaggaactggagtcgcacaagcgccgcttggcgaatttccgcaaccaacagggtgctaaccaaagggtccgctacaccaatccctatccagggggatcctcctcgcagcagcaacaacagcagcagcaacctcgctccgcgcctcgacctcaattcgtggtgcgcgtcccacagccgcagcagcagcagaatcaacaagggactcgtgcgccccgtcctcctccaccgactgtgcagcctggtcaaggccgcagggacgctcaaggtccgcagcgtctgtgcttcaactgcttcgagcccgggcactttgcggataaatgcccgaagccaaggcgtcagcaaggccaagcgcctccccgccccaacaacggtgttaaggacgtcattcggggtcgtgtgaaccatgtgacggccgaggacgtgctgacaactccagacgtcatcgttggtacgttcctcattcattccatccctgctaccattttgttcgactctggagcttcccactcgtttatatctgtgccattcgtggggagaaatcagttgggggtagaaaggcttagaaaccctctgctcatcaccacccctggaggggttatgacagcaaagtattatatccctgccgtccctatagaaattcaggggattccttttccctcggatctgattctgctagacaccaagaacttggatgtgatccttgggatgaattggttggctcaattccaaggagtagtggattgcgcgagacgcactgtcactctgtaccgagggccggaacaaccggttgttttctttgcacccccaacctcagtcagaagttcagaacttcatcagatagaactgtcagaaattcccatcgtcagagagttcggagacgtgtttccggaagaactacctggtatgccgcccaagcgagagattgagttccggatagatcttgctccaggaaccgctcctctgtacgagcgaccctaccgtatggcagcaaatgaactggccgaagttaaaaaacagttggaagagttgaaagaaaaggggtatatacgtccgagtacttccccatggggtgctcctgtgatttttgtggagaagaaagacaagtacgaagaggatgtgcgttgactacagagctctcaatgaagtcaccatcaaaaacaagtaccctcttccccggatcgatgatctgttcgatcagcttaaagcgtgccacggtattctccaagattgatcttcgttccggatatcaccaattacgtattcgcgaagaatatattccgaagaccgcattcaccacgcgatacggactgtatgaattcacggtgatgtcgttcggtttaaccaatgctcctgccttattcatgaacttaatgaacaaaggatcatggaatacttggataagtttg

SEQ ID NO: 10037 - DNA, 9853 bp, Oryza sativa
tcaagaggaggccagagcttcggccccttgtcttcccattggcataggaaagggatcttcgtccaaaggagatcaaaatctccagtcaagctgcctaccctcatcggtacgtcgacatcacaacgcatcttccccaagaccaaagtgatctagcacaagttgcaagtcgacctggtgctaatactcgtgtgaagtccatcgcaatcagaagtgttgaagaagttatatctcaggcaagggaagagcaggaagatcacattaaggatggagaacttaccgaaccagaatcatcatcatcatcagcatcctccttggagatgaaccttaatcctcttcattacaatgatctcaacctgtccataccttcggatggagaacgttatccggctaactttgatagtgcaccggcccatatggtagtagatggagaaccgaagcaagatgttgtggtactcccggggcaggacattaacccacctccgaggaacaacgcgagtacatcaagagtaccaccagcaagcctagaagaacaaatacaagagcaaagacaagtggtagatcagttaacggcgaaacttgaccgcttcatcgacatcatgacgacatctacttcaaacccaccacgtgttgacatggctccggccattatagatccgcaaattgaagaattggacgccattgcacaacatccaacacaaacccatgacgcccgacgttctacatcaagtgcacatccttgacacctcaacattcccgctgcctctgctccagctcccaccacattgaaagactatcatgacatagttgaagacctggtgaacaggcggttgaagcaaatctccatcgagcaaacacccagaccaatggagagtgagctcgaaaagccatatgaagcctggcatgatttagttgctttcccggcaaggtggcacccacccaagtttcgtcagtttgacagaacaggcgatgcaagggaacatcttgcgtacttcgaagctgcatgtggcgacactgccaataactcttctctcctcctccgccaattctctggatctttgactggccccgcctttcactggtacagtcgcctccctacgggatctataaggagttgggcaagtatgaaggaggtgctcaagaagcactttgttgccatgaagaaggacttctctattgttgaactatcacaagttcgacaacggcgagacgaagccatcgatgactatgtcatccgcttccggaatagcttcgtgcggctcgcaagggagatgcaccttgaagacgcaattgaaatgtgcgtccatgggatgcaacaacattggtctcttgaagtgtctcgacgtgaaccaaaaacattcagtgcgcttagctctgctgtggcagcaacgaagctcgagtttgaaaattcaccacaaataatggaactgtacaagaatgcaagcgcctttgatcccgccaagcactttagtgcaacgaagcctagcggcggtgggagcaaacccaaggccccagctgaagcgaacgtcgcgagggtcttctccaccgcacctcaaggtcaagtgcccatgctcggggcaaagaatgagcaagctagaggtaggcaacgcccctctattcaagatctcctcaagaagcagtacatcttccgccgggagttggtgaaagacatgttcaaccagttaaaggagcatcgtgccttgaacctgccagaaccatggagacccgaccaagtaaccatggtcgacaatccattatactgtccttatcacaggtatgtcggctacgccattgaggattgcgtcgccttcaaagaatggctccaaagggcggtcaacgagaaaagaatcaatctcgatgcagacgccatcaacccggattaccgtgctgtcaatatggtatccgtcgaacccgggtcgcgggaacaagaaggagccgacatatgggtaccactcaaccaagttgagcaccaaattgcaagaatgatgttaacgacgactccggcagctcatagggaggtcacccatgacaccaacaagaagatgtggaatacggtgcgacgaaggcctcaatttacaggccctccacctcgtcacccacagatgaagccacaaccccgtactgccccaacaacaagaagatggccagacccaagtcggcgacgcctaccgccttgcttcgtccccttctcgaagggagatgaatcctttcctcgccagggtcgtgagctacctactttggtgcagtttctgcccaagaattgggggcaagcatcaccaataagcacgaaggaagccgaagaggtcgccggctctaccccaactccggacgtggtttcgtgtaacgtcgctccgtgcaacgtcgtgctcacctacaacgacactacgggcgctagctctgatgacgtgttcaccacaagggagcaagaaacgctccatgccaagtcagatcagacgagagtagaagaagcccacatgaatctgcgagggggcaaaaccttgccagacccacataaggccaagccatcaaaggtagataagcctatcaaggaagcatctcctccaggagaagctccagaaacaaaggctaggagcaaggagaaacccgatattgactataatgtccttgcacatctcaagcggatcccagcactgttgagtgtttatgatgctcttatactggtaccagatctacgtgaagccctgataaaggcgttgcaaactcctgaagtctacgaagtcgacatggctaaacaccggctcttcaacaaccctttgtttgtgaatgaaatcacattcgctgatgaagataacatcattgaagggagcgatcacaaccgtcccctctacatcgaaggaaatatcggtcctgcgcatcttcgacgaattctaatcgatcccggatccgctgtgaacattctacctgtccgtagtctaactcgggctggtttcacaacaaaagacttggagccaactgacatggttatctgcggctttgacaaccaaggcaagtcaacactaggcgccataacagttaagatccagatgtccacattcagcttcaaggtgcacttctttgtgatcgaagccaacacttcatactctgctctcttgggacgaccgtggattcacaagtaccgtgttgtgccctctactcttcaccaatgcctgaagttccttgatggcaaaggggcacaacaacgcatcgtcggcaactcctcctcgtacactatccaagaatcgtaccatgctgacgccaagtactactttcctgtcgaagaaaacatgcaacagctcgggcgaacggcaccagcggctgatgttctaatccagcccggcaccgcaatgaccccggaggtgaggcgcctcatcatgtcatgttccccgatcatcagcaagtcttcgtcacggaaccgcaagtgcaaccgtaggggaaaatcgtccctaccagtcgatcttgattccaagcttccatcccccgctggagctagtgtttagacactgactactgcaccaatattactcaaagcaagacaccctacctcaacgcccataaatttgggagcgggtactcacaaaggcagcaagttgcctaaaagcgacgacaatgcgccaacaaccatcactctgcaggcaaggcggacaccaaacaaggaagccacgcctacgcgatcaggagtggtcaagaagagagtagcagaaatagaggaagccaaagcgggtgttcaatgtatgcagcccccggcgctctacacttccgtctctaccccgctagaggtatgggcaattccagatccatctgcttgtacacctcggaccattctctacaaggtcccacaaattcaagaatgcgattctgtgattgaattccctaaacctcactctgatacagaggaagcatgcacaaccatgaaggctgagcctagaacggctcgcctactgcagaaggcgggcatcaacctacggtgaaactaccggctactaccacctccagcgatatgtgaggactggtgggcacaagcagaagactttatcaagagaaaatgtaaagagcaaccaaagtacgggctcggttacatcaacacagatgagaccgatgacgaagatgaagcacttgatgatcacacattccattgctgcactgcaagtgtcactacaatagctgacgctcaactaccacaacacccgttccaggtagcagcagctgaagtcgaagaagaactcgacaccatgcaagcacctcaacaactcgaggatggcggtcagccaactattgatgagttggtagagatgaatcttggaaccgaggatgatccacgcccaatattcgttagcgccatgctaacagaagaagagcgagaggactatcgaagcttcttgatggaataccgggattgcttcacctggacatacaaagaaatgccaggacttgaccctcgtgtcgccacccataagctggcgattgaccctcaatttcggccagtaaagcagccgcctaggcgcttgaggccggaattccaggaccaagtcattgcagaagtcgatagactcattaacgtgggttttatcaaggagatacaatatcctcgttggctagccaacatcattccagttgagaagaagaatggacaagttcgagtctgtgtagactttcgcgacttgaaccgtgcctgtccaaaagatgacttccctttgctaaacacggagttggtggtcgcttcaacaacagggtatggtgcactatccttcatggatggatcatcaggctataagcaaatcaagatggatccccttgatgcttccgacacagcgtttagaacccccaaggggaatttctattacactgttatgcctttcgggttgaagaacgcaggtgccacttaccagcgtgccatgcagttcatcctcgacgacttaatccaccattcagttgagtgctatgttgacgacatggtggtcaagacccatgatcctaaacgtcaccaagaagacctacgcgtcgtctttgagcgactgcgccgacaccaactcaagatgaatccccttaagtgcgccttcgccgtacaatcgggtgtcttcctcggcttcgtcgttcgtcatcgagggagattgggaaagtgggctctactcatgatggaatatgatattaccttcgtactgcagaaagcaatcaagggccaagccttggcggaattccttgctgcacatccggttccggatgattccccactcgtcaccgacttgccagacgaggaaattttcagcgtcgagcttggaacaccgtgggagctttacttcgatggagcctcacgaggagatgtcaaccctgacgacacccctcgacggagagccggagcaggattagtgttcaaaactccacaaggaaggggtgatctaccactcattctcccttctcaaggaagagtgttccaacaatgaggcagaatacgaggccctcattctcggccttcttttggcactctctatgaaggtacattccttaagagcccatggagattctcagcttgttgttagacaaattaacaatatttacgaagtccgtaaaccaaaactggtgccatattacacagtggcccggaaacttatggacaagttcgagcacgttgaagtcgtacatgtgccacgaagtagaaatgcaccagttgacgctctagcaaaactagctgcagcgctggtctttcaaggggatgatcccgcacgaattgttgttgaagaaaggtggctttttccagctgtcctagaactcatccccgaagaggttgaaaccaacaccatcaccacagatgctgttgacgaagaagattggcgtcaacccttttttgactacttcaagcatggcagcctacccaaagatgcagtcgagaggcgccagctacagcgacgactcccctcgtacatctacaaggtcggtgtcctctacaagcgatcttacgggcacgaagtcttacttcggtgtgtcaatcgaaatgaagccaatgaagttcttcaagaagttcaacacggagtctgcggtggacatcaaagcgggccaaagatgtatcatagtattcgattagtggggtactattggcccggcatcatggcggattgcctaaagctaaaacttgtcatggctgccaaatccacgacaacttcaagaacaaaccaccagttccactctacccgacagtcccttcttggccattcgacgcttggagaatcgatgtcatcggcctcatcaacccgccttcctcaagagggcaccatttcattctcgctgccacagactacttttccaagtgggcagaggccgtaccactccgagaagtgaagagcagcaatgtcatcaacttcctcgagcgacacatcatctaccgttttggcgtaccacatcgtattacctctgacaacgccaaagctttcaagtcccagaagatctacaaattcatggagaagtacaagattaaatggactactccaccggttattacccccaagcaaatgggatggccgaggccttcaacaagaccctcggcaagatcctcaagaagacggtggacaggcatcgaagagattagcatgatcgtctctatgaggcgttatgggcgtaccgtgtcacagtctgtaccccgacacaaaccaccccgtactcccttgtctatgggagtgaagctgtgttaccattggagatccagctaccatctgtacgagtggcaatccacgatgaacttactcgagatgagcaggttcgccttcgattccaagagctcgacgccgtagaagaggagcgcttgggcgccctacaaaaattggagctgtatcgccagaacatggtgagagcttatgacaagctcgtcaagcaacgggtctttgggaaaggcgagctcgtactcgttctaaggcgccccatcgtcatcacgcacaagacgaagggaaagtttgagccgaaatgggaagggccgtacatcatcgagcaagtgtatgatggaggtgcctatcaactgattgatcatcaagggtcgcggccaatgccgccaatcaatgggaggtttttgaaaaaatattttgtgtaaacttcgtgccttttgtttctaaaaaaatatatgggcttgccaacatgcactaaccattgcactgcttggcacccctttcttttcatttttacacggacatcgtgtccaacaaaaattcaaaaaatggctttccccatgtcacgctgagctggtatgtgaagacttggctacctcagaacctcttagcaagatccaatgggtgacatgactgactacgcctacgactaaacatcctccacaccaacacacaagtacaattggtgctcatcttcatggggcaacaaagacttgcttgggttacttctcagtaacaagttggtccacatgctctcgtgccctccggtgtgcttcagacccatggagatatcaagccccagggaagactataggagaagagcaagaaagggctacctacctcaacacaagttgtggcctagtgtgcagccacttgccattcctgtgaggtgtgtcaacaggggactttacaaaataaatcggcttgcgaggattacgtagcccacaaaggggaatggttatcctccaagttctaaggatgccaagatcctagatcaatctcaacgaagtcatgatgatctcaactcaagaaaacaatgcaatatcaatctcaatgaagctgcggtgttctgaagccacgaggcaaaaaaaaaaagaaacaaaaggagaaacaaaaatccaagcaaccagttatctccactgcattctgtcagaaggaggaggataaccattcaccatcctcagcaaaaggaaaaggccgctctcatagccattcccctaaaaccctctctcaatttagccatacctaaatctctcggttcgatgaagcacaataccgggggcatgaaactcgtgggtggtccagtgacaagaaaggctagagcatggattttcgctgccatccgaaaatatcaccgcgtatactactccaatgcacaaacacaacaggaagttaagttgtcagacggcaatcgtcatggtcattcagcggttctgatgactggttctttggcaatctcgtctgaaactacctcatagccagtgttcagtgggaaagccaacattttttttaaaaaaaaacaaaaacatcaaaacccttttcggtgttgggttccgctcttttaaacccgcctggttgcgcggctctagcaaccatgctcgatttcttttatgtgatgcaggattttcgcttcacatctctcagagacaacacttcgctctccaaggcaacacacgtccttttctggcaagtcggaatcgcagctgccattcggtcacatccggattaataaaggacactttcgggagcagtccggcgcaccaccacggttggtgcttagctgcacacctttcaatttggcggatcggcatcgcattcatcaggcaatcacgtccaaatcgataaaactatcttcgggagcggggtggcgcaccaacgctgttagcgtcaagccgtgaaacccttcagttcggcaagcaggcaccgcgatgtactagcggtcttggccgtacgcctatagtatacgtatacgtgtatgtataccaaataatcctccctaggattaaaccaacggcaagcaaaggctagtacatgggctgtatatgggccggtggatcaatgctgcatgctcatcgtacatatgcggctggataaccacgcgtacacacgtacgtgggcaggatttctcgccaacggcaagttactgatgcggagataacgtcagtcttatccggtcatctcgatctgcagcaactgaacccggaagagccggatcgatctaacgctcggccgcggcggcgccgagggattcgtagtgtgggttagggctccctgcgcctataaaaggagaccatcactcactacacaggagacgcacacagccatttcactctcttcacacagccatctcagtcatctcgacgcagccatttcactcctctcttctcacacactcactgacgtagcctcgccggagcagccgagtgggatcggctcgacgggaggagactccgtcaggaacaggagtggtgcacgtcgacggctgctcggcggctggaagaactcaccagcgacaggagtcggcgtcagatcgtcggcgtcagatcgtaggctgtctcctccctcacgtattctccgttgctgtcgttgccggcgccgtgtcattcacattgccgggggctgccgtggagccgatggccaagcctggagaagagcacgccatctgcagcaactatggcaaaaatcatcacacgctaatgtttcacgtgtgcatgcatgctactatgcacacagtgacaagcaaaccaacaaaatggcttattgctaagctatactcatttggccatgaggatgtgtatcgttatacactaatttctcaagtgcaagtatagttcggtggtctgcatcgaccatctcctactattcctttctttcctaatatgatcccgatgcaattgctatgacgtcgagccgtccaagctacgcgattccatgcatatcttcttcaagcaatctacaccgacacgtcgttcaagaccgacgaggctagatgacgagggcgggcaaagccgacgctaaggctacgtcaccaacaacggtgcacggaccgacgaggccgtggatcgctgccagcgcccacatctacatcaccatcacaaccatgcatggagaatgcgaagcgaagacaatgagacgaccactagcagcttaatcggaggttctctgcaggcctaaactgcggaggtaattaaccgggagctttacgaggc

SEQ ID NO: 10038 - DNA, 2835 bp, Oryza sativa
  unsure (1)..(2835): unsure at all n locations
cagaaatgtcatcaagctgccatcatcgtcgttgctgtgatgccgtcgtcgccatcgccgtgatgccgaggcgtcttcaagccgacgctctcgtctacaccgccaggcgatggagattgctgtccatgcgatcccgccggaggttgccggcaagccatcgtcgttacatcggtcttcgcccatgccgtccaatggagtggagtcgccgtcaaccgggaggccatgacatccactttgtcatcgacgctctaaatctcgccaacctcgtcgagccgccagtgacaccgtctgccgaaggccatctcgtcggaagacgccttcgtgccgtcatcgccgcaccaccgttggactctgagcatgtctcgtcattgagactccgccgaccggcaacactttcacgctcgtcgcggtatctgaggcgctgctgatgttcacttgatcgtgttcgacggtgctgtctcctccctcacgtgttctccgttgctgtcgttgccggcgccgtgtgattcacattgccgggggctgccgtggagccgatggccaagcctggagaagagcacgccatctgcagcaactatggcaaaaatcatcacacgctaatgtttcacgtgtgcatgcatgctactgtgcgcacagtgacaagcaaaccaataaaatggcttattgctaagctatactcatttggccatgaggatgtgtatcgttatacactaatttctcaagtgcaagtatagtttggtggtctgcatcgaccatctcctactactcctttctttcctaatatgatcccgatgcaattgttatgacgtcgagccgtccaagctacgcgattccatgcatatcttcttcaagcaatctacaccgacacgtcgttcaagaccgacgaggctagacgacgagggcgggcgaagccgacgctaaggctacgtcaccaacaccggcgcacggaccgacgaggccgtggattgctgccagtgcccacatctacatcaccatgacaaccatgcatggagaatgcgaagcgaagacgatgagacgaccactagcagcttaatcggaggttctctgcaggcctagacctgcggaggtaattaaccgggagctttacgaggccccaggaaccaggagaccacattgctcaagtcagatatgtccaattacaggctatgaagtgcgtatcattatatgggaatttgtatttataatccttgagattaataaagtgcatgttccctatgttttgtttattgtgtacttagttacactggcacgcctgcacatatacatatctctaaataaagagatcatagacgttattttccaccctaaacaaattggcacgcccggtgggacctggttctcctcccatctttgccgcgcttcagtggtcgtcaaattcgtcttcgccaacatctccaaccatcaccagcatgctgcatgatgatatttggtgtgaatatctcatgactaaggtctccttgcaggaggaccttccatcatcgagaacactccgatgccctttgtgatccaatttgggtcgcaaccaccagcggcggtctttgagtatggctccaagatctattttcagcaagcctaagacacggcttagttccaagagatccaagctaagaagcagcgcaagcgtgcttctgccaaggctaagaaggagcgacgtgccctcatgcttgaagtccggacccttttgaaggagttcgttgtagctgagatcaagggagacatccaggctgcgcaaaagctgcgcacaaaagcggccaacaggtgttcaagtactgcatccctgcgcgcctctactccgacttttgctccaaagccaccctccccaactgtgcaacatatggaagtggggttgcttgaagctttggaagccgtctctgacaacctacatcgacacatatcccatgctcgacacatggatagtccacatcctctgcgcaactacaggaggaagtaccacaaggtgcagcgtctacatcaactggttagttcgcgcatcgcccagagttctgtcccggaggaagattggtctcttgacacatccatcctcatcggcaaggtgtgcaaatatccgagcatcttggaaccaccctatgacttgttccctgatgaatgggcacatgagccaaccaagatcaaggagaaagtcaggcgcgccatcatgaaggagtattggaagcggcgttatggggagcacattctccttcccggaccaacgatctccttcgactacaacacatacgccccttgccagcagagcacatgggagccatgcctccacttgtncgnggtaagaagatcgtccgtgtcacgcccagaaattagcccaaatttgcagactattttgtgtattaaatccctgtccaggaccagccaaggtacacaaaacgacaagtgatanacagttccaaacgtaaataaagcgtagaatacttacagaagaggcacttagtcctcacaccgaaacaaaagcagcagcagcggaaaaaggcgatcctagcggggcttcagctccactccacaggcaaaactcaactggggtctgagccttggtcctctaactccatcttcagctcagaagcactacactactgaaaaggggaaataaaagcaaaactgagtacaaccaccgtactcagtaagccacaccaacgatgtagatgtgcaaggggatacaaggatggtttgtagctatttgcataaaggcggttgtaaaacattttattgagcaaaccagtaaaactgttgagtaattacagtaacattaaatctccactgatcaacgctacaccatgttgaacaggcccaaccaacccacct

SEQ ID NO: 10039 - DNA, 983 bp, Oryza sativa
gactccaagaaggtgacttgtaaccaggttaggatagaccgactttcggtaggggtgttagaggtaaacggacttgctttcctccaggtcctggcaaggtgatggacttttcggcacaatctatctgtcctttgtgcttagccaaccaatccatccctaggatgatgtccaagctttgcgagtctaggactatcggtttggctaggaagtcaacttcctcaattctaaggttaacttccgggcatacttgagttgcccttatattcctcccaggggaatgtactatcattggtaaacgtaaattttgggttttccaaccatttcttttcacaaaagcttgtgatatgaaagaataggaagctcctgaatcaaacagaactatcgcgggtacggagttgacagagaacatacccatcacaacgtctggagcatcctgagcggtttcagcttgaatgtgattcacccagccccgaccaaagttgttggaagcacgtgaaccttgtccacttgcctgagagctaggacgagatggagctaccgcgggagtaggagttctggcagtgctgccattcgcatgccctgagttggtgttggtaggattctgagggcactgtctggcatagtgacccgtctggttgcaccggaaacactgaactgttgacggtccctgcggtgacttgaaagaggtaacactgtttggcgcagtattgccactaggggcacgctgctgtggctgaggtgccggacggttcatctgaggacgaggggtatagcctggctggcggttagcttgagtgaccgactggtggtattgcatgggttgaccgtagcgagggcgaggtgcgcctcgggaggaatttccctgatggatagacttgcgtttcttgtattcttcggtagcctcttttccggcattctcaagtagaagtgcgttgttgatcatatgttgaaaagtggggaagtcatgagcaagcaagtggagt

SEQ ID NO: 10040 - DNA, 18372 bp, Oryza sativa
  unsure (1)..(18372): unsure at all n locations
aggtgcgaatttttgaatctcaatgtggatcactcactcagtatggcatgaaatacatgagagcatttgcaaacatatgcaacaacggtgtctctgaggccaaaatgatggaagcaagtatcaacgcttgcggccgttacaactcggcgagatggagcccaatgactgaaggaggacacagtgcttgatccccggctatatacaggtaaaattgaataccaaaggccccggaggtttgcagacctcatttgtgtgaacttctgtatataccatggagacaacaatatagctagcgacccaacaatatggccccttgtgtgatggctaatcagtaggtgtcatatgcttgttgtacccaacaatatggcttgtgtgtgatgtggccctctgtaaattactcgattagcaatcgatccaagaatgattatgaccaaatatgtgcatgatgttgtcttcagacttgataataaacaagtaggccaattattagtggacgaaaaaacgatgacccaaagtaaggtagtgctgctccgatagccctaccaagatctcgcttacatatctattgctggaaaaatgatattacaagcgatatgaagctcttgccaacgtcatgcaagcgaagctctctttacaagtcattctcagtttctcacacagaatgcgaggactgaaactgaaactccttccagacatcaaacgaagctagcctgcagtttagagtgatacatcatgtttatatcaggttagtgaagcttgcatatggaatgaaagataacgtgccagaggagcagatacagagattctcctactaatttatgatctagtagtggtctctccaaagacaacaaaacagagaggatttccaagtcaaggggcttacatgattttctaaggaaagagatgaacaccacgaggatcgccagccctgccaagatgcctacgattattgccacagtccgcccgacgtcatcttgcgaataatctgcagcacaaagcctactattatcaccagaatccaaaggaaatcagacagagattagagtagcacggcacatatgtacaggactacaaaaagcagagtcacttgcagagtgcccctttccgttttgtttatcgcgaatatattcagcatgggaagtggttgagtggctaaggcgctaagctaagcttatcagccgccgctcgccgtcctaaataaatttgatatgcttagattgattggaattttgtttagtggccatcactgggtcagagaacccctttctaatcggtatatccagtacaagaaaagcagtggacaattatctagcttacggtttaagcactgtcctgtaggaagctctttgcatccctgcacaagagacgttgaaggaaatacgaatctcaggatatttaacaagtcagctctgttggatcagagagaataatttgcattgttagtttgttactgtcccttgacatcaacttttcagtactagaatcatctttattactcttcctttttctaggatcggaaagaatagccccttttgttactgccacttgatcatctggtattctgattaatgctgatgtcccaccaaagtgagtctaatgatactgtcatttgcatgcagtccaccagaaaagccgaggtgattagccgtgcaaattttattagagtaaatttacaanacaacttgtgttttatggttcaagttacagaaaaccacacatattttgacacttggcacttaagtacatatattttagtagtttaatttcacaaaatcacactatcgatgaatgaattcacctgtgagatgatgtggttgttccatctaggatgaggacgtggttgttccacactcgaagatgacatgtcctcgtcttaggtgaaacagtcacgtcatctcgcgggtgaatccattcattgatagtgtggttttgtaaaactacactaccaaaatatatgtacttaagtgccaagtgtcaaaatgtgtgtggttttctgcaacttagactataaaacgtgtagttttgtgaaatttactcttttctttattgcaggaaaatgactgaactgtgtcgttggagcttcctgcatatatgacactgacactgtaacttagatataagtctgtaagttatggggggttgttggcttacaggcagtagtctatagccagcaagctaaattttggtttgtcagtagcgtggctgccttcaatcaagtgattgctctcgtccttagctgagcaagctgagcaatttgatcgatagccataggtggctaaataaatttaactatatgtagtttacccattctaccttatctctctatcaactttggtaagtttacccattgcccatcggaatcaattcccgtcacaacttgctcagctaaggactctccatactgtactttacacggttaaacttacaccatctaaccgagatagcttaggacaattggcaacttgcaaatggtaagcttgatcacttgatcaggataggttgctggagaattggttcgggttcttgctctctgaaacgcaaggctgaaaaattcttattcgtgttgcactattgggcgtaccttgtgacgggcggaagtagaagccgttggcccagtacctgacgtagcactgcgcgaggtacacgtcggcggccagcgacgtgccgcaggtgcccttgagctggccgaccgcctgcgcaaggcacgtcgtgcagtcgccggcggcgaggtcgccgaggcactgcgacacaccctgcacgttgccggagctgctcaccttgtacccgttggcgaggccgccctggagcgcggcgaggacggcgtcccggttcttgaggaagtcgccgtcgccgctggtgctggtgctgcacttgcggtacaccatggcgttgtcgggctggccgacgaagttgctgctgtcgtagcgcacgtagcacccctccagctgcagcgacgccgcgtacgcggcggcgcacacctcgttgagctgccccacggcgtcccgcacgcacgccgcgcagtcggcgttgcccaggtcgccgcggcactggtacagcccgtacgccgccgcgccgtccccggtgccgttgctcccggccgtgaagctgttgtacccgccgttgggcgccgcgttggcgatggaggcgaggagcgagttgaggttgccctcgaacggcgtgcccggctggtacttggacggcgagcacccggcgtagatgaacgtgccggtggccgcctcggcgaccgtcgcgccgatcacgacgagcacgacgacggcgtagcaaagccggtcgagctgatgcatgactgaactgacggctctcgcgctagctagctgctggcttgaagcgcgctacgcaacgcccaggcttggctgggtcgaagcaaagcggcgaatgcttttttccgagtccctgtcgcgagagcgaagagaaggtggtggggagcacccagaataaatgcgagctttttagttaagctaacgcttcctcgatggtctgtggtggtgcgcgcgcgcggcgtctctggaatttatacgtcgactcgacacggcgatgcatcctccttgcaccggttggacctcgtagcggttggtcgggtgactctggtcagtggtctactggctttggtccctcccgataactatgctctgaatgattgcttcggtacattcagttatccttgtgctgtaccagattggggtaagacggtatgggcagtgacaggatgcaacctatcataatctgtggcatatggtctgaagataaccaatgccgtttcgacgagtgcactcgagcaataggctgtttgactgaatgctctgcctcttcagtctagactgggaatccgggatacggggatgggaacaggattttgagtatttttgcttcgccaataagcaactgccatttccacacaggcatacagctgatttcatcgcggctcctgcaggctgcggcccttttcacttgggtgcggttgcgtccgtggctggtacggatgatacctttgtaattctgtattccagccaacaagctcgcaaccctaaagttgacatgaaggggtcctttgctgcacacaaactaacgtggtagcgaacgtgtagcttccaaaagtgtaataagcgaatttgttttgggaagatttaccccctgccaagtgccaaccgagagagctagattcgtggagataaaaagaggaacgcgtgaaggtgaaactgtgaaagggcccgactttgcgcgccgaggtttcattcgggcgcgcaacagctgtgggcgagagcgaccggaccggtgtctcgcgtcaatgcgtcatatggccaccacccgcgtcttttcagctcctctactagtacctcacggctcacgctcccgaacgttctcttcaggcacagtaacggcaaggcccacctgcgtgcggcggaggatgaccagcatacgccgcggccatgcattcgctcgggcggacgcgcgagaattccggcctcgtttcggccctgccgcgcgtcgcgttgcggactagcggttatgctgccgcgcgcgccaggcgccaccaacaccgacacgggcctcatcgatcggtactgcaggtgcaacccggggatgctgcgtatgcgcgtcgttgcaaggtctcgtcgcccggtcgggggattgtctttggtcggtccaatgaagtaatgaacggccagtttcacgagagctcagcaagtctccatcaccacctagtcgtattatttggcacttcttcttgggtacttcagatgccaccacctgtacggtgcgtcggagctcggaggtgggcgcatcaaagaccgcattcggttagaaacggtggacttaggacaacctcctctacaaatactccctccgtttcaaaataagtgcagttttgcactattcacgttcaacatttgaccgtccgttttatttaaaaatcttttatgattagtatttttattgctattagatgataaaacatgaatagtactttatgtgtgactaaatgtttttaattttttcataaatttttcaaataagacggacggtcaaatgttaaacgtgaatagtgcaaaactgcacttattttgggacggaggtagtacaatgtttcgacgatctagggaaagttttatttctattaaggcccggtttagttcccaactttttctttaaaattccaacttttccaccacatcaaaagttttctacacatataaacttccaacttttttcttcaaacttctaactttagtcaaactttcaattttggcgtggaactaaacacgcccttaagcgatcgctttaagtcagggtcggatccaaaaatagattaagacacaagacgctccataaaaatgttggccaaacacaaatatacatggtgaaaaagtgaaaacatataagtccttgatgggtcttccatccttgtcttaagccaatcgcttgtggaaacaatggtataagcgtttttggcaaaagattcgatgccgtaaattctaacagctgatgttgcatcggtgcatgaatgtggacagaaataatcttggccaggctaggctcttgccctaaatcacacggttgcggtatttttctctctcggaagatgttcaatctgactctttcaactataggtcgagtctaatccatattaaaaaaaagatggatataattactcatccaagtattaaaattgtgtaaaataattttcttgtcaatattaaatggtggttttcactgatgtggcatctacatggtatgttggtatggtctgtgtgctacgtaccgcttacatgaaatcatactcaacaaaaaaaaaaaggacccacatgccccttctcacgcggctcccctcccctctccctcggctccagcatgacacccccactagcttgcagcattgacaacggcaattgcctcctccgctccgagcggctgtcttgcactacctctttcttgtcctcctctcatcgcataacgacgggtgccgtaccttaggaagaagatgtggcgcgggagaagggaggggttgtttgatgacattttgtcattctatactaagcaagcaagattatttagctaagaagctagcttgttgtttttgcatgaaatgcatgggccatgcagactgtgcacgtattggtgtatatatgcctatctagccaaccatatatatggcccatatgcattctgctatatatgcatgaaccagcaaacaatgattcgaacgatatataagcagcttatacgtgagcactcgtggccgtacgcctatagtatacgtatacgtgtatgtataccaaataatcctccctaggattaaaccaacggcaagcaaaggctagtacatgggctgtatatgggccggtggatcaatgctgcatgctcatcgtacatatgcggctggataaccacgcgtacacacgtacgtgggcaggatttctcgccaacggcaagttactgatgcggagataacgtcagtcttatccggtcatctcgatctgcagcaactgaacccggaagagccggatcgatctaacgctcggccgcggcggcgccgagggattcgtagtgtgggttagggctccctgcgcctataaaaggagaccatcactcactacacaggagacgcacacagccatttcactctcttcacacagccatctcagtcatctcgacgcagccatttcactcctctcttctcacacactcactgacgtagcctcgccggagcagccgagtgggatcggctcgacgggaggagactccgtcaggaacaggagtggtgcacgtcgacggctgctcggcggctggaaggagaactcaccggcgataggagtcggcgtcagatcgcaggcgtcaacaacttttgtacgatgggtgagaattctgtgattttcttgttgattcttcttttgcagttcacgcatgcatgagatggcgacgagacgagaatgccggagcaccgctgcacggcgcccgcacgccgtcgttgagtctgccgagtcatgcaagagctgttcgccggaccggggagcaagccgccgtccgttgtcttgtccggacgaagggcctcgtcatgctacctcgccggaatacgctgcctcaacatcgcgaacgccgcccgcagaaccatgacgcctccctcgccggagtcgccgtgccaaacgtctcgccgaccgtcttcggcggtgttgtcatcttcctcacgccgttgcgccgccggaacacgggatatcctcgtctggccggtggcgacctctacctcacagcgccttcatcggtgcgcgccgtcatcctcctcacgcgcgctgtcgtcgagtccggacgtgccatcctccacctcgtcgaggtttgctgggttaacccggagaaggccatctccgtgccgtcttgctgtcatgccccgaactagtaccgaccggaactagcccgtgacgctccaaattaacctgttgatcgataccagtcccagaaaacagtgctggtatcacagggagacagaatatcacagtaacagaggtctctttattatagagtagatgtacagtcatgttgggctgcggacagatcccgagctcacaactgcattacaaaagaaaagtggaagccaggacttggaccaaataacacaggcgcgacttgggaactaggccgaaaccctaaaactcatcgtagccggcttgctcctggaagaactcctcatcagcaggatccgcttcatcttcttcagcaactggggggggggaattatttatatagagcaagggtgagtacgggagtactcagcaagccatgggaaataagtgtttaatgcaggcttcaaggaaaggctgatgtttttgcaattaattttatttgaactcttttctgaaacaactaagtaagtgcttctcaaacgacacggatgagacagtgcgtctcgtccggtcggagtatgtgcaatgtatcagtctttagaatttaaacaaggttggcacccggccaacagcttttacaacggccacccgggccaacaacttttcaaacggccacccgggcctagctgatcccatcagctacagatttttcaaacaccgaaccccttttcacacagcaatttcacaagcagtagtcaaaccaaactacgctaggaatcacctcacatccgcccatgactgtgggcacggctgttcgaacagtttgttaacctctgcagagggggtacactttacccacacgacattactaacccggatcacccagcccgtggggatcagccacgtcgggagacctccaagctttcatgacaaggcatttccaaagccgacacaggtttaccatatgccgacgagaggggtcccagaccaacaacaggttaggtcccagaccatactgtgccaggaagcccaggggtcctccccgacaccaccccggcgaatccacatgtctctcggcatcaaggctcccctgataagctagttactcagccaggggtgtcccattccacccatgtggtcgtacttgtcttatgtttggatgaaattccaaggaaacggtccttaagtgcaagagcgggaaaccgtacacccggtacgttccccggtccgcggttttggaaattcatttagttcgcaagcaccgacccaggtgtcgggttttccaagtcttttgtaaaactccagttttacccaagttgttactcagattttaagtttgaaggcgaccgtcgatactggcacagggtgcacgaatatcgaggcgcaactggatggttacaaggggacatggtatagcaattaacaatggaaggatcaaatgcaacaagttaggtaggtctgccaatctgccttgcagacgggacaacagattatgtgcgatcctatcaatgcataatatttttcaagcaacataattaaatttcaaatataggctcaagatgttcaaaggtggcttgccttgctcgagatctggagcttgatcctcgaaatcctcgcactgcgggtcttcgggctccgaaactacacgcgaaacgggacaactcaacaaacggcaaaaatgaagccctaataatgacctctaagcgtgccattagatagatctcgagatttgaggaattttggaagttgaacggagtcaaacggatctaaggttaggaagatattgaatttctaagattattagatttttgtctaaaggaaaaggatttaattaaatccttttttggaaaaaaaaagaaaagaaaagagggagggattatagacttttcctcgggcggctaaggcgcggcccaagggaattggagcggaccggccgagttaaatgggccggccggcctaaggcggcccaagtgcgcgcgcgcgcgggaggggaggagagagagagagccggtggactgggctcactacgcgtggtcccgggtgggacccgcttgtcagcggctcggctcaccgtgcggagggagcatgcggcgcggcgctagggtgaggtgtggggcgcggtgcacgcgcgcggttcgcggaggacgcggatgcggcgggcccacgtgcagccttacggcttgcggtggaccgcgcgcacggggaagggctgatcggggtcggcccgacccgatctcggccgagctggcgccgacgtggcgcctacgtggctgccacgcgggccggcgggaggtagacgacgacccggccgcgaatggacggcgggtggcggcggcgagcggcagagcgaaccacggcgatacggacaaaagcgagcacaccgggcggttgctcgtgatgaggggggacgagccaacggctcggattcgccggaggatgctcgacggcggcggattgcggtggcgtcaaccggtggggagggaagagggaaacagcggcgaggtcacgagaggtcgattcctggcggtgagagcatctacgcggcttcgggaactcgacgctagcgtcggattgggcggaactacgccgagcgaggccggcgacgagcgggtgctacggagctcgggcggcgacggcggcgagcacacggcgagcgatggcaacggtcggggcggcgccggctaactacggggagtctactcaagctactaccgaaagctagggggaggagatggagcgaggaggaagaacggagagaggcactaccgtgcgggacggggcgcagtgacgagaggccgacggcgctggagtgatctctccggcctcgggccgaggaagaggaagaagagggcgcgcccggagtccccttccgcgtccacgaacgcaccggctctcccggcgcttggcgatggacggcggaggcgaggcagagcacgggagcgacgacaacggtgaggaggcgaatgggagaggaaaggaagggagggggaagacgggtttaaaagggcggcaatgtcggtttgagagaggggaaccgacatgggcggtcaagccggcgagctggcgctccggctagcgtccaaagcggcgacaggaggtgacgccggcgagaggggaaaaaggggagaaaaagaggaaaaggagggagagaaagggggctcacccctttgccgattccggaaaaggaggagggagcggggcgactcggcagagggagaggggctctctgcctccgccccttggaggctagcgcgcggaggggcgggggccgggcgatgaccacggcgatgacggcggggcggtttggaccggcgcgacgacacgggcgacaggcgcgggctggtgcggcaaagggtgacggcggcggcgaccgggcggtcggccactcggcacgcgcgcgcgggaaacaacgggcggcgtggctgggcagcgggaccgggcgacgcggacggcgcaaacgacgcggctcgggcgggaaaccacgcgggcgcgcgcgcgagcgacggcgcgcggggccggctttgcgagcggggagctcgcgcgagaggagggggcgctcggcgcggctctcgcacgcgcgagcagcgagcggggggggaaacgcgccggggaaagcgagagagagagagagagagagagagagagagagggagcgcccgggagagagggggccggggaagagatgggccgagcggaattcggcccatcgagccacgacaagcaagacactagacaacaagcaaagaaacaaatttcgcaattagggtttttaagagataattttttcccgctaggcgccacgacggaacgagcactacagaccaacccccctaacaagaatctcgaccccgagattcagcacctaagggagcagctccgggaactcggcgcggagaagatcttcttgctcccaggttgcctcatcttcagaatgattgctccattggactttgtagaacttgatggtcttccttcgagtttgacgttctgcctcttcaagaaccttgatcggtctttccttgtaggttagattcttttccagctcgatattacccaggggaacttgctcttctggaactcgaagacatttctttaactgggatacgtggaacacgttgtgcacatatgcgagaccttcaggtagctcaagctgataagccacttcgccacgtctggcggttatgaggtaggggccgatgtagcggggtgctaacttgccggacatcccaaaccttctcataccacggaggggtgatacccgcaggtacacatgatctcctttttcgaactcaaggtcacgccttggattgtcagcgtaatttttctgacggttctgcgctatctttaaacgtttcccgattagcttaacttgttcttctgctgccttgagtatgtcaggaccgaataccagcgcttcgcccacctcattccagcacaagggagtgcggcactttctcccgaacattgcctcattcggcgacatctgaatactggcctgataactgttgttgtatgagaactccgcatacggcaaacaacgatcccaagtgccttcgaaatccagggcacacgctcatagcatgtcttctaggatttggtttactctttctgtctgaccatcggtctgcggatggtaggctgtactaaaatttagatcggttccgagggcttcatgcaactgcttccagaaccttgaggtgaactgagtgcctcggtctgacacaattttcttgggacagccaaatctacatacgacatgggtcatgtagagttctgctagtttctttccatcataggtggttttcactggcacgaaatgagctgatttcgtgagtcggtccacgattacccaaatggagtcgtacccgttgggggttcttggcaaaccggtgatgaaatccattccgatctcttcccatttccactcgggaatcggtaggggttgcagcagaccagctggcctctgatgttccgccttgactctttggcaaatgtcacacagggctacgtattctgcgacatctcgcttcattccagcccaccagaagtatgccttgatatcttggtacatcttcgtacttcctgggtgaatggagtaggcggactcatgagcttcctttaggatgagatctcttaactccttcttggccggtacacagatgcgtggtccgcaccaaactgtgccttgatcgtctatggagaaatttgtgtctttcttctcctgtattctttttattaattcttttatcccttcgtcgtctttctgagcctcccggatttgcgactctagggtaggctgtactgtcaagctggcagggacacctgactgtaccacggtcagtcttaacttctccaattctctgcacagatgatcttggtcaggccgtatttgagctacattgcaataggccttgcgacttagcgcatcagcgaccacgttggctttaccaggatgataatggattccaagatcgtaatccttgattagttccaaccatcttctctgcctcatatttaactcggtctgagtgaagatgtacttaagacttttgtgatcggtgtatacttcacatctgttcccgattaaatagtgcctccagatcttaagagcatgaaccacggctgccaactcgagatcatgggtgggataattgacttcatgaggcctgagctgcctggatgcataggccacaacctttcgttcttgcattaggacacatcctaagccttgtcttgatgcatcacaaaagatctcgaaatcttttcggatatctggcaaggtgagaactgaggcagtggtcaaccttttcttcatttcttgaaagctgtcttcacaggctgcagaccattgaaatttcttttccttctttaacagctcggtcataggtctgactagcttagagaatccttcaatgaatcttcgataatatccagctaagccaaggaagctgcggatctctgacacattcttgggcgggttccaagcaagtacagcttcaaccttgctgggatctacttcgacaccgttggaggagatcacgtgtccaagaaatgctactcggtctaaccagaattcacatttcgagaatttagcgaatagttgatgatctctgagcttttccattatcagcctcaggtgttcagcatgttcttcctcattcttggagtatatcaggatgtcatcgatgaacaccacgacaaattggtccaggtattccataaagattttgttcattaagttcatgaagaacactggagcattggtgagtccgaaggacattactgtgaactcgtatggaccataacgcgttgagaaagcggtcttcggaatatcttcagacctgattttcagttggtggtaacctgatctcaagtcaattttagagaaaactcttgctcctttaagttgatcgaacaaatcgtcaatccgtggcaacgggtacttgttctttatagttacttcattcagggctctatagtcgattaccattctctcagagccatcctttttcttaaccagaagcactggggctccccaaggggatgagctaggtcgcacataacctttactttccagctcttcgatttgtcttttaacttctgctaactcattagctgccattcggtatggtctttttgcaattggtgcagtgcctggtgccagttctatggcgaactcaatctctcggtctggtggcatactcgttaattcttctggaaatacgtcgggatattcacagactatgggtaccgactccaaggaggtgacttgtaaacaggttaggatagaccgacttacggtaggggtgttaggggtaaagcggacttgctttcctccaggtccttgcaatgtgatggacttttcggcacaatctatctgtcctttgtgcttagccaaccaatccatccctaggatgatgtccaagctttgcgagtctaggactatcggtttggctaggaagtcaacttcctcaattctaaggttaacttccgggcatatttgagttgcccttatattccttccaggggaatgtactatcattggtacacgcaaattttgggttttccaaccatttcttttcacaaaagcttgcgatatgaaagaatgggaagctcccgaatcgaacagaactattgcgggtacggagttgacagagaacatacccatcacaacgtctggagcatcctgagcggtttcagcttgaatgtgattcacacggcctcgaccaaagttgttggaagcacgtgaaccttgtccacttgcctgagagctaggacgagactgagttgccgctggagtaggagttctggcagtgctgccattagcatgccctgagttggtgttggtaggattctgaggacactgtctagcatagtgacccatctggttgcaccggaaacactgaactgctgacggtccctgcggtgacttgaaagaggtaacgctgttaggcgcagtattgccactaggggcacgctgctgtggctgaggtgccggacggtttatctgaggacgaggggcgtagcctggctggcggttagcctgagtgaccgactggtggtattgcatgggttgaccgtagcgagggcgaggtgcgcctcgggaagaatttccctgatggttagacttgcgtttcttgtattcttcggtagcctcttttctggcatcctcaagtagaagtgccttgttgatcatatgttgaaaagtggggaagtcatgagcaagcaactggagtctcattccaactgcgattcctttcaagaatttcctgatcttcttcttgtctgtgtccacttcctcaggggcgtaccgagccaacttgttgaactgacttaggtactcattgatactgctgttgccttgcttaagtctgttgaattcttctttcttcatgtcaatagtgctttcaggcacatgagctgcacggaaagccgtagcaaactcatcccaagcaatgttagtgggttcagggtgtgcattgcagtaattctcccaccaatctgctgcaggtcctcttagctggtgagaggcgtagagcgtcttctcaaccggagtacactgcactaagttgagttttctatcaacatctttcagccaatcgtcagcctcgacgggctcgacggtctgagagaattctggcggacgagacctcagaaaatctgtcagcttggacctattgttgctcatgtgagggtggccatttccatgcgcattatgctgaaaaccggctacgactgcggctaatccttgcaagatttgtgtctgaactgccattaagtgttgcatgttgttttccacatgaggtggggaagggaggcgttcttctccagaattgtgactggcagtgcggtgagagcggtgagactgttccatctctgcatcacgggaagctgtgcgatgcgagcggttgctgcggcggggttgctcaacttctgcattgcgggaagcagtacggtgtgaacggttgctgtggtgagactacacattagctgactcatgatttgcttccggctcggttctaccatcttcaaaaccaaagcgggctggtgcacgagctgcacggcgggggcggctagccatctaaactcccagaaaagggcgggggaagagtcagataagcacttaggagggcaaggagcaaagtaaatagcaactcagatagcacacactaggcataaactggatttttcaaatcataaaaacacctgatacaacgggtgtggacaagtcacagagctacgccgagcttgactgtgcgcacaccacctaggagaaccagactaccaaacaacgcccacaacaaactcacgcacgcactacctcgcgacgactccaaaagagttggcggcggaacaaaagggcctaacacacggacggctgctgaagactgcctcctctactcctcgtcggcctggctacctccagtagtcggctcctcagtcgaagaaacgtcgatcggctgacgcgaagggatcggcggaacctgtcgagggccggcagcagcacgggccgctggcggtaggggagctgggtagtggaaacggaacacggtggaagaaccaacaacacgcttccgcgcggtgcggataaagcgtgggccacggcgggaggaagcaagtggggtgtgtccgggggtgtaggaagggctaactgggtgcgggtagggggagtacactggtgagtacggcgcacgcgagctgggggagcgcgggccactgggagtgcgggcagagccgcgggagctgtgggaggacaggtggctggcgtggcagaggcggcctgactcccaagagatagtgtcaactgaggtgacaccctcctcggccagacgggcctccaaagcggcgtagcggcgggcaagggagcggtaagcctcaaggagtaggtcgtgctgagtggcctgagcctccgaaagctcgaccatgcgagtcagtactggctgagactcgctgtacggacaagggtacctggcgtctgagtggccagagggaaggcgtggaagctgccggaaggcggaacctccgagacggtggctgtagtcgtgggccaggcgacgaagcgcagtccaggagaggtcctggtacgcgatctggagagtgggcctggccacagtgaagtggtgggggcgaaggccagctccgtgtatacctccacgggggtaaaggtacatagagagctcacagtgagggggaacacggtccacggagtaccccgtgtactcgggacacgacaagccaaggaaacgggcgaggtcacgaagctgagcgacgtggtgaccctcaccaaaatcgtgggaactgaagctggcgttcactgccatctacaattttgaaagagggagaaagatcagtaactgttttagaaacaaactattgaaaataaagaaaacaaaagaaaccttagcttttcgcaagtagttttgaacttagtatccttagggtcgtcctaagcgtcgggtttcgccctagggccaagcctgtgctctgataccatctcttgtcacgccccgaactagtcccgaccggaactagcccgtgacgccccaaattaacctgttaatcgataccagtcccaggaaacagtgctggtatcacagggagacagagtatcacagcaacagaggtctctttattatagagtagaagtacagtcatgttgggctgcggacagatcccaagctcacaactgcattacaaaaggaaagcggaagccaggacttggaccaatcatcacaggcgcgacttgggaactaggccgaaaccctaaaactcatcgtagccgacttgctcctggaagaactcctcgtcagcaggatccacttcatcttcttcagcaactaggggggttatttatatagagcaagggtgagtacgggagtactcagcaagccaggggaaataagtgtttaatgcaggcttcaaggaaaggatgttgttttcgtaattgattttgtttgaactcttttctaaaaagtctaagtgagtgcttctcaaacgacacggatgagacagtgcgtctcgtccggtcggagtatgtgcaatgtatcagtctttagatcttgaaacagggttggcacccggccaacagcttttcaaacggccacccgggccaacaacttttcaaacggccacctgggccaacaacttttcaaacggccacccgggcctagctgatcccgtcagctgctgatttttcaaacatcgaacccagtttcacacaacaatttcacaagcagtagtcaaaccaaactacgctaggaatcacctcacatccgcccatgaccgtgggcacggctgttcgaacagtttgttaacctctgcagaggggggtacactttacccacacgacattactaaccaggatcacccagcccgtggggatcagccacgtcgggagacctccaagctttcatgacaaggcatttcgaaagccgatacaggtttaccatatgccgacgagaggggtcccagaccaacaacaggttatgtcccagaccatactgtgccaggaagccca

SEQ ID NO: 10041 - DNA, 6218 bp, Oryza sativa
agacgttggttggcacttggcaggaactggtatgaagcaacactatctgtggctcatttcttctgtttctccacccaaattcaacggaccttgttccaaattccaatgagatgaagaaaattagtagtatatttctttgtttccctcgtgtgttttgtcattttccagtaaggtgatgtgtgatactatctggatattcctaccctcatggtaaaactgattttgcattgccatctcaaggtttgattcttcttgtttcggtcaatcctacatcacatttatcacactgaaccttgcttagacagcctgtaagtaagcaatcatccactggatctatgattatgcatgcatctagctatctttaggccaactcccttagttgtttgagtttgaccattcacattatctcttcggttctataattctccaccttttggacaaggttaagatcaaacttttgtaactttaactattaacaactttaaagctatttagtttagaggcattagaataatatatgtagatttatcttataaaatactacaatgaaagtgaaatttatcaattcattgtatatattataatagaaaaacatagtcaaagatatattttaaacaccgtgttattattcaaaacgttaagaattatgaaagaagagcgagtagctgcaagaggcactagctaagctataaaccaaacagtgcacgcttccattgccatctgaaaacggcatgcttttgactaatcgtggagcgaagacaacaacaattgttcagaagcggtgggtgtgttcttttggagggttgcctgccatccgcacgaaaaacggtgcgatagattaacacgtgattaattaagtattagctataaaaaaattaaaaatgaattaatatgattttaaaataacttttctatataaactttttgtaaaacatgcaccgttcatcagtttaaaaagcgtgcacacggaaaacgggagatgggttgggaacccattggaaagaagacagcctgtggcatcttcctcttcttgttgtcatcttttatcaatgcaggaagatacaatctagaactgataacggcatgcacaacagtccaggcatcaataacatcaagtacaactatgtaatgacgtacttgtacctaagtagaaacgatgatcccaatctcgtgtacttcccatgacagttccctaacatcggtatctaagcaagattagctcatctctccagctgtactattttttttaaagatctaccctctaggatgtaatgagtgatgactcaaaagtgctagtctggttgatgactcaaccagcgtccttttatttcgagctgtagtcagtgtccttcacgaaaggagaaacgaagcagaggacacaaagtttagttcagatttcttggtcgtggcttattttccccccattttttccttctttttcttaagaagaaaaactaactctgcagtgagaacgcaaatatgctcgtgggccccattcagagaagcagtgacgatcgagatgacgaaattaacgaaaacgaaaggatacgagagaccgtttcgcgtgcgggcttgtggcactggcacctagtacgcgcgcaacgatggtcacagccttacatttacatctccgggcattttcacgggagggtcgcgccatcgcggcccctatcgatcgatcgcccccccggcgcttgcgtggcgtagtggtgcgagcgtccgcgagaaactatctgcgcggtgtcgcggagaaaaacgccagcgtcaaccactgccatccggcgactgttggcgaaccgtgcatgtgtgtgcagttgtcccggccgttgatggcggacggggagtcctcaacaagcggtgaggtaggacgcgacgcaggacgtgaggaaacgcgcaggagatgtgctgtttcgtgatcacgcctgctgagctgacgacgcggggggaaaggggcggcacacggtggcgtgcaaaagcggcacggcgaggacagcatgctccaactaccactgccggtaccagatcgagcgtggaggtgcaagtacggatgagggttgtacgggttcgtacaaggtacagcggccgttgatgttcctagttttcccaccttccagggggaaggtctcacaatggcacacgcctccaagcatccccagtccacggtgtaggcagtctggtgagtggtgagtaccaggcgtggcagaaaattgaactgcgtgactgactgctgatgagtcatgacaaatttccaagcaaacgacgggtgtcatagctcacaggtcgactgcaggggatttgggggccattttttttctctcttttgagaacaggaaatttgggtgtagtccagtagtgaaagttgaacgtcagattcattgtttctgatgttttgttctagcgcgagagttctttggtgattagttgctctccagctagattcatctgggagaaaatgggaaattcatcaacaccatgatcgatccgtccaagttggatttgtaaacaacatcggaactaaaaagctaaaaaaagacaactgttactccgttaatgattccaagatgatcccggcacgcacatgtcgagaaaaaaattagcctctaaatgactagctaaatccatggagaaacagagaaccgaacaagagaacaaaatcagcccattctgatggaacgcatatttacaccatccccatccgccgcctgatgctaccacctgccgaacgccttcttcccggcggccgccacggcggcggcgcgctcgaaccgcgacgcggcgcaggggatggtgatgccgccggggtgctggaagccgaactcctcctcggcctccctcagaagctccccgaacatggggtggttgaagtacaccaccggcaccacgtacctcagcgactcgccggggttgccgccgccgacgtacaccgccacctgccccttgggcgtcgacacgggctcgtccagaatccgccgccgcccgccgtccttccgcccgaggctcagccgccgcaccagcgaccgcccccaccgcagcaccggggccagcctcttggcttcttcgctcccctccttgcaagcgccgccgcacccacccgacgtcgtctgcaggcgcaggtagccccgccggcgccggcgccggcagcagagcgcccatcgccaggcactgagcagcttccgccccagccggaaccctccatgcgaccgctttagcatatccaaaccccaagaaaccgcttccaccttcctacgtgggtgagttgaatggactttgggaggagtggcgagccagaacgggaggaagtgggagcgcggtgaggctagagaaacgagtgttttatagggcacgggcgcggaccgcggagcgcacaactgagcgtgtgatctcgattaaaaatttttaaaaagcattaaaaaattaaaaaaaaaaagctgatgccatttgcgttccgcttgttttttggcgtttggccacaggctaagattcgtgcgaggattttggctaggatttaccggggtttctggtggttcaggcggcgtttgttcggtaatggctggtgtggctgcgcgcgggcggtggtccatgattccttgggctaagctggacagtgagagctcgcccgcccgacccgttcggctacgctgctttcttcgctttccgcgactactggcgtgatagactcacgtacttaaaaattgagttggataaatgccttcaacttgtatatctccttgcaatctagcaagagtttggcacccagcacaaaagcgtctttgagatttcagcatacgtagctcctggtcgacgtcagtccccaacaggaaggggtttagaagcagtctttgctgtgaagttcccacaatatcgggtttgtttcggaacaacagagaaatgcttccaggttaggtctaggaatgtcgcgatactgccgtgcagtttagattgtagtagctgctactggctgtacgtggcacactgttatgcattgatacgaaactattctggcatattgttaggggctctcaagaacacgcttcacaattcacgaatttagtggcaatatttgttacttctcagatccaacaggaccgagccgccgccgccaacgcctccagatgccaattcccgaattgttctagtgttgttcgtttgatttattacaaccaacccactctctctctccggcgccagctcacaagcgagctgataccttacgccacccactctggaccgtggaccttcggattgggccttctctcacggactggacgccgagttgcaacccaggcttgattgtcacctgaagtctggatcacctcctccttatcttctctgctaccagcttcatcagcaacttcaggacggcttccttcttcttcttctggttcttctgcagttgagccttgcgagatatctcctggatgatcttgagagtccctgacaagcccctctccttgagaattggcttgcccccaagccaatgctgcgggaaaccttgagcgaagatcgtccagatcttcccaagtagcgtcctctggaacagatgcagaccactgaataagaacttgagcaacagcagaattacctcgttttgttaacctcctgtccaagatacgcaatggaacttgtaaaggagcagtggatgccggcaattgatgttgaaccgggcctgtaaaaccaattgcggatttcaattgagatacatgaaaaactggatgtatagaagtagaagaaggcaattgcaactgataagccacagtgccaatcttggctgtaacttggtagggtccaaagtacttaaaagccaacttatgatttgctcgcacagccacagaagtttgcacataaggctgtaacttaagatatacccagtcgcctacttcaaaggaacgaaaactccgcttcttatctgcaaagtgcttcatctgctgctgtgctcggtggagatgttgctgaaccaaattctgcatcaatcttctttctttcaaccactgagctagatcaggaatggcacaatcttgcgacccaataccaaagtggctaggagaatggccatataagacttcaaaaggagtagcttgcactgaagaatggaaagaagtgttataccaatactcagcaagatgcagccaagcagcccatttagtgggaaccgaatgaacaaaacatcgaagataaatttccaggcactggttgacacgttcggtctgaccatcagactgaggatggtaagctgagctaaagtgtaatttagtaccagccccttcaaagagatgctcccataactgacttgtgaaaaccttatccctatccgaaatgattaccaaaggaaggccatgcaacttaaaaatgtgcttcataaacaacttagcaacactcagtgcagtaaatggatgggataagggcaggaaatgagcatacttagaaaatttgtctaccacaacgagaatacagttagaatgatcagaccttggcaacccttcaataaagtcgagtgaaataacttgccaagcaccctcaggtacaggtagaggctgcaaaagccctgggtatcttgccctgtcaggcttggcttgtaagcatatctgacattgctgcacaaaggtcttagtcattttcttcatcttgggccatgcaaatagctgcttcagttttctgtatgtaactgggaacccagagtgaccaccaattggactggaatgtaattcagttaaaagcttggactgtagtgtaggattatcaccaatccagactctgcccttaaatctgattagaccagaattgagtgtaaaatgtttcctgccggtggcattaacagctaattcagtaagcaattgagtggaaaaagggtcttgtttataaccatcagtaacttcctgaatccaagtgagagtacaggctgaaatatgacagagttcatcttcagtatcttggaatttccttgacagagcatcagcaggcccattacatgtacccttccgataacaaattctataagagagacccaagagtttagtgaaggccttgtgctgccatggagtatgcaatctctgatctgagaggtgcataagactgtggtggtctgttagaataatgaattcacccatttgtagatacgatctccaatgatcaattgccatgagcattgccatacactccttttcataagtggataaacccttggttcggggaccaagtgtagcgcccgttccgtcgtggcg

SEQ ID NO: 10042 - DNA, 18135 bp, Oryza sativa
ctcaccacctcccctccctttcccctctctttcccatccccggagtcgccgcctctttggaagctgccgccgccgttgagttgacgcgccccgccgccgcgctgtgccttgtcgccgcaccgtgccccgccgtcgaccccaccaccggtccggtgagcctcagcctccccctcccccaccgcttgtcgtcgcgccgcgctgtccgccggttccagccgagccacgagagagaggaagcagagaggtagcagagagagagaagagaatagagaagagaggttagagtgggccccacgtgattagtaaatagtaatccgctttttaatctttattagttaagtatattacataggtccaggtggttagaaatctgattatggaaggtttatagtttcgagtctatgacatgtgggccccacttgtcattagctcatcctatttccctttagaaaattaattcggtggaaaataaagtaaaggtttgaccccacgtgtcagcagctgttagtgttaagaacaaacttcggattaaaaataaatcatttatgaacagtagcttttcacaatttctcggattaattcaaatttgaatctttacactagcataacttattcattttaactcggatttgagtgaaacttgaacctaaattcatctaaattcataagctttccaatgatatataattcactatttaataaaatatatttataattataaattaattaatatcaaatgattagataattgttaacctaaatagtgtgccaataaataaaaatggatattgtacagtagcataattatctttaatatgtcttgtcactgtagcaaccacataaattagttataatcaatccttcaaattaatgggtgtataggaaaatattagtgccatttactagtctatgtccaaatataactaaatccatgacttataaattatttacaaaaagtttagcctcatattttgtaactaaaatataaacacacatagatgaatatttaacttgtttaggagagtaatcacagagctagttgtatttggaccacttaaaaattagtcgatacaatgtcatgtgaagtagaatatatatatatagtcggttgatatccattagttaaccaaacagagccatcttaaaatcaacatgtattgtatagcttacagtaaaaagcaactactcaaatatatgatccaataataagatattgttgcttacacatatactatacatcccattatagttgtacggtatagtattaatttgcgtgttgcatatattaaattagagggagtatatgacaaacatgtatattagataaatactagttataaatcttgacctcatataattataattatagttcaactgtaaattaggattattcattgtaaaattatgtgatgggataatctgtaaccataatatgattaacctaaacaactctaacatacaaagcatggataattattaaccttttataatttattgtgacaagtaaaatatgttcataattaaagtaaagcctccatcaattaaataataataaatccatctaacaacagaacctctggtatgtaaccgtgctatttagatagatgcatatatagtcataatccttccatagccatttgatagactaaaccaccgattagccaaatatatatgtataccataaatgccatgttggttaactcctaaatagaccacgatgacaatagaaagattaagaaactttagcccttagcatgattggaatccattagcaaacacgaatagtatattttgttgcgcatatttgattgttgtttgaatattggtttttctcgcgtattatagaccttgtgtatcggttagtcgtgaggcaacgtctgcaatttccaggaggtgaaggttgatcaagattatatcaataataaggattattctgagcaggcaagtcatcactattccttgaacatgttgatcccaattgcgaaattatttttatttacaaataagattgcatgcaatgatgaacatcctatttttgaatatgccatgccttgattattgtttacccttattcccttgtaaccatgattacgtatgagtccctagtcaactatgacaaatgcttagaaatgctactctagaatcatgcatactcatatttatcaaatgctatatgcttgggcaattacctttgggaaggtattgagatgcggcatgtggagacatgagcgccacattgccatgatgttgatgatatgatttgtgaaaggagaaataaaattaaacaattgttttcgactggggcagacggaggatttgggtggtatccggaaaaggctagtaccgtccctggtcaattaaggaccgagccatgaagttaagcatgaaacgacccccgtacaaccgcacttctcgtatgggtatagacctagcggagtagatagctgagcggaggcagtatccatgcatagtggtttcttgatgtgtgaggcaggggctctacggtggggcatccattggtagaaccgcgaggcgggtatctacagtggtgtcgccatcggtaggactgccatgtgagaatttaaacataattataacttaatgcatgtatgagtctttccttcccgggtgcgccagaactcctctcactgctagaaaccgtgtacgcctatagtgcatgaggatataaagttcatggagcgggtactgccaatgcgaggttatcgaaaagctttgccgtaatgcgtctcatgtgtagggacgaggctcatgtgttgggcagtcgcggagcgcgggtaaagtgtacatccactgcagtgtgagtaaaccaaatctattcgaatagccgtgctcgcggttattgagcaccgggacgtgtattacacttggctagactcaaaattcttaacttgtgtgggatgggataatgcatgatgatttttatgctgttggacccacttcctgagaggcgggaaggtggacgtcctcagaaaaccatgactactcaatggcgggaagctatccttgggatcacaatggatggtggacagaaccgtcgttgtttaatgtgaacactggtattaaaatttgatcagtctatgctaggtcttagacttgtgaaaagatttgcaaaacttgctttgcgcaaaggaacctgaagccattccttgacataccctctatcatatgcatcgttactgtggtggcttgctgagtacggttggtactcacccttgctatttatatatcttttaggcgagtgttgaagagaagcccttgtcgatacgcttgcgtatccaacaagatgatcggagtgcggtcttgttctaggtctcgttccccagtcgactgcctgtggcatgttaaccgggcccttatattattttgtcttccgcagttgttctctgatagttgttggcctacctagccctaatgtaagtatttaactcttttagcttgaattcattcatgatatgttgtgattcaactatgtatgtgtgtaccaactactgatccagggattggtacgaataaacacagatgatttccgatttccaaaatcgggggtctacagttagattgtaaataggaaagcatgctcatcacctttcttcaaaataataaagatatctttgcgtggaaaccatctaatattttcacgcccagaaattcacgaaccagaatttctaagctgaatgtgtattagacccctatccaggactagccagggtacacaaacgacaattgttgacatacagatccacgtcttacaaaaatagaaaagattacaaatgctgcagaaaagataaaagcgagctaagcctaaagacttgactcctgcagcgagcgattccattccacaggcatccttgacagcagcgacgaaaccaacttcttcgagacatctccaactgagaaggacttcaactctggtgttgggggaaaagagagcaagactgagtactacccactgtactcagcaagtcatactggaagagaaggtatgatgcagggtataaccaaaggaggctagaggttcatttgcacaaagcaggcatttaaaagcagtagttaaaagcagtaaaacaattgtagtaatagatcaatattaaccaatcactgtccaacgctacaccacgttgcaacaggcccaaccaaccacctgaactacaccagttcaatagctaactaggggtgagactaatcacggtgaatctggtcgaccgcccataaccgcgggcacggctattcgaatagttttactctgatcagaggtgtacaactgtacccacaagacacagccccatgacacgtttccgtgcaccgacatgccaccacaacataccggaaagaggccgtgacaggacccttcgcataaccccctctaaccgatcgcaccacacctcagggttcgcccccgttcccagcaggcaacgggcagcccctctctcgtgccgcggtgaatccggaagccgatcaaccggacaccccggccgacccaactccatcacacccaccctcgcctgggtacgtcggccacaggaaagctacactacaagcccagccgttgcccacgctggcttgtggtaagtacgataagttcttccagggcattccgcgaaccggtccttaatcgccatgggcatgactagcaaaaccatgcacccacagtccactaggtagtgtattttaattaactaacaccattgcggtggcactaatctaaagctatgccaataatcaatgtctatgctttaatgtgatcccgctttgtggtctagtagaactaagcatggctaagcatttcctaaaccatctagtcattttaatacccaagttaaacaatatatggctgagtagtaggacccatcaaacatgatattgtaaaagaatgcaacatttaatagaaatgcgggacatttgtaaattgggtacaatatgatcaattgtaatgcatgacttgccttgctcttgcactagtgagaccacaacgacgtcttcgagaaaccgcggatcgacggaacggtcgaaatctacgcgacaaacaaagcacacaagcaaaacatgctataagtctactgaaacaggaaacaaaaccatttttaatggattctatacatttttatgaatttactgagacttgaatggacttaaacggagctcggatgaattagatatgaattttagaagattatctgtgtttctactattaaagaaaagtcttattgatttattgcgcaataaagcatcccaggctgacgtcacccaaggggggggtggcgccgacatgcgggacccacgggtcagtgacacaagaggaggaggaggtgacctggcgggtgggtcccaccaggcagcggtccaagggaggggaggtggcgcctggctcggctcggctcggctccaaaccggcaggccatggaggggcggcggcgcgcgcagagctggcggcggcatgcggttgccggcgacggcgaccgtcggcgggaggcagcggcggccggcacgaaggcggcggcgcggcaaagagagagagagagggagggaaagggagggagaccgatcctcaccgaggggctcggccggcgcgggggaggagcgacggtgaacgatgacgatgagtgacgggaggacgacgacgatgggcggacgtgcttcgggaccacctaggggacaaaatgggagggattagagggagaagggtggtctacggcgagcggattcgcccggcgaaggcggcggccatggtggtgctcaccggcacgcgaggagaacggagctatggcgacgatttgcgtcaaccgagtgttggacggggtagccctcgcaacggcgaagctagtggcggtggttgcgcggcgtggcgacaatgctagcggtggcggcgcgcggccggagagtggcggcagcggcggcgctaggggagagcggcgcggcggcgatagaggcctcgggagagagcggcgacaaaaggaaaaagatagaggggggtgcggaggacctttataggggctcggtaggagcggacgtggccggggggcacccgattttcgccggcaacgtgggaggcggagagagagagagagtagggggattcaaaccgaatctcgccctttttgggtgcacggcgcgggcgggaaggcgaggccgtgggcggcgacgtggcgtggggtggggcgcggggtggagcgccagaggagcggcgaaagcggcgatgtgggcggcggttttggcggcggttgccgccgggctggaggtaggggaaaggactgacaggtgagccccacctgtcagagcccgggggagtgaggggaggcggcctggactttgggagggagcggtagagataggccggcggcccatgatgaaaggagagggagggaaaaaaaaggagaaaaagaaggggaaaaggaaaaaggggattttctggggattctttaatgcttgtgctcctttttaattggttaaaattatttcttgggctctgaaaattccactaaagatcctgttagcatattctgacatgtagaatccaagaaaaattcaacaagccaattccgattattatttgcatttattaatttagggattcaactctaggttaaattaaacaatttcttcggacgatttattttatgaactttaaagcaaggaggagaatttcagagcgtgacagatatgcctggcattcctagagaggtgattgaacactctttacatgttaaggaagatgctaaacctatcaagcaatgactccaccattttgcacaagataggaaggacgcgatcaaggaggaattgaccaagctgttagcagcaggcttcatcaaggaagtccttcatcttgactggctggccaacccagtcctagttcggaagaagacgggacaatggcgcatgtgtgttgattacaccgacctcaacaaatcttgtcccaaggatcccttcgggttacctcgtattgaccaggtagttgactcaacggccggctgcgagctactcagttttttggattgctactcaggatatcatcagatccgactaaaggagtccgactgcttaaagacttcatttattacacccttcggggcctattgctacatcaccatcccttttggattaaagaatgcaggggcaacttatcaacacatgatccagagatgcttttcaacttagataggtcgtaacgttgaagcttatgttgatgatgtagtcgtcaagaccaagcagaaggatgatttgattacggatctagaagagacctttgcgagcatccgcgccttcaggatgaaattaaaccctgaaaagtgcactttcggagtaccgtcagggaagttgcttggctttatggtatcccatatgggcatgcaagccaacccggagaaaatcaacgccatcctcaacatgaaaccgccgagctcccagaaagacgttcaaaagttaactggttgcatggcggcgctcagccagttcgtctcacgactcggcgagcgggggttgccctttttcaagctgctaaagaaaaccgacaatttccagtggggacccgaagcacaaaaagcctttgaagacttcaagaaacttctcaccactccaccggtcttagcttcgccacattcgcaagagccgctgttgttatacgtgtcggcaacttcccaggttgtgagcacggttctggttgttgagcgtgaggaggaaggccacgttcaaaaagtccaacgaccaatttatttcgttagcgaagttttggccgactccaagacaagatatcctcaggttcaaaagctgttgtatggcgttttgattactgttaggaaattatctcagtattttcaaggtcactcggttacggtggttacatcgtttccactcagggatatacttcacaatcgcaaagcaaatgggtggatcgcaaagtgggccttagagttgatgtctttagatctatccttcaagccgcgaactttgatcaagtcccaagctttagcagacttcgtcgccgagtggaccgagtgccaagaagacatgcctgtggagaagatggagtattggactatgcattttgacgggtcaaagaggctttcaggcaccagagcgggggttgttctaatttccctgactggagaaaggctgagctacgtattgtggatacatttttctacgtctcacaacgtggcagaatatgagacgcttcttcacggattaaggattgcgatctccttgggaattcggcgtctgatagttcgtggagattcttagttggttgttaatcaagtcatgaaagagtggtcctgccttgatgataacatgaccgcctatcggcagtaggtacgcaagttagaagataaattcgatggccttgagctaacccacgttcttcgacataataatgaggtagccgacagactggctaattttggttcaaaacgagaggcaactccttccgacatgttcgttgaacatctttatgagccaaccgtaccaaggaaaaaaataatcgaggccacggacactcaagaagtaagcatgattgaagccgactggagagagcccctcatgagatttttgaccaaacaagaactccctcaagataaaaacgaagtcgagcggatctccaggcgcagcaaactttatgtcatacatgagaccgagctgtacaagaaaaatccatcagggatcctgcaacgctatgtgtctttggaggaaggaagacaattgctaagggatatatattcaggcatatgtggcaatcatgctatcgcacgaaccattgttgacaaggcctatcggcagggttttttctggcccacagctgtatccgatgctgacaaaatcgtgcgaacatgtgagggttgccaatttttcgcccgacagactcatctaccagctcaagagttgcaaaccatcccgttatcttggccgttcacggtttgggggctcgacatggtcggcccgtttaaaaaggctatcagtggttatactcatgtctttgtagctgttgacaaattttccaagtggatcgaagccaaaccggtcgtcacaatcacgacagacaaggctagagattttttcatcaacattgtgcaccggtttggggtacccaatcggatcatcactgataacggcactcaattcactggcggagtatttaaagatttttgtgaagacttcggcatcaaaatttgttatgcccccgtagcgcatcccatgagtaatggacaagttgaacgcgccaatggtatggtacttcaaggaataaaagcacgagtttttgaccgattgcgtccctatgctggcaaatgggtagaacaattgccatctgtcctttggtccctgcgcaccacacccagtcgggctacgggacagtcaccgttctttctagtctatggtgcagaagcaatgctgccaagtgaagtagaattcgaatctttgcgatttcgtaacttcagcgaggagcgctatggagaagaccgagtagatgatctcaaccgactggaagaagcccgtgaagcaaccttaattcagtcggctcggtatttacaagggatgcgccgttatcacaatcgcaatgttcgatcacgagctttcttagtcggcgacctggttctgaggaaaattcaaactacacgagatcggcacaagttatctcccttgtgggaaggactgttcatagtttctgaagttactcggccaggttcttattgactcaaacgtgaagacggtactcatatcgacaactcttggaatatcgaacatcttcgtcgtttttatgcttaggcattattttttgtatcttcttctttgactgttaacatcaagttcttacttgagttatcagtcgggggctactataataataatggagtgtgatttttatcaattcaatttgcttacttgatttatcattgccttgtttgattttttggcttagttaatgaggactgaaagtttttaacagcttttgcgggttctaggctcagtaaggtttgacaaaaacttttaagaaatcaggagctgagtttaaatcatcaagcacaacataaattcatcagtattgtacaaattgtgcctccatcatcatcatcattgtcagaatacaatatcaatcagtttcagtcttttcatcgtcagagttattagatctagtcggccagaggtcgttgtcctggaatctctcaacaacatcagcagctatcttgtcggcagctttctgcgtgtcattgatgaggtcaagagtggcttcttcgcttgtcccgtctgcaaagccatcaatggcatcaatatcaatcttcgggtacaaggacttggtcattgccaacgccaggcctgctcccatacttccagcttccttgatattcttaaaatatgtatccggagcaattctcagcttgtcgaagatttcggcagcaacaaatgagctcggaccattgttgttataaaaaacatggcttggacgagtggtgtagcggcgttggcgacctcatctctagctccctcaagcctcttgattttgttaagcaagacgtcgaactgagcttgggatttgattttgcgatctgcacaagtagattcacatcaacgagtgggcatgaagataagagtggttttttgatgttccagctacaagtatcttcgacatcttttagagctgagtccctctgcttcgttagttcgcccttatttttttctagagccttgattcgcctttccagctcggatatcttggcagcttgcactgtattgcttctcattggttagttgcacatggatagcggtacgaaacaagtcagataaggatgagatttaccttttaatgaaccgctcagctcaaagttggagtcttgaagctcggcagtccgatctctgaggtcatgctcagtcttcctggcaagctctttggcttcacgcagctggtctctggttgcttcaagggttccaaggtggggaactaatttttcgagggttgcggtcttcgcctcattcctaagatggattctctgcaccgcaaatttatctttgttcaagtaaagtggccgacaggatgattgaggctgcgtatagggagagttacatttacaagatgagtagattggccgagtgtctttttcagcagacatacttcctcgtcttccttttgtttatttatcacgattccctgtggttgcatttcatcatcccaccacttgactaatatgggtgggcgagaatcttcacctgatcgtatctggaggacctcttcttcattaccgatcattggcccttatatattcatgaataatggtgaagcaattgaagaaagtttgtcggatcaagacagatttggaggacttgtttacccattataatttccggtcggggacgagcaggtccttgcaccctaacaggagagttagttccagggtcagcagcagcgtccgtcttgggagggctgttggcttgagcttccacttctgggatatctctattttgttctgtacccaactggtttccagtcgggggctcttgatcagcaccgacttcagcttcggctgactggtttccagtcgggggctcgttgctagtatctatattgccggttgccggttgattattacctgggcggtcttcagcagttggcccagtttctgctgaaggactagtctctgtgccagtcggcatggggtcttttccagagggatctatgtcagatggtttcctacaaatttgagacatgctatcagctttgcttcaatagtgagtgactagcgaaacaggggaaattgctagatgacacatacctggatgacttccttatttttggcatgggacgactggacgttttcttcttcggattggcttgctttggctgtttcccaatcacccctttgttgtccgtcttttccgcgtcatcaccttcatcgtcacttgaaaccaacttcctcttacgagaatctgactggttagttgacctcgaggtgttgggttggacgtccgactggatcttcggccctccactggcttggccagtgtgccggcgaggtgagcggcgttgagcaattggagtatcggatttcatcaaagcgaattcctgtgcatggtattccaagttttcagtcgaccttacagaagataaaagcatgctttgagaaaggctaaggtgtataatacataccggtggaggagggttgaacgtattgtatggcacgactagcaataagtgtgaatagctgaccacaatggcattcgagaagattttgtacattctctcctacataattttgaactcaagagactctgggttctctcggttggggtcatgcttgccatcaaactcaaaagctgtgcgggatctctccttgattggcgccagccggctcttgataaagtgccgggtgatttgctctccttgcagaccctgttctttaagcttcagcatgcgatccaataagtcaagcgcttgggcagcctcttctcccatagaaagtgagttccaggtatcgcgatatactggaggcagacaggagtatccgggaagcgctggcttggggttttgcacatagaaccagttcgcgtgccaacctttgttcgaggtcttgaagggcatggagaagtatttttggctcaaggtccccctcagttgaaatccggctcccccaactacgcacggtttgctcttatttggctggggcttgaggaagaagatgcggcgaaatagagcaaaatgtggcctaatccccagaaaagcctcgcaagcgtggatgaaattggcgatgtggactatggagttggggtttaggtgatgcaaactgatcccatagaaatccaaaatcgcccgaaagaaacttgaggttggaacagaaaacccgccgtagaagaaatgggagaacagcaccacctcgtgtgtgtcgggggtcggaaatgtttcaccgcatgctggacgccacccgatgatctcctttgccggaagaacgccgtgcgccaccatctccttcaggttttcctccgttacatcggagggcgcccactgactctcaaagctttctctctcttccgccatggatgcgaactggatgatgtgatttggttcgaaatgtggctgggaatggatgggagattgatgcggtggttgcgtgggagattcttgtggagttttggaggatggattggagcgaatctgtgaaccctagcttcgcgggcgcggtttcacaccgtagcagagaattgggaaagtggcaagagtttcggcggggaagacgaaccgacgctttgctttcggtgttatttcattagggtatcgggagtactaatgggcctaggcctaaacagtacttcagcccaattttgctatctcgtcgtgtctaagttgtgatccttagggacttaggcattttgcttcggcaacacttgctcacaacagtatagcccaatgctgttaaaatcctttttgacgtagttagataattctttggaattactacgatgcaaataaaaaggtgcccaacggaaaagtgttatactaattttgtaagcctttttaggctgcaaaagctgttcgggttttgttgagatgactggtttttgaatggtcattctcttggcatgttatatgcttattttgatatggtgtgagtcatagcttaggcaatttagattcacctattgtcatgatttataccacatttgatggatctttttcgagagtttttactaggattcttatcatatgtgttgatttataaacctttagagtgtttctcactcgggactttttatatctccttttctggtgtatcaaagctaaagcagtcggctggatgttttattaaacgtcgcatatgcttggctgtgtgataccatggatgatccggttgtaaaaccactcggttggatgttatttgcaccttggctatatgcttagtttttaactaatcacatagtcggaggctacacctaattaggtgcatctaattgatgcacctgattgtttctatttctagcccttcacagtctttgatcttagtactcgggaggccaaagcagaagaagttggagcactcgcattatccttttggattacgagagaagactatttcatcgactgtaaaggtctcaggggctactatggagattatggataccccatacctacacggcatgtatagtccgactaggtatggggtgccatgtgtagatagaatatctttaaagggactcgggttaaattccaaacttgtacgtcaaggaaatgcgcgtgatcctagtcggttacgattgtatcttatctgtaactacctattccgttagggatatggattgtgttttgtaatacggaccacttcccctatataaggaggggtccgggtgcctctaggggcacgattttctcccagatcatacgatcaataatatactcggcggatcaatccccggacaggagtagggtattacttcttgattaagaaggcctgaacctgtataaaattccttgtctttcaacccatcaacttttctagcttgatagccacccccttttagtattgctgaaatcttgtttcgacaccgtcgttgccgtgccggaagatccagccacccgaatgagaggtatgctagccgtcaccgccctcttcttccctttcatctccatgtggccaccgcttccctctcctttacgctctccattccgctcggtgaggtgcggcgatggtctaggcctccccaccgatggatccgactgccctcgctctgggctccagcgtcgaggatgtcctgcctagcacgcgttcgtgcccacgctccctcggcttctccatacacccgttgatctcgtgcctaccctaacgactagatgacgagttggcatctccttggtcttcattgcgtcccttgcatgcgattctgcagccaaacggtgggctcgacactagcaaggtcgtgctcgtgccgtcacttcctctggtacctccaatctctcctctagctcttacctcctctcttatgccaaaggcttcctcccgattgacaacccttctttcgcagaggcaacaaggatgccccgtatggttctttgctcgcagttggggctttcgttcattatatcaagcttaggatacctttgaaatgtatgcaatgattctctttggttgctaaggtaaagttctttttgggctgattcagttcatattatgtacacaagaaacataatagtgctgatctagctcaaagccttttagaccatactataaatgtcctactgttcgttgtttatttatcagtgcttattaagcttctctaaatgcaagtatccctcccagtgcatatgaagtggaacatgtctatgtaagttctgttttgcctcgatacgaatcaattacgttgtttgaacatcatatgaagtcattgtaacctatttagaactggaattttaacaaagattgtcatatgaggtgcatgataaagtctttgtcccctaatttggttcctcttcttagctagaggtatactaagaaatactagctaggttctctctttacgagcactaatgcatttttgggaagtatgatatctcatctgaggtgtgtgaattcaggcaataaagaaaaacatatactactgttatagtttttgtttacaattgaaatagttattgataacagaaatatgcttaacatgctacaagcatagtcatattgctaaaatgtgacatttcatattgaagactatggccctgtttagatcccaccccaaaatttttcaccctgtcacatcgaacgtttaaacacctgtatgaagcattaaatataggctaaaaaaataactaattgcacagattgcgactaatttgcgagacgaatcttttaagcttgattgctccattatttgacaatgtggtgctaaagtaaacatttgctaatgacgcattaattaggcttaatatatttgtttcgtggtttgctgacggattctgtaattagtttttttgctagtgcccgaacaccccatgcgacaccctatataatacgcaatgtgatatgccaaaactttacacccctggatctaaacactccctatatattatttgagcaactacctgtgttccaaaactatcaaatatttcatttcaaatggtcaggtaggctttcagttatttacagctagttgggatagtaggatattggatgaggtagttcttataatgtaggaactacaatccattgataatgtttggaacttactgacaatgatagtggacatactgatatttgaatagtgtcccatgtgttttattgctaatttttgtttacacaaatcattcataatagttgggaaatactgctagcccaatgcgttatggggaacaaaagcaattgttgctttctcatgaaaatgatgtaattatttggaaccaatgtggaatatttattctccttcaagttttgtctgaatatacaacagatggatataaagttgaaaccactttctatgcatgaaacacttatttttcttctttttaggcaagtttatggaggaagctacactttgtcgtgaagatcagagtttagtttatttgcttatttccactgcgtttgtaagaattatttattatttttgtatgatgtggatctctgtatcaatttgtcgtttgtgtactctggctggtcctggacagagattttaatacacattctgcttgaaattcgggttagcgaatttctaggcgtgacactgaccgggcccaccagggttcggccgaactaggacagcgcccaatcgcccccaaaatttgaacactcgatctgcctactctgtcaacagtagaaactgaatcattcgtgcggtagctcgttggatcgacccagttcattaaaatctctctcttgttcatctccctgtccactccaccttatccattcaagccactactctctttagctcgaatccataagtccagtccatacccaagatcttcaatggctgggaaatccttgattccgtatggtgctacatgctgaaacgcatttgatctcaatggagagccctctccggcgaatcaattggtttcgggagaaaactgggcgatggaagaggcaaatgcgatcttcatagaccccctggacaccatcgcggtggactccatgagtatgcggccgatcggcgctgctcctagtttagccgaacctaggtcggccgaaccctggtcggcctcgatcaaccccctgtttggccgctcgcccagtctcgccacgctacaaaactccgactaaagtacggggtgtttcccaagcgcagaggccgacgacaggagaattgggtctactaaagcgagcacgatgactttttgaagacaaggagaaggccacatctcccgccagcgagcattatgtgggatctcttgatgtgactgtcacaccccgaagttctcctcccaagccaaaaatttaatttataagcgaccctaagaaaaaaaccggtgcaaagcaagagtaaacccttttaaatcaatgcaaataataatcgaatctgacatgtggaattttttcttgagttctacatgtcgaaattcactaacaggatttttagtggaattttcagagccctagaaataattttaaccaattaaaattgggcaagcaatattctaattccaggaaaatccttttctcctttttctttttctttgtccctccctttttcggatgggccgccggcccattctctccttttctctccctcctccctactgggccgaccgcaggccgagacccagccaagccgcccctccctctctccccgggacgccgacaggtgggccccacctgtcggacccgtccccttcctccagccgcgcccgcaaccgccgcaaacgcctccgccttctccgggccacgtcagccacgtccgcgcgtgcgccgcatctcccacgcccactcccctttctctcccgcccgcgcccgcgcccgagatggccgggattcgattttcgaatcccgcctctctctccttcctcactccccacgttggccggcgaaatcccgcctctcccggccacgtccggcccttccctcccctatttaaccttccccgtcactccctcttgctttttccccatttagccgaactttcccgagctccccatcgctcctgcgccgtgcaaccacc

SEQ ID NO: 10043 - DNA, 9246 bp, Oryza sativa
ggcatggccgccttcgggcgcaccgagtggctgccgcgtggggcccagccgtcagccgcccgcgccctcgggtgcggctgacgtgtggggcccacggcgtcggcaggtgtgagcccgggtgcacctggtccaccgtggaccgtgaggctgccgcgtgggtcccactcccatggacccggtccgcgcgcccctccccctcggctgatgcaataaaccctttttaaattaaaatttaaatgaagaaattcgcaaatattcatttaaagagcatataaacttcaaatggccataacttggccatttgaactcggaattggaccgttcaagtctctaattattccttaagaagtcaagaacccatttttgtgctttgttcctgcttgttatatggagtttattagagtaaaagccttttcttttccgttggtcatgtagacgctgcagcttcggaagatccgctcttcgtggaggttgaagccgacgttttggaaagcgagcaaggcaagtcacatcatccttgaacatattgaatcccaatttataaaattattttgatttaaattattgcattatcgctttatttaaattcccgtgttatcactgttttatttagccatgcctatttacctttgttatgaccttattattattgctattgttattattaccttgttcaccctagaataaacaaaaccccaactagtggacactctactcatggtaccactagtatgaatttaggtagatgtttcgccgcttaattaggcaacattaggtggttttacaactctagactttgggaatattcatatcacctggacattatggaatggttggattattgtggaattggattcacacctccccctctattcaaaaccctcaaaatggttttaggctgggctcggggtgcatggttttgatagtagcacctcggccatataaggaccggtcttcgggcctctgttgcaaagcactaccatacttccacatttctagtgggtaaggcttagtttgtggctcagtctggttataaacaaaagtacacgagtggagatggacgaagtcgggggtcgatggacatctctagggcaaatgaaggctacacgagctgcggcccggtagtcgagatgtcatggcacagggccgatgtcctgctgctaggggctcagtcctgcctacctgtcccggaggttccggccgtaggtggggttgggtcggtactcttgtgtatggctaggatgggttggaaactatgtcacgtcttccatccgtataccgtggtggtatgtggcacgtggttacacgtgaggaagatgtgtcttgtgggtaaagatgtacacctctgatcagagtataacctattcgaatagccgcgccctcggttatgggcaagccgagcaatgtacccaagttagtgttttaattcttaaaacctgcttaacaactaaaatgtggaatggttggcctgggttggcttgggacaagctgggacccagggtcgggttgccagttcggtctgaatcatcgtaggccttgggttaaggcaggttcgtgtgggttcacggccttgattaataatattgtatagctctagggtcgtatttacaaaatagctttgagcaactaagtgtcttttaatgctgtttactgcaaaccctaacccctatattatggctcccttgtactcccttgcatttattctgcacttatgggtgtgtcttattgagtacggtggttgtactcagtcttgctcaatttttcccaaacccagaagaggagttcctggaagatgaaggctttggtgtctagctcgtgcctgccgtcaagcgcctgtggtcgtcgccctagtcttccgctgtttttcttttgtcttcttgtgtgctaggcctttgccgcccatgtaataaattaactatttacgcttccgcttgataaactctgaaatgtatcaacttttggtgtaccttgcctcctgggacaaggaataatacacgcacgtaaggaactcccgttgggttatttccggtcgtgacaagttggtatcagagcctccttgaccctaggatgagctttagatcccaagtcttagcaatattttcgaaataaaaatccttccttatttgttaaaatcctctagtctctctctgtcctgctgcttcatttatcgtcaaaatctgatctgtaaaatgttgcttttctcttttgtttttgtttgtagatggccggtagcatcaaccgtcgtggcctggacctgactggcttcgttttggagctgcggggcatgtgcgttgtcctggggtatccgcatggagtggactaccaaggcaagcagctcccggagcaggagggtgacgatgcagagccccacgctgcttgggaggtcactgcagtgatcctcactggctcacccgagaggacttcgttggcagtcaccgcgggtggagattctttctccgctgcttgccagaacgccgcactcctcgccattggcactcttcaccagtgctacccggacgagttgcagcactcgccctaccgctaccaccctcgtcgcggaggagcccgtgactacgccaccttcagggatgctagctcggaggatgacgctaccatcatgcacttggcgcgcatggtggaggcgtacgacgcagcccgtatcgacttccatcatatggtgcgccgtgggttggtcgagaacaacatgaagatcctggagctgcgtcaggagaatctgcagctgaagaaggacttggacacggtggaggcgcagctgtgtcagctcaagatcgcccagggagaggtctgtcgccccaagcgccgccgcgtctgccgcagtatgaagatcaccgcccgcaagagtacctccaggcccgagcttgttcgtcagtccttggcatggacctgcttcgtcgagacccctcgcgccgagcccgcaccctcggttcctcaggaggagggagcctctggcgttggcagcacggaggatgcgctgctgctcaccttccgccctggctcgtcgcagaagtagacgagcagttagtaggctcgcgcgtgtgttcttttcgtttgttttcctgctagagtcgtgtggggcatggttataccggtgtgtggtataactgtgtcggagcctgtctttattttatttgcttaagcaacttgaaccttaatgaacgaatttaatagcagtaataaattcaagaattatggtagtcgtgggtggttagttttaatagtcagctctctctgtttgccggttctgtgtgggattttcagatggtgacaaccaggagaagtgctgctaccggtgaaggcagtcaccccgaaggcagcaaccacaacaagcatggcagcccacctccacctccttccccgccaccaccaccaccaccagacaccaactccatcctcacccaaatcctcgcccagcaggccaacatgatggctgctttcctccatcacatccaaaatccgccacagcataatgctccacctccaccaccacccccgcaacattctaaactcgctgagttcctccgcatccgtccgcctaccttctctagttccaataaccccgtggatgccttggattggttgcatgccgtggggaaaaagttggataccgtgcagtgcaacgatgaggagaaagtcatctttgctgctcaccaactgcagggacccgcatctctatggtgggaccacttccaggctacgcagccaaaaggacagcctattacttgggcccgcttcaccgccgctttccggaggacccatgtgcccgccggagtcatggcccttaagaaaagggaattccgggagttgaagcaaggcaaccgttccgtgatggagtatttgcatgagtttaacaacttggcccggtacaccccggaggatgttcgggaagatgaggaaaagcaggagaagttcttggcaggaatggaccctgagctgtccgtgcgtctggtctccggggattatcctgatttccagcgtctggtggacaagagcatccgcttggaagccaagcacaaggaactggagtcgcacaagcgtcgcttggcgaatttccgcaatcaacagggggctaaccaaagggtccgctacaccaatccctacccagggggatcctcctcgtagcagcagcagcagcaacctcgctccgcgccccgacctcaattcgtggtgcgcgtcccacagccgcagcaatagcagagtcagcaagggacccgtgcgccccgtcctcctacgcccgttgtgcagcctagtcaaggccgcaaagacgctcaaggtcagcagcgtctgtgcttcaattgcttcgagcccgggcactttgtggataaatgcccgaagccgcggcgccagcaaggccaagcgcctccccgccccaacaacggtggtaaggatgtcattcggggtcgtgtgaaccacgtgactgccgaggatgtgctgacgactccggacgtcatcgttggtacgttcctcattcattctattcctgctaccattttgttcgactctggagcttcccactcatttatatctgtgcccttcatggggagaaatcagttgggggtagaaaggcttaggaaccctctgctcatcaccacccctggaggggttatgacagcaaagtattatagccctgccgttcctatagaaatccagggaatcccttttcccttggatttgattcttctggacaccaataacttggatgtgatccttgggatgaattggttggctcaattccaaggagtagtggattgcgcaaggcgcactgtcactctgtatcgggggccggaacaaccggttgttttctttgcaccctcaacctctgtcggcagttcagaacttcatcagataggactgtcagaaatacccatcgtcagagagttcggagatgtgtttccggaagaactacccggtatgctgcccaagcgagagattgagttccggatagatcttgctccaggaaccactcctctatacaagcggccctaccgtatggccgcgaatgaactggccgaagtcaagaagtagttggaagagctgaaggaaaaggggtacatacggccgagcacttccccctagggtgctctcgtgatttttgtgggaaagaaggacaagacaaagaggatgtgtgttgactacagagctctcaatgaagttactataaaaaacaagtaccctcttccccggatcgatgatctgttcgatcagcttaaagctgccactatcttttctaaaatcaatcttcgctccggatatcaccaattgcgtattcgtgaagaagatatcccgaagaccgcattcaccacgcgttatgggctgtatgaattcacggtgatgtcgttcggtctgaccaatgctcctaccttggataagtttgttgtggttttcatcgacgacattctggtgtactcacaatcagaggaagaccatcagcagcatctccgtctagtgttgggaaagctgcgggaacatcaactttatgccaagtttagcaagtgtgagttctggttgtccgaagtcaagttcttagggcacgtgatatctgctaaaggagttgctgtggaccccgaaacagtgaccgccgtcactgattggaagcaacccaagacagtcactcaagtccgcagctttttgggtttggccgggtactatcggaggttcatcgagaacttctccaaaatcgctcgacccatgacacagttgctgaagaaagaagaaaaatttgtgtggagcccgcaatgcgagaaggcattccaaactctcaaggaaaagctggtttcctagccagttttaatcttaccagatactcacaaggacttcctggtgtactgtgacgcttcgcgccaaggattggggtgcgtgctcatgcaggaaggtcatgtggtagcctatgcctcacgccagctacggtcccatgaaggcaactaccctacccatgatttggagttggccgctgtagttcatgctctaaagatctggcggcactatctcattgggaatcgctgtgaaatatatactgatcataagagtttgaaatacatcttcactcagtcggatctgaatcttcagcagaggagatagttagaactcatcaaggattatgatgtgggaattcactatcatcctggtaaggccaacgtggtcgccgacgctctaagtcgaaaaagccgttgcaacactctcggcgtctgtggcattccaccggaacttaatcaacagatggaagccctgaacctaagcatagttggtcgtggattcttggctacgctggaagccaagcctaccttactcgatcaaatccgcgaggctcagaagaatgatccagatatgcatggactcctcaagaatatgaaacagggtaaagccgctggtttcacagaggatgaacacggaatcctatggaacggaaatcgggtatgcgttccagacgacagggaacttaaacagttgatacttcaggaagctcacgaaagtccttattccatccaccctggctgtacgaagatgtacttggacttgaaagagaaatattggtgggttagtatgaagcgggagattgcagagttcgtggccctttgtgatgtgtgccagcgtgtcaaggcagagcaccaatgaccggccggacttctccaacctctccaagtaccagaatggaaatgggatgaaattgggatggatttcatcaccggacttccaaaaacccagggcggttatgattctatatgggtagtcgtggatcgactaaccaaggtagctcggtttattcctgtgaagaccacctatggagggaacaaactagccgaactctacttcgctaggatcgtaagtctccatggcattcctaagaaaattgtatctgatcggggaagccaattcacctctcatttctggaagaagctccaagaagagttgggtacccgattaaatttcagcaccgcgtatcacccgcagacagatggacagaccgagcgtctaaatcagatcctagaagatatgcttcgcgcatgtgtcctagatttcaggaagacctgggataagagtctcccctatgccgagttctcctacaataacagctaccaagccagcatacaaatggcaccctacgaagcgttgtatggccgcaaatgccggacaccgctattgtgggaccaagttggggaaagccaagtgttcgggactgatatcctgagagaagctgaagctaaagtcagaaccattcgggataatctaaaggtggcacagtcccggcaaaagagttatgcagataaccgacgccgtaacctagaattcacagtggacgattttgtgtacctacgggtcacgccattgcgaggagtacacaggtttcagacgaaagggaagctcgcacctcggttcatgggtcctttccgtatcattgctcgacgcggagaagtcgcttaccagttggagctgcccgcatccttgggcaacgtgcatgatgtgttccatgtgtcgcaactcaagaaatgtcttcgagtgccatcggagcaggccgattcagagcaaattgaagttcgcgaagacttgacctacgtggagaggccagtgaaaatcctggacaccatggagcgcaggaccaggaaccgggtaatccgtttttgcaaggtccaatggagcaaccacgctgaggaagaagctacttgggaacgtgaagacgagctgaaggcagcccatcccgatctcttcgccagttcttccgaatctcggggtcgagattccgtttaaggggggtaggtttgtcacgtcccaaaacgaccctaaaatatatcctttaaattatgcctagaataattaaaatccgtgtgaaagcctccaaaaattaaaatgtgcaaagtaaaagttaaacaaggcttagaggatttttgtatatttcctaaaagcctaaaatgtgtaaataaattttagtggaattttcggagcacaaaaaaaataattaagaagaaataaacaaagttaaaaaggttttataaaaaagaaaaaccctaaaagtcccccttccctcctttgggccggctcggcccatctccctctcccccctctctctctcctctcccacgcggcccattcggcctccctccccacgcgcgcgccgcttactggcgggcccgaccgccaccctcgctgacgggtggggcccacccgtcatccccgtcctcccgccgctcccgccggcccgcccgcgccaagcgccgcctctcgtcgaccgcgccggcatggccgccctcgggcgcaccgagtggctgccgcgtggggcccagccgtcagccgcccgcgccctcgggtgcggctgacgtgtggggcccacggcgtcggcaggtgtgagcccgggtgcacctggtccaccgtggaccgtgaggctgccgcgtgggtcccactcccatggacccggtccgcgcgcccctccccctcggctgatgcaataaaccctttttaaattaaaatttaaatgaagaaattggcaaatattcatttaaagagcatataaacttcaaatggccataacttggccatttaaactcggaattggaccgttcaagtctctaatttttccttaagaagtcaagaatccatttttgtgctttgttcctgcttgttatatggagtttattagagtaaaagccttttcttttccgttggtcatgtagatccgctcttcgtggaggttgaagccgacgtttgggaaagcgagcaaggcaagtcacatcatccttgaacatattgaatcccaatttataaaattattttgatttaaattattgcattattgctttatttaaattcccgcgttatcactgttttatttagccatgcctatttacctttgttatgaccttattattattgctattgttattattaccttgttcaccctagaataaacaaaaccccaactagtggacactctactcatggtaccactagtatgaatttaggtagatgcttcgccgcttaattaggcaacattaggtggttttacagctctagactttgggaatattcatatcacctggacattatggaatggttggattattgtggaattggattcacacctccccctgtattcaaaaccctcaaaatggttttaggctgggctcggggtgcatggttttgatagtagcacctcggcaatataaggaccggtcttcgggcctatgttgcaaagcactacggtacttccacatgtctagtggttaagccttagtttgt

SEQ ID NO: 10044 - DNA, 2721 bp, Oryza sativa
ccgttccacttccagtaattccgtaaaattgagatctatttaatggcactattaattagtctaaataggatccttctttggtcttttgtttaggttttcgattgtttgtgtaaagttgcggttgcggattttcgtcgatcgcgggttttctcgaagattcgtgaagcttcgtgaagaccttgagcaaggcaagtcaccctttgaccaattgctcctataattggaaaatcattattattttgtttgcaactggcattattagaatcacacacttaacttgcttggcctcggtttgcgtgccaaaccgacggacctacccagtagtcgcactaatttccgtaggtcgtactaccctgatttccttgtcactccacccttgtggtacctcggtattcgtgctctctgagcgcatataccaaatatcccacatacaccgttgtttgtcgaaaacttgggaaatgggtttgtgaagccttcaaaacccgacatgtggtgtcggtttgtttgaaaataaaaggaattgtgaaaactcgcgatgcgggggttgtgcctatgtggcactgtcccgtattcgcatataaggaccgattcctgtgggaaactcatcgaacataatcaaagtgcaaccacaaggtggaatgggacaccctggctaagtaactagtcggttcagggaaacctcgcatgccaatagttgggaacgccggggcggggtcggttggagccaaaccgggttcctggtaaggcaagaacgagaagcttgctcacttaccgatcaaggtggttggagttgatttgtgaatgcctaaaatggcctatgtttatgtgagaatttgatccttctatgtggcatgaggtaaccctgggtcggcttaggaaaggctttgtcgcgaacctctgacaccggccagtgtctggagtaagttcgtgtcttgtgggtaaagtgtacccctctgcagaggttaactaactgttcgaacagccgtgcccacggtcatgggcggatgtgaggtggttcccgttgcgtagatttgtttgcctgtgctttgtgaaaagttgttgtggtgtgggaatcgtaaccagaatcagcctatgtggcagatagacgacctgagtggtcagaaacgaatctatgtgattcgggatgtctgtgggcatcatagactaggcttcccgagtggaagcggattgttgtgctgctgggcagctggactctgggagtccgagaaaatgaaaaaggctctgggagccgattaatcaagtggaatggctctgggagccgagaagtaatgatctgacccgggaggtcggtacattaccaaatgagctgttgaaaaacatctcttaaagtcgaaacgagacgcaagtctcttttcggcccaaacttagaaagaaataaatcacttagtgttttcaaaatgtcttcaaataaaagatttgcaaaacaaccttgcctctcttccaagcttgcattaaacacctaagttcccgtgacttgctgagtacgagagtactcacccttgctctatatatatatatatatatatatatatatatatatatatatatatatatatatatatatatatatatatatatatatatatatatatatatatatatatatatatattctttgaattgcttcttttcttcctgctcagcaacttggatttcttccaccggaaatacctggctcttggacacatcaattactgccatcaacaagaaaccgtccaacgatcgattacaactgctgccacccttcacgagcctgactattactgaattgggctagcaatcattatctcctgatccattccattaatccattccattaatcgaaagacaaatcttttatgaaccgagccttcacttgatattccagtaccatgataacaagaataattgctctacttaatgtgtttacttttccataacaatacaaactttaacttccatttacttcacattgaagacgtgagaattgaatcttcttgctattttttcttctaaatcaacatctctttacattcctcgttgttgaatgtcttagccttactgacactattcttttgacttaaaaaatagtgcaaaaagaattgtcctttcagacaccttgatataatcatttcttctataaaccacattgtagtgggaataatcatcttgatgacatagatgtaagcttttattttccttattccttattgactcttgctcacatcaaacttggaaccttatatcgtgagataccaaatgtgaacaattctcttgaattttttttcaatggcgtcccttgagcttctgacttttaaccttccttggctgacagactgtgttatccacaacagcatctggatgaattttatttggagatccagacacattgttccttagctgaaataaccaggttgagtatattaaatgtttacttgtttaaaccactggcaccgttgagcacaaaacttcctttcctttaattcattctcttaggtaggaggtaagagagagatagaaagggaagagaaagtagataggagactcaaaatagaatagactttttactaagctttattttttttattgatgtgaagtaggttgttttttaacactaaactgaacactgaaactagtatggttatatcacaaccctcgatatactccatacgctaaaacccacacacacacaaacaaaacttaagcaagcaagctaacaca

SEQ ID NO: 10045 - DNA, 44233 bp, Oryza sativa
ggcaacccgagcaatgtacccaagttagtgttttaattcttaaaacctgcttaacaactaaaatgtggaatggttggcctgggttggcttgggacaagctgggacccagggtcgggttgccagttcggtctgaatcatcgtaggccttgggttaaggcaggttcgtgtgggttcacggccttgattaataatattgtatagctctagggtcgtatttacaaaatagctttgagcaactaagtgtcttttaatgctgtttactgcaaaccctaacccctatattatggctcccttgtactcccttgcatttattctgcacttatgggtgtgtcttgttgagtacggtggttgtactcagtcttgctcaatttttcccaaacccagaagaggagttcctggaagatgaaggctttggtgtctagctcgtgcctgccgtcaagcgcctgtggtcgtcgccctagtcctccgctgtttttcgtttgtcttcttgtgtgctgggccttcgccgcccaggtaataaattaactatttacgcttccgcttgataagctctaaaatgtatcaacttttggtataccttgcctcctgggacatggaataatacacgcacgtaaggaacgcccgttgggttatttccggtcgtgacaggttattgctaccgaagtctaatttggttccgagaggggggcatattaccactaattgcatagtgtgcgattgtaatttttttgttgcaataagtaggaagtatcgcaacaaataaatttgcgttaaaattagggtgacgatattgccgcgctttttgttatcgttgcaatagttatccatgtcgcaacgaatttagagcgttgttattagagtcatgtatatagcaacgcgaaactactttgttgcaaatgagtctgtagatattgcaacgcaaacctaaatcattgaaaattagtctataggtattgcaacgcaaacctaaatcgttgcaaccattcttagatattgcaacaaccaccggaaatcgttgcaactaacaagattctctcgcaacaatatttcgtcattgctatagtttaacgaatcgttgcaataggtgaaattggtggtgccacctacagattgttcatgggcctttgtattgttaaactttaacttgtttgcatcattgtggcccgggtcggggtcatgacttacgtaattaagtcggcccggccaattagctgggctgtatcgtgtaataaaaacaggtacgattaaccctacccttagcagtcgatagatagatccctgatcatagactagctggcgccagcgacccttttatatcttgcacaattgccggcgacaccgaagcactcgacgctagcgagaccacaccctgtccctatctcccaactcgatatctcgacgccgttcgaatcgatccctatatttatatatattcaggtacctcttcgatcacgagtgcaatgaaaactattgattctttattttctatatatctatgtaattaaaaattggcttatttcattgcataccaccccttaggcaaatttggtaacaaattttctcaattggaatatggcacgtgatgatgatcatagttggatgctattgtctcagtcagattgtgtgtggcaagttggatttgaaaaattcatttaacatacatttgaaggtacccatccaggagggactgcggcctgtccatgtactaggtgtcgttgcatggcatacagaacgaaaattgaggttcaacaacactttgcttggtagagggtttgataaggatttcataaaatagaaacattctgttagtaaacctatggttgtggatgatcaggagattagtgaagccgaagttgatgatggcggctctatcgataatcggctttcttcgctaatcagagatagtaatattgaggtgccaaatgagtcagcaaagaattttttcaaattaatggaagaagatcggaaagaattatacccagggtgcaaggaggctaccatggtatctttcattgtcaggctatttcagattaagtgcatgtatggtatcagtaacaatgccatggagcaaatacttcacttattctgtcttttgctccctgagggacattgtgtcccaaatactttggataaagttcgtaaggtagtccaagatctcgggttggactaccaaaagattcatgcttgtgtcaatgattgtgtgttatttcgtggagagtatgataatatgaacagatgtccaacatgtggggagagtaggtggaaaaatatatattctggagaactcggggaaggcagtggcattggaggagtaaagaaaaaagtccttcgtcctcgtaaaatacttaggtattttccacttattccttgacttcaacgattatatatgaatgacaccacattgacctatatgcgttggcacaaggaagaaatagttgatgatgggaaagtgcggcacccagcaaactcattggcatggaagcacatagatgaaaagtacggggatcggtttgaatctgatccacgcaatgttaggattggacttgcatcagacggcttcaatccatttgggatgttgaatgcgacttacactacatgggcggtgatcctaattccatataacttgcctccttggttgtgcttgaaacaatcttattggatgatatcgatgctggtacctgggcctagatctccaggaatgaacattgaagtatatttgcagccactgatcgatgagcttaaacagggatgccaaggtgaaaaagaattttacgcttcgtgcaattctgctttggacaaaaaacggttttcctgcgtatgccatgttatcaagttggagcagaaaaggcaagtttgcgtgtccttattgtcacaaggatactgaatacttgtggttaaaatacggcaagaagcattgctacatgggccatcgccgctttttggcttcaaaccacaggtgtagaaagaacaaggttagcttcaataacaaggttgaaatgagggggactccagtggcactcagtggtgacgaagtattgaagcagtacgagagttttgagcaagtcaaatttggcatgatgtcaaggaagaggaagcaacgagatgaagatactagatggcacaactggaggaagaagagtattttttttatcttccttactggaaatcattgcttatacaccataatctagatgtgatgcgtattgagaataacatatgtgagagcttgctaggtactttgcttgatttaacaggtaaatctaaggacagtgagaaggctcgacttgatttgcaagaattgggtattaggaagaatcaacatctattggtccataaaggaaaatacactttgtcggcagccttgtacacgttaagtccaagtcagaaggaaattctatgcagatttctacaacatgtcaagatgccagatggttatgcctcaaatatcaagagatgtgttgatgaaaatggttggaaggttagtggacttaaaagtcatgactaccttgttttattacaaaaacttttaccattggtggtatgccatattttgcctgaagatgttgtgatcccattgatcgagctcagcaggttttttaacaaactatgttcaaaggagcttgaggtgactgaaattgaaaaactttgcaattcgattggagagaccctttgtcggcttgagatgatattccctccatcattttttgatattatgatgcacttactagttcatattgcttcggaggctagaattagaggccctgtttgttatagatggatgtatcccgttgagaggtacctacgtacccttaaaggctatgtgaggaacaaagcgtgcccagaaggttcaatagcagaggtatatatctcggaggagtgccttactttctgtgctcggttctttgaagatgttagtacaaaggtgaataggccagaacgtcaagaaatgtaacaccctgaaaattcaaggcaataaaaatcactaaatgtaacatacccgaattctaggattaaggaatttccatcaaaactagttgaaaggaaagttcttcaattttgtgaacgaaaaatttccattttaaaccctaggtgaagttaatctaacttgtactgaagtaaaatctgagaacaaattaaaaccttttcatctttaacctataccatagatgcaaaaacaagtgaaagcatgcatactcgtttacatcatgttttgacttaagtccttcttatgcatttggattttcgttttgcatttcataataggtctcatgaataataactaagatctagataaacaactaaaccattagggcctagtgctagctagaggaagttaaaataggaaccatacaccttaaaatatatcaaaaaggcctatgtcaagccccacaaaactaaatttggtcatccatttgaagacaagtcataaacatggaagtgaacaaataaattaactcatatagggtatattctatcttaatcatctctataagcattctcttaatttaatactaaagtaaacttatacataaataggtaaggagcttacgacatgtgtaaggtaaactataattttaacatatcaacatcaccttatgttaagaagagtccaaatataacttttataaacatttacatgcatttaggcaaaggaaaacacatataagagataagtcttactaattatctataataattcgtgaaagataaaatcatgggaaaaattcatgtaggctctaattaacatatacaactcactgtaattttggttcaatttaataacaaaatttgatacctcaaataaatcagtcaaaccagttaaataatagactaattaaaattcctaatcggctaaaaccatactttgtttaaaaatgcatttaacttcatgggagtgtataggggaaacaatttattcaaatactaggtcatttattatgaataaatatattttttccagaatttatcttctctgtttaggtctcctaaaaattcaaacagtttccattgagcccttcttcttttaatttctgtgagcaatctatccataattcgtgagtgaaaccaaataaaatggaaactaggtacattcatctacttccagtaaaatccacatgaattgatctgtaccccaaaaataatatatgaattaacaaagatgggtaagagaaataatcctgaaaatttgtctaaaatcacttacacccaattatctacccatccctcacaccaccacctagcttacaccgacctggacccacctggcagcctccttggcttgcccttcctctgtgcaacttctctagccgaccaaaactgagaaagagaccgagccaacagccctcaggcgcgtttgacacgtggccacgacgtgtcgacgatctaaaaacgccgagctccatctccgcctctcccagacgcgtcgtcactcctcacccaccattccagtgccgatccaaccgagggagagcatccttgctgcccttctccaccgtttctctatcgccggtcgcgaagaagatgatggccacattcgttgatgagccacggtcatttcctcttcttttgcattccaaaacctactctcgatgccatctctatttcatctaatttcgtcccattctatgcagcggttgagcgggaacgccaccgtgcccacaaacgccctggagcgcacaacgacgaccgctgtcgggttctcgtcgtcgttctaaccaaaccgaaccaccccaagccgaacccttgcgccaccagaatcgcctagacgtcctcttcaagattctccaagaacctcatggatcggtgaatcgaggagggatatcggcgtcatcttctccatctccggccgccgacatcgatcttcgattccttgatcccgggtgagcttcagcgcaattcctgactcgtgtagcatctttagatggtctttgagccgttccactctttttcttggcagcccggagtccggatggtggttgtcaccgttggcatgccgatttccgccgccgtcgggacatcctctgcatcgtcgtcgctgtccaggcctacccgtaccgcgtccgagctttggtgagcaccctgcagcctatagaacatacatgcatgcatccctttgggtacatccagactatagcatgacatgcaccaccacccgaaaacatcctctgctcggactcgccgctggcgctactccaatgtccgctatctgataaatgtataggaatggaatcgaaataacatgatcttcattttgtattttggtcgcacccccaaacgagccatcgtttgtcgccggcgagctcgagatcgagctcagccatggcgctctgttctgtccaggtcgcagggacttcgctttgagaatttaaacaaatataagggttaatatgaaaacatactaaacactgacatatgggcctaggactgcgggttggtttctagaaatctcaagggccttcctgcatattggccgtatgactgacagcggacccctagtaacaaaatctgagattatgtaagaaaagtacctaaaacttgtaaaaaatccatagaaaatcaaatataactcattttgagatgattatgtaaactcatataaggatgaactttaatgttatgaaataaaaacttacacttgcagtacaaattacacctctaaaatttatttaagaaaaaaatatacataaagcatgcacaaacttataaaatgcatacaaaattcatctcaactcattttagggtaaattcacatttcaaggaatcataaatttgttgtccactgtaaagtgaaataaaataatatacttactttgtacctgatgcctctaaaactattatctttaaaatgaatagttttagataagctgaactttagaagttcatataaaattcatcttagatcctttttgagtaaacccaagttctgtagattcaccaaaacatatacttccaatttgtaaaataaaatcatatacttactgtgtaataaaagcctctaaatatttatgtaattaataaccaacatagagcaacatttaatttgtaaaatttgtagaaaattcatctttagtctaaatgaagtgaaccaaatttctataggaccagcaagtaatgtaattcaacctagtagagtgaaatatggcaccctctgttcataccatagctctaaaccttaatttggtagtataggtactaaacacataatagtggttaaacaatacatataaataagtatatatatgcatggtagctccaaataattccaaataaaacttgttaggaccagtggatccatagttccatccccatccacaaaaacttagaagaacttagctcatataataatttctagattgatataatatattgctagcatagactagagctcccctagtttataagaatatgaactatgataataaagaccataagcttatgaactaaggttagactagttaactaaaatactcattttgtacatcactagctagatgaggcaagttctggacctaaacctctaaagccatgaccctatgtaacactatacacctataacacgttataacttgtaaaatacataaagaattcatattaactctaaaaattgtgaaaccaaatgtgttagtcttagaaaacacatatcttcaccttaataaacttaataagaatcaccttacaacagcatttcataatagtacctaagtaaatcctacactataccgacgaaacttctaaaattcataactctcaaataaaatgagataaaatagaaattctttcacctaaattcattttagaccagtacctattcactgtgcacaaatcatgcattttagagcattttgtatttttcacatatttcggtgtttaattgcattaggtgtactttgtatagatgattgcttaaacggtgaagaagtgaattaggtgctgacattttccagttgcaaggcaagtcccaccttcctctctttgatcattttgaacctttattttggaggttattgcaaatgtttgcaaatcttgcatgtcgattgtacactaataaattaaaattttcttaaacttgttagaaaaactcctattatttgcattatcaccctaaccccacatatatccatatccatcattcctaaccataggaacaatatgactatgccactttgtatatgagtttagatgccactagattgctataatgcttagccatgcttacaatggtcttccttgtcattatgggctcattacaaacatgtcaattgattttgaaataatctggacagaactttaatacttgtgattttgataaataaaatgatggaaaacgtggattttaggtttgggctcaagtggtgcacatatggtgattagttgtgtaccgatagggggagagtgcacccaaaccgacttaaagacttcactcaatgtcagtccatttcgtatacagtacaaccacatgtgctagtatgggatagcccaagcttagtaaatcatttatggtttagccttacattctggtaggccagtgtgggtgggttcccgttgtgtccgccaccacggcgttaagtttaaggtgtgggcccgccacttaacggttctaggtcatataacgtgtaggcttaggatggagtaacacgtatcgtgctggtgtaaggctaaatcatgaattttgaaaaagctttgttgtgggtaataaatcgggtacttatgtttcgcgtgacacgctcttgcatgattattatttcgcatcatgtgggtaaagtgtacaaactctgcagagtaagaactaatcgattagccgtgctcacggtcataagcagcatgtggatatgtattgagtatagacttgtgtttattcttctaaatgttgaatttaccttcaaattatgttgagatttgagaatgatctccttgctgccatggatggcaatgaggtgcacatttatacattattaatgcctactttgatgcccatatgctaagtactagcttgctgaaatttatttgaaagaaaatttgatttgaatgtggtttatgcaaataaaacttgctttgtgctaaaaagaaccatatcatgccttccttgattatatgccttgcaagtagggtgttaggcttgtcttggtgcttgccagtacattatttctaataatgtactgattcttgccgttgaattaaccttttgcttgcaggttttagatttagtctgtgagtgatgcgcgtaatcgactgcttcgcctaggatttgaacataatggggtaaactcctagtcggtgtgcttgtggattgggtagacaagcttccgctgttctatatatttatttggccggtcggcctatgtatctctaagttagttgtaattttaatcgctttcatctttatttgtgtttgctatgtatgtccatgcttaagatgaaagtgtgaatctagtgcacatactgggaattagattcacatgagtataagttaagaatatttgagatgttgtagatctttagctatttttgtcaagtctcctgaatgtgtaacacatctggtcgccgccttcgagtggtttgacgggcacatctcaggttgaagttgactggcaggatattcctctcttgaggcgtcggatatttcattatgcttgttagatgatttgaattattcatttcatctctcaattataatggaaggtccgaagagcctacaacactaaaattttgaactttttaaaacttttgcatcatgctggatgttatggttgctattgcttgccaaatcgtaaatgatcataaagaaattaaagaaaagatctacatttaagcaatagataaaatttacgagaatatattatttatgtttaaccctataaatacacacgaaagcaagccaaataaagtacaagtcaaatattaatttctattttgaatcacaaatcaaatattaaatattcgaaccatcttgatagcttgatgtcatatttaacaaaaggaaatactaagattaaatataattcatttggatccaacctcacatgaaataatggtcaccaccataagagcatctccagcagggtcctcaaacaaagtccctaaataagttttgagagttgatgcaaaaaatataggtccagcaaagtccctactagagcccccaatctagggaggcccctagatcactcctccaagcccccagtccggggggctcaaccccacagcccccatcctctttttttttggcgggggaaatttctgagcgcgcgccattgtcatcctccctccctcccgcgtcatcgccatcctcccacaacctcccaacgagcaagccgccaggtcgttttgctccggccggcgaccacccgacatccctcgggaagaaacttcggcgagattccacagtgtgccgcctcaagccatcacaatcatcggttttactccgtcactcactgtcgccgacctccttgcatctttggccaacgcgcgtcgtcaccgatcgatcacgcctaggtgagtctcgacgtcctccccgaactagctgctcacccgctgtccacaaggcctagcgccgaccatcgacagctatctatcaccggccgcacacatgctgcagtaaaaaaattcagagatgatggtgattaaaacaaatcacaatagtaaagttcagtttcgtatgtctgagtctccttgtttgattttgatctttatgggcttcctaggcgtctaggcccatctaaatcattcgcacagcaaaacgtacattgtcatcattcatgttttatatgcaatgtcttgttctatgtcagagagctaatcttgctgagcatatataatatttaagaaataaatttgtgtttgcactgagtccttagtactgcggaaccaatatatatgctaaataaatacatattgcaaacagtataacctgatgtacattgcaatcatttgttgatgtttctgagatagattggaaaggttgtcaatttatatatttattgcagtgactagattgcaatgacaagtggaggtgattcctttgtgcgcatgatgtccgaggacactgatgtcgaagtgctaatgccaaatgaagaccttcgtacttcaacaaatggtgcaaaaggaagtgccaaaagatcaagcaactatactcgtaaggaggacattcaattgtgcatttcatggcagagcattagctcagatcctattattggcaatgagcaaccagggaaggcatattggcagaggatcgcagagcactaccatgctaaccgtgattttgagtctgataggaatgcaaactctcttgagcaccattggggtaacattcagaaggaagtaagcaagtttcaaggttgctacaatcaaattgagcgtcatcatccaagtggcataccacatcaagagcttgtaagttaaattgtttatttattattattaataacaatcttgtatgtatgtgaactaaaacttaaattatgttgcaggttcttgaagctgaggcattatactcgtccactgcaccaaagaatagggcatttcagtttaatcattgttggctcaagttgaggaattctccaaagtttcaaacactagaatcccacaagaggccacggtctaggaagtctttgaccccaattgagagagctggtgaagaagatgaaggagatgatgctagcaagagtacagctcctgatttatctcagccgagtgctaaaaagagaccaataggtaggaagcaagcaaaggagaagttgaagaatggaggagaagatggaccatacaaagaggcgatgaaagatttgcttgacgctaaagagaaagaagcgaaattgaaagaagagagatggaaggaaactaaggagattcaagagcgcaagctcttatttgctgagcgtaagttagtgtgggatcaagaacagaagattatgttttgtgatgtttccaccttggaaccggatgtgagaacgtatgtgttggctatgagggcacagattgcagcttcaaaggtggctgccctcaatggtggatttgatggtagtagtggctttggaggtgagtttggtggcggtaatggagaagtttgagcacttcgatggaataagttggattctattggatgatccacgtgtcctttactagtaggatatgccattatcacgattggtctttgaagtccttttttgttaattatttccacaataattttagtgtcacttgctagtaggacatatattactttcagatttgttatttataatcgaaccattcatggttgtaggatgtattatttttaaattatataatgcatcattgggttcacatagtttattttttatgagcaattttcattttcattggtgaattacgaatattggttgcatcttgttgtcgtatatggcactgtacccataccatatttacatgtttaaaaattttaattttgtattcgaattgtagtatttgaaattgtgaatttaagtatggttaaattatgtgagttagaaataattgtgttcgaatttttgtggtgttaaacatactgtatatggattgtattttaaaatacaagataaacatgagtagggactaagaaatagggggtactgctggagttggaggcattttttagtcattgagaaataggggcagcccttatttaacttttaggtgcttcaaaataaggtctattgctggagatgctctaatgaccctatctatatatttcactcgaatatttaacatatctttcttcacataaaattcacttatgtaaaatggttggtcacataaataactagagcaaatatatcactacctttatgatggatttaatggaatattttaaacctacatttagatattgagtctccaaaatatataagttctgatgaggacatcaacaccatcgatacatccatgtccccccatatacagcatgatggtcctattacccgcgctcgtgcacgtcaactaaattatcaggtgagttctttcttgagttcatattcctcgtctttatacctcggagacgcgtgcactcgtgttttactcaggaacgatggagaggatccaaagggaagaggattcgcgtggggtggattcggactgcagggcagcgccaacttctgacggccgccacgacttcatgcgaactccgatttgggcgtgcaagtacttcatggaaagattatcaagtctactttcaaatggatccagccacatgtccatatctattctggagcggccgcaattgtcattttactcccgactattttttgtccatggtgctgcgtcacctcttttggcccaatgggctgtgtatccatgttgggcccattaggggcgcgtcctagggttggagcacgaccctattgtcgttcttcccctctttttatacctctagtcgccgccaagaataggcgggttttgatgatagagatagcttcttgctaccggctcgcagcgcgcgtgttggctaaaccgcccgtctgcctgtaatcggaaccccaccatattgtgtttgatagtgaaactttcatctttatctagcaatctcagtgcttgtcctacttgttcttgcttgttcttcgattgcttgcaggacgagtgccctcgtggccgggttgacgcgcaccacaagttcgcggcgaccattggagacggtgtatcggttgctaaggcgcagcgtctttggacagttgtagtcgggccgtgaacgtcgacttcatctaatcgagttatcccttacctctcatcgaaagatcgggccacaaaccctagcgggttcgcatcaggtggtatcagagcgtggttcatcggtgagagaatttacccttcccttcgtcattaatttttttttcctatagtccagaaaagaccaacaaaaaaaaatagtagattagtttttcgatgatcctatagaccattgtgccttttccctagtacttgttagttaaggcttgttgagttttcgattgcatcggttgtgttaatttgctggtcttagtgttaggcgattagagtttcgagttcttgccaccaccgcacatcgccaccttcatcaattttgccgtcatcaccaccgtcaccaccatcgcagtcacccaccaaatcactttctatttgtgtttgatctgttgccgatagcttttgttagttgccttgtatcctgccgccactagaaaggaaatagaaccctgattcgagtgaccttccttaaaacagtcatatctttttcatacggactcgaaattaggcttataatatatccacggacatctacaaaaaaagttacatccgattctccccgctttgtcgggttcggcaaatttaaaatcgccaaattcctcttgcaaaattctgtttttgtggcgagaagcttcgggacctattcgcatagaactttaaaaaaattctacaagcttcatactttgtccgtttgagataagattttctgtggttggttctagtgtgctcctggttgtgaaaaaaatatcaaaaaaaaagttgtgcctctctcctcagcactagagagagcaagcaaaaaaaaaaagaggatccagcgagcacaccacaccattccccctttgtcaccaccttctaccaccggttcttgttttcgttgttgtttgggtttgtgttttgtggcgtcctttgtggttaggctcgcgtctctacttcgactagcctaggaccagcactgtacactatacccttgagcgattattcaatttgctttggctaacgtggtttctagttttctcttgagcattgctttcagcccaccaacagctccaccacaaacccgactacagcttgacaggtcttgttgctacagcaccgatacacctcgttccacggttgctaacttgtggtgttgctgtccccctcctgtgggcaaggtaagaactggtaagagcttgtgagacaagctgcgagtgaagtgagagtgagcgtcttgcaaaagctacatcccaatagttgtgtagggcttacattacatcctccattgttttgttgtccttcatttctaaaccatggcaggtccagaggataaagatgaggagggtgcatctcattccccacgcaccaaaggcatcatccaatactttacaaggcaagtgaagcagcacacagaaggacttgatacagatttgcaggtgacaaatgagaagattggacaataggagtccacgcagatctccaccaacactaagcttacagggttggagacagcggtcgcccgcattgacactagccttgctgctcttgtgaggcattttgatgctctcaatgctggaggcaatggtgggggtaatgacgatgacattgacggagagtacatcgaggataatttagaggatgaatatattgctgacactgaacaagatgatcgagatgctcaagatcgtcgacggctacacaacaatcgacgaggtatgggtggtcgccgccgacgcgaggtacgcaacaatgatgatgctttttctaaaattaaatttaagattcctccttttgatggaaaatatgatcctgatgcgttcctctcttgggagattgctgttgaccaaaaatttgcataccatgagtttcctgagaacactagagttagagctgctacgagtgagttcaccgattttgcttcggtttggtggatagaacatggcaagaaaaatcctaataacatgccacaaacttgggatgctttgaaacgggtcatgcgggctagatttgttccttcttactatgcacgtgacttgctgaatagattgcaacaattgagacagggtgcgaaaagtgtagaggaatattatcaggagttacaaatgggcttgcttcgttgtaatttagaggaaactgaggacactgccatggctagatttttgggtgggttaaaccgcgagatttatgacatcgtagactataaagattacactaatatgacccgattgtttcatcttgcttgtaaggctgaaagggaagtgcaaggacgacgtgctagtgccaaggctaatttttctgcaggtaaaacttcatcatggcagacacgcaccactcctccggccggccgtactgcttctccatcttccacacccacaaccagtcgagcagcacctcctccatctagtgacaagtccgtgacaaaggccgctcagccagcaccgagtgcttcttcaatggtatccacaggccgaatgagagatgttcagtgccaccgttgcaagggctttgggcatgtgcagcgtgactgccctagcaagcgagttttggtagtcaaaaacgatggtgagtactcctctgctagtgatttcgatgatgatacacttgctttgcttgcggctgaccatgcagataatgagccaccggaagagcacattggggctgcatttgcggatcactatgagagcctcattgtgcagcgtgtccttagcgcacaaatggagaaggcggagcaaaatcagcgacacacgttgttccaaacaaagtgtgtcctcaaagagcgttgttgccgcatgatcattgatggaggtagctgcaacaacttggctagcagcgagatggtggagaagcttgcacttagcaccaaaccgcacccacatccatactacatccaatggctgaacaacagtggtaaggtgaaggtaacaaaactggtgcacattaattttgcaattggaaattaccatgatgttgttgaatgtgatgttgtgcccatgcaagcatgtaatattctgctaggtagaccatggcaatttgatagggattctatgcatcatggtaggtccaaccagtactcttttctgtaccatgataagaaaattgtgttgcatcccatgtcttctgaagatattttgcgtgatgatgttgctaaggctgccaaatccaaatgtgagagtgataaaaaagcccaatctgatggcaagaaacctgagacaatcaatttgaaacccaaatgcttacttgctactaaatctgatattactgagttgattgcatcaccttcagttgcctatgctttggtatgcaaagatgctttgatttcacttcacgatatgcagcattctttgccccctgctgttgctaacattttgcaggagtactctgatgtgtttcccaaggaagtgccaccggggctgccaccggtgcgcggcattgagcatcaaatcgacttgatcccaggtgcttccctaccgaaccgtgcgccataccgaaccaaccctgaggaaaccaaggagattcagcgtcaagttcatgagttgcttgataaagggtatgtacgcgagtctcttagtccatgtgcggttccggtaattttggtaccaaagaaagatggttcatggcgtatgtgtgttgattgtagagctattaataacattaccattcgatatcgtcatcctattcctaggttagatgatatgcttgatgaattgagtggctctattgtgttctccaaagttgatttgcgtagtggttaccaccagattcgtatgaagttgggtgatgaatggaaaacaacatttaaaacgaagtttgggttgtatgagtggttagtgatgccttttggtttaactaatgcacccagcactttcatgaggttgatgaatgaggttttgcgtcctttcattggaaaatttgtggtggtctactttgatgatatcttgatttacagcaagtctatgggtgaacattttaatcatttacgtgctgtttttaatgctcttcgtgatgcacgtttatttggtaaccttgagaagtgcaccttttgcacagatcgagtttcttttcttggctatgttgtaactccgcaggggattgaggttgatcaagccaaggttgaggcaattcagagttggccgactcctaaaacggtctcacaagtgcggagctttctaggactcgcggggttctatcgccgctttgtgcaggatttcagcaccattgctgcaccattgaatgcgcttacaaagaagggagtgcctttcacttggggcacatcacaagagaacgccttccacatgttgaaagataagttgacccatgcacctctcctccaacttcccgattttaataagacttttgaacttgaatgtgatgctagtgggattggattgggtggtgttttgctacaagaaggaaaacctgttgcatattttagtgaaaagttgagtgggaactttagataaggaattattctacttatgataaggaattgtatgctcttgtgcgaactttagaaacatggcagcattatttgtggcccaaggaatttgtcatacattctgatcatgagtctttgaagcatattcgtattcaagggaagctgaaccgtagacatgctaaatgggttgaatttattgaatcttttccttatgttatcaaacacaagaaagggaaggagaacatcattgctgatgctttgtctaggagatacactttgttgacacaacttgactacaagatttttggcctagaaacaatcaaagaccaatatgcgcatgatgctgattttaatgatgtgttgctgcattgtaaggatggaagaacatggaacaaaatcgtcatcaatgatgggtttgttttcagagctaacaagctatgcattctagctagctccgttcgcttgttgttgttgcaggaagcgcatggaggcagtttgatgggacattttggtgccaagaagacacatgacatccttgctagtcatttcttttggccacagatgcgaagagatgttggcaggttcgttgctcgctgcgctacatgtcaaaaggctaagtcacgcttacatccacatggtttgtatatgcctcttcctgttcctactgttccttgggaagatatttcaatggattctgtgttaggattgcctaggaccaagagggggcgtgatagcatttttgtggttgtggatcgattttctaaaatggcacatttcataccatgtcataaaactgatgatgcttctcatattgctgatttgttctttcgagaaattgttcgcttgcatggtgtgccaaacacaattgtttctgatcgtgacacaaaatttcttagccatttttggagaactttgtgggctaaattggggactaaacttttgttttctactacttgtcatccccaaactgatggacaaactgaagtggtgaatagaaccttgtctactatgcttagggctgttttgaagaaaaatatcaagatgtgggaagaatgcttgcctcatattgaatttgcttataatcgttccttgcattctactacaaaaatgtgcccatttcagattgtgtatggtttgttgcctcgtgctccaattgatttgatgcctttaccatcttctgaaaaactgaattttgatgctaagcaacgtgctgagttgatgttaaaactgcatgagacaactaaagaaaacatagagcgcatgaatgctaagtataagtttgctggtgacaaaggtagaagggagttgaattttgaacctggagatatggtttggttgcatttgcgaaaagaacgatttcctgatttgagaaagtctaaattgatgcctagagctgatggaccatttaaagtgttagcaaagattaatgagaatgcatataagattgatttgcctgcagatttcagggttagtcccacatttaacgttgcagatttgaagccgtatttgggagaagaagatgagcttgagtcgaggacgactcaaatgcaagaaggggaggatgatgaggacatcaacaccatcgatacatccacgtccccccatatacagcatgatggtcctattacccgcgctcgtacacgtcaactaaattatcaggtgagttctttcttgagttcatattcctcgtctttatacctcggagacgcgtgcactcgtgttttactcaggaacgatggagaggatccaaagggaagaggattcgcgtggggtggattcggactgcagggcagcgccaacttctgacggccgccacgacttcatgcgaactccgatttgggcgtgcaagtacttcatggaaagcttatcaagtctactttcaaatggatccagccacatgtccatatctgttctggagcggccgcaattgtcattttactcccgactattttttgtccatggtgctgcgtcacctcttttggcccaatgggctgtgtatccatgttgggcccattaggggcgcgtcctagggttggagcacgaccctattgtcgttcttcccctctttttatacctctagtcgccgccaagaataggcgggttttgatgatagagatagcttcttgctaccggctcgcagcgcgcgtgttggctaaaccgcccgtctgcctgtaatcggaaccccaccatattgtgtttgatagtgaaactttcatctttttctagcaatctcagtgcttgtcctacttgttcttgcttgttcttcgattgcttgcaggacgagtgcccttgtggccgggttgacgcgcaccacaagttcgcggcgaccattggagacggtgtatcggttgctaaggtgcagcgtctttggacagttgtagtcgggccgtgaacgtcgacttcatctaatcgagttatcccttacctctcatcgaaagatcgggccacaaaccctagcgggttcgcatcaagttcaccttgggaaaaatccaaattaatctaaaaacaattcaattgtgggtgaataaataaataaccaaataaagcatttgaatttacaaatccaaaatatgttgagctacatttcaattccaaatccaacaccattttgcagattagcccttccacttttcctttttcctttccttcttttctctctttcctcctgtcggcactattcattgcccaggacgtattcgttctgggcccaagcctcttccctgtgtcacgcatgccatccctgtcaccatcgcgcgccgttgcagcgccgcacgaacgtcgccctcgcgtcgccgctcctgccgcgtcgagccccgcgtctcacgccgtcgtgtcgccatcgccttcgctcagccgcgcgctgccacgtaaatcgcccatctatgacgttttcctcatgatgttgtatattttcgtcattgaatagaccatatctatgacaaaattttctatttcgtcatggatcagtcatggcgggataggtaccaaaactctatgacgaaattaaaaatggcgtcaaggtacaatagaaaatttcgtcacaaataatgcacacctttcatttattaatacctgttggtcccacagcgcatacgtggatatccaaatttcatttattaatacctgttggtcccaccgtgcatatgtggcactggtcccaccgcccgcccaaattatatgtgccactggtcctatatgtggctatcattttttttataaaaaaaaatacacctgggaatcgaacccagtccatgagcatttgcgtaagaagctctaccaccatgatactaagatctttgagtgaaagcttgtttttttgttaattgtcctttatgcggtgaacctggagaggacgcggcggccgtggcgccaccatgtggaacacacccactcggcggtgtcgtgtttcatcatctcccacgttgggctgttccccaccaggtggtttggatctgaatccccttgaatagttgatttacgattgtgccctcattatatgtgtgttgtagtgttgtaccgatatgaacgaggggtaagtcagtccaaaccacaagaaaattcacaagaatagcagcaggtttttacttttaatgcatgaataaaattttaaagtagtttatctcactcatatgagttcgaaattagacgattcctttttcattattcatataaaaatattgtctacaatttcgagcacgtttagaatgttgtcaagtaaacagtgaagactcataaattgaaattcaaaattttgaattgtagaacaactgtgtggtttttcttttaaatctctaggtaaaacttgtagaaagtctttctccctcatactgacttcaaatttgattattcttttttctacaaatttctaaattcatgatctatcaatttattgtgttattacaactatatttttgtttactgctagataaattaatccgagctggatgtgcatgtgcttgaaagatggacaaatttttgggtggtaacttttgcactgacttcctattagcaaatggtaagaatggtcacttgaaccatagtgtccaactgatctacttagtgatgttgctgccacattgttaaattttggaagtgggaaaatgctcttttgatgtgttttgggttcctgcctggcatttgcactccatattgtcgtggaactgttgttgtatgcctgtactttgtagaaatgaagcatgtttaaattgtgtccataactttacaccacactttacggtcctgcatacaaatctgtatatctaaatgctatatgcctatagtctgtagaaatgaagcatgcataggaagttacttgtatcataactttagtgtcgagaaatgtccaggggtcttccggctagctccacaaggtggtaggctagacgacctgggttcaaagcctcacccctcctaattatttgatattaggtccttccctaatattctagtttttttttatcataactttagtgtctaatttttagtgctacactcctatgcattctagttcagttgcttgtttgtttggccagtgaaatgaggtgggttggggatggtgacattgagttctgttagtgcaatatattatggggacatcggattagtgttgcaaattagccctttcattcaaaaactaatatcgtatctgtcgattgtttcttgttgtttctctagcgcataaaaaaataatctaacatatggtactatcctatcaggttgctgtgctcctccccatcaccctcgggcaggtcagaaaaataattgatcctgaattattattcagttgtatctgatttggagaataagaaatttgatgttgatataatctgaaacttggttttgtttgattgtcaggtgttgatataagctgtcttagtctcctttattatcttatgcactgtgatgaactccatctacttattttagttgtgttgatgcttctatgagcttactgtcgtgtggtggacttggttatgtaaaatgatgtttggtgctatggtggacttaaattatcatcctgtggtaaacttttgtggacttaaatgtgaagatatgtgtactaggttgtgtgaacttatttgtaatatggtgctatgtgaagttggtatctgtgttcaatgttgatgttgggcctattcataatgtcctgtgaagttctaattgttgctccaaattggccaatgctaaaaattttctagacctaatagtgggttggggccacaactagatgtaaaatgtgtggctaaatgggttgggccaagacaaatgatcagtgggccttcatcctaatgtgtttgacacgtgtcattgaaacagattaacacgtggctatatcaggtaaagacatgtgtcattaatcagatataaacacgtggcgcctcaaaatgagaacacgtggcgctgccaccttcagtcacgtggacatatgaaatgccaacacgtgggattaaatacgactgccacgtggctctagtatactggagatgctaatccaacatggagtacatgtcatctgccacgtcacatctgtcacaccccgaagttccttcccaagcctaaattggagttttaaatggtctcaagaaaatacctgtgtcaagcaagagcaaaccttaataaattaatgcaaataataatcggaattggcatgtggaatttttcttaagttttacatgccgaaatacgctaaaaagatttttagtggaattttcagagctctcgaaataattttaaccaattaaaattgagcacaagcaattttaatcccaggaaaaatcctttttccttctttttcctttttctttcttttcttttctttttttttcctttgaatgggccgccggcccattcctcctttttctccccctcctcccgctgggccggcccttcggccaggcccagctaagccgcgcgggccggccgcccagctcccctctctccccgggacaccgacaggtgggccccacctatcggggtcgtccccttcctccggccgcccgctccacgtcgccaccaccgccgaaactgccgccacgcccacctccgcctcctccgggccacgacgtccatgtcgccctcgcgcccgcgcctcccgcgcccactcccctctctctctcccgcccgcgcccgcgcccgagatgaccgggatccgattttcgaatcccgcctctctctcctcccctactccccgcgttggccggcggaattccgcccctaccggccacgtccgggattcccctcccctatttaagctccgtcgccaccccctctctctttttccccattttgccgaactctcccgagctcttgatcgctcccgcaccgtgcatccgcccgccgccgcctttcccaccactccggccgcctctagccgccgctagactcgccgccgcaccgcgccgtcgccgccgtcgggttcgcgtggccgagatccaccccgtccgcccttcctccgtcgagattcgtcaccggaacccgcatcccctcgcgctctggtgagctctacccctaccgccgccttcggccatggtttctgattgccgtagttcgtctccctccctctaacctctctcttttcctcccttagggcattccggacctcgtccgcccgccgccgttgtcctcccgtagctcgccgtcgccgttcgccgtcatcctcctccgcgccggccactctcggtgaggcactccccctcctctattcccctccctctccctcctagccgcgccgggtcaagccgctgccccggtcgtcgccgccgccccggtcgtcgccaccgccttcgcgccgccgcctccgccgccggttgccgtcgcctccgccgctggttgccatcgccggcaacgcgtgcgcgcgcgcgcgccgtcgccatcgccgtggccggtcggccggccttgagccgagctaagccaaggcctcgaacaatgggaagctagtgaggatcatagctctgaaggatgagatagcacgcttgaagaaggagaatgctcagttgaagggtctcccagcgccaggaggagtccggatccgcaccacgccccgcaagacggcgactgcacccgtgcgcattcagcttgcgcccaggaacccacctccgcccgcaattctcgcagctccagctccaaccccagctccagttccagtgccagctcccgcgtccgctctctccttcgctccagcgtcagctgccaggggtccagccagtggcaacggaggttggttgtctgctactcccagtggcagccgcgaccacagcagcagcagttccagtggctcagagccgggcagcagggagacgtatctgccagactccaggagccgctaagagggatctggtgacgagcaggaggatgccttcgactccaccgaccgcaggagccgttccgagcattaggcttgctttccattagtttatcgactgtttagcatttgcctgttagtttgagtgtttaggtctgttcgcttgggggtcagtcgacggtcgatatcatatgcctatgatatggctgtcctaataaggatttttgcttgctttttaagtgttttaattcagatcagaacaattgcagtttaaattcctatataataaagcttagttcctgagcatctgtttttcttcttttcccccgtctgctcttcctcaagatggtctacaccaggaatggtaaccgtgcaataggcgagggcagcaacggcgaagaacgcactaacggtgtgcatcccaaccgtgattccggcaatggtccgccaccactccccgagaatccgacccttgcccaagtaatggctcatcagacgcagatgatgacagctatgatgcagcagatgcagcagcagcaccagcagatgtaccagaggatgcagcagcaagccgagtagcagtagtttggtccccctccccctcagtccaaactgccggagtttctacgcgttagaccacccaccttctccagcaccaccaaccctatggaggtaaatgactggctccatgccatagagaagaagctcaatctcctgcagtgcaatgatctggagaaggtcgccttcgccacacaccagctccaaggtcccgcgtcagcttggtgggacaatcatatggctacccgcccaccaggcacggaagtcacttgggcggagttctgccgcagcttcaggaaggcgcaagtgccagatggggtcgtggcacaaaagaagagggaattccgggcactccaccagggcaacaggacagtgacggagtatctccatgagttcaatcgcctcgcgcgatatgcaccggaggatgtccgtactgacgccgagaagcaggagaaattcctagcaggtctggatgatgagctaaccaaccagttgatatctggagattacgccgactttgagaggttggttgacaaggcaatccgtcagaggatcagcgcaactaaatggaaaggaagaggaaggcagcgcagttccggtccaaccaagggagccaccagcgaccgcgcttcactcccggacagcaaggtggacctaccaccctaatcgtccgccagcaccgccctttcagtgccagcaacttccatcagggcgccagtggcagccagaaccaccatggcggtcagcccaaccgcagtgcagctccactcccaccaatggctccagcacagtcagctccgtccgcgcaagccaagaaggagactgggacaaagccagggtcttgcttcaactgtggcgagcttggccacttcgctgacaaatgcccaaagcctaggcgtgtcgggccaaggtttgtccaggcccgtgtcaaccacgcgtccgcagaggaggcgcaagcagcaccagaggtcgtactgggtacattccctgtcaactcagttcctgctacagtactttttgattctggtgcaacgcattctttcatttcaaagaaatttgtggggatgtatgggttaagaaaaaaagagcttagtacaccaatgaaggttcataccccaggaaatagttcaacctcggtcagttatagcccttcagtgctaatagaaattcaaagatcaccatttctagccaacctcatccttctcgaatccaaggatctagacgtcattcttgggatggattggctgaccaagtttaagggcgtcattgattgtgcgaatcacacagtcaccttgaccaatgagaagggagaaaccgtggtgtacaagtcaccagtctcaccgaagcaaggaatctccttaaatcagattaaggtggaaaaccctgtgaccaccggggagaagagttcgcggaaattggacgatatccccatagtctgcgagtacccagaagtgttccccaaagacctcactaccatgccacccaagagagaaattgaattccggattgatttggcaccaggaactgcccctatttacaagagaccgtacagaatgacggccaacgagctagcagaggtcaagaagcaagttgatgagtagctgcagaaagggtacattcgaccaagtacttcaccttggggtgctccggtcatttttgtggagaagaaggacaagacgaagagaatgtgtgtcgactatcgcgtactcaatgaggtcacaatcaagaacaaatatcctttaccgcggattgatgatttgtttgatcagctgaaaggagctaaagtgttttctaagatagacctgcgatcaggctaccactagttgagaattcgggaagaggatattccaaagacagccttcaccactcggtatgggttgtatgagtgcacggttatgtctttcggacttaccaacacacccgcattcttcatgaatctgatgaacaaagtgttcatggaatttctggacaagtttgttgtggtcttcatcgacgacatacttatctattcaaagtccgaagaagaacatgagcaacatctccgtctggtactcgagaagttgaaggagcacaggttatacgccaagttcagcaagtgtgacttctggttgtcggaagttaaatttctgggtcacgttattacagctcagggcgtggcagttgatccatcgaacgtggagtcagttaccaaatggaccccaccgaagaccgtgtcgcagattcagagttttcttggacttgcgggttattaccgccgattcatcgaaaacttctcaaggatcgcccgacccatgacttagttgcttaagaaagatgagagtttaaatggacagctgagtgcgacaagagttttgaggagctcaaaaagaaattagtatccgcaccagttttgattctgcccgaccagatgaaagacttccaagtctgttgcgacgcatcccgccacgggcttggatgtgttctaatgcaagagggcagagtggtcgcgtatgccttgcggcagttgcatccacacgaagggaattatccaactcatgacctggaattggcagcagtggttcatgctttaaagatctggagacactatctgattggcaaccactgcgaagtatatacggaccataagagtctgaaatacatcttcacccaaccggacctaaatctctgacaacgaagatggttggaactaatcaaagactatgacatgagcattcactaccacccgggtaaagccaatgtggtggcagatgcgctaagcaggaaaagctactgcaatgccctatgcatcgagggcatgtgcgaagaattgcagcaggagcttgaacatctcaatgtgggagtcgttgaacacggattcgtagccgctctagaagcacggcctacgctcgtcgatcaagttagagcagtgaatgatcttgaaatagcagagctgaaaaagaacatgagagtcggaaaggctcgggatttccttgaagatgaacacggcacaatctggttggcagaaagattgtgtgtacctgacgacaaagaactgaaggatctgatactcaccgaggctcatcagactcactactccattcatccaggcagcatcaaaatgtatcaagacctcaaagaaaagttttggtgggtcagcatgagaagggaaatagctgaattcatcgcactctgcgacgtttgccagtgagtgaaggcagagcaccaaagaccagcaggtttactccaacctcttcaaatcccggaatggaaatgggaggagattggaatggactttataacaggactgccccggacatcatcgggccacgattcaatctgggtagtcgtggatcgactcactaaggttgctcacttcataccagtacataccacgtatacgggcaaaaggttggcagagctctacctctcgagaatcatgtgtctacatggagtacccaaaaagatagtatctgatcgagggagccaattcacttcaaagttctagcagaaattgcaagaggaattgggaacccggttgaatttcagcacagcctaccatccgcagaccgatggtcagaccgagcgagtcaatcaaatattggaggacatgttaagggcctgcgcacttgattttggtggagcttgggacaaaagcttgccgtatgcggagttctcttacaacaacagttaccaggctagtcttcaaatggcaccgttcgaagcattatacggccggaagtgtcgcacccctctcttctgggatcagacaggcgagtgtttggaacagaggtgctaagggaagcagaagagaaagtcagaaccatcagggaaaggttgagaattgcccaatctcgacagaagaactacgcggacaaccgccgaagggagctcacttttgaaacaggggattacgtgtatcttcgtgttactccgctccggggagtgcaccgttttcaaaccaaaggcaagttggcaccacgtttcgtgggaccatacaaaatcttggaacgaaggggagaagttgcttatcagctagagcttccttccaacatgatcggcatccatgacgtgttccatgtatcccaattaaagaagtgcttgagggtacccgaggaacaagccaattcggagcacattgatattcaagaagatctgacgtatgtggagaggccacttcgaattcttaagaccagtgaaagaagaaccagaaacaaggtcactaggttctgcagggttcagtggagtcaccattcagaggaggaagcaacctgggaaagggaagatgagttgaaggccgcccatccgcacctcttcgccagctcctccgaatctcggggtcgagattccgtttaagagggggggtaggtttgtcacaccccgaagttccttcccaagcctaaattggagttttaaatggtctcaagaaaatacctgtgtcaagcaagagtaaaccttaataaattaatgcaaataataatcggaattggcatgtggaatttttcttgagttttacatgctgaaatacgctaacaagatttttagtggaattttcagagctctcgaaataattttaaccaattaaaattgagcacatgcaattttaatcccaggaaaaatcctttttccttctttttcctttttctttcttttcttttctttttttttcctttgaatgggccgccggcccattcctcctttttctccccctcctcccgctgggccagccgaaggtccaggcccagctaagccgcgcgggccggccgcctgcctcccctctctccccaggacgctgacaggtgggccccacctgtcggggtcgtccccttcctccggccgcccgctccacgtcgccaccaccgccgaaaccgccgccacgcccgcctccgcctcctccgggccacgtcgtccacgtcgccctcgcgcccgcgcctcccgcgcccactcgcctctctctcccgcccgcacccacgcccaagatgaccgggatccgattttcgaatcccgcctctctctccttccccactccccgcgttggccggcggcatcccgcccctatcggccacgtccaggattcccctcccctatttaagctccgccgccaccccctctctctttttccccatttcgccgaactctcccgagctcttgatcgctcccgcaccgtgcatccgcccgccgccgcctttcccaccactccggccgcctctagccgccgctagactcgccgccgcaccgcgccgtcgccgccgtcgggttcgcgtggccgagatccaccccgtccgcccttcctccgtcgagtcgtcaccggaacccgcatcccctcgcgctctggtgagctctacccctaccgccgccttcggccatggtttctgattgctgtagttcgtctccctccctctaacctctctcttttcctcccttagggcattccggacctcgtccgcccgccgccgttgtcctcccatagctcgccgtcgccgttcaccgtcatcctcctccgtgccggccactctcggtgaggcactcccgctcctctattcccctccctctccctcctagccgcgccgggtcgagccgccgccccggtcgtcgccgccgccttcacgtcgccttcgcgccgccgcctccgctgccggttgccatcgctggcaacgcgtgcgcgcgctcgcgccgtcgccatcgccgtggccggtcggccggccttgagccgagctgagccgggtcgccgccaaccgtccgatcggccccgaggtgatctgggccgtcggtcccatggaccggtggtggaccacccgcgtggtcccggtccacggtggaccggcagccttaggccgctgacccgggggccccacttgccggcgcccctctctccccttgagctgctgacatgcgggccccgcccgtcggcgccgccgcccccttgatgacgtcagccctgggaattaattgcgcaataaattatttaaggactttttgttatagtaataaacacagtgaatcttataaaattcataaataattcatccgtgctccatttaagcccattcaagtctcagtaaatcaagaaaaatgtgtagaatccattaaaaatggttttgttctctgtttcagtagtcttatagcctgtttgcattgtttgctttgtatgtcgcttagattccggttcttccgacgctccggtgtacttcgaaatagtcaccgaggtttctccagcagcagagcaaggcaagtcatgcttgtcacttgaacatgttgatcctatattgcaaatgctctattgtttttcttcaaatactgcattgttttataatgttactatgggatgtttacctattgttacagccatgctattttgataccatgctcctttgttagcttgggttataacatgaatagactttggactaggaattgcttagccatgcttagttcaactagcacacattggggaaaaatcctattaatgtttagactgtaggttctaatggtaatgttggattagtgacaccgcttcggtgttggttaattaaaatgaatcacatggcgggctgtgggtgcatggttttgttggtcgcacccatggcagttaaggaccggttcacgggatgccctgaaagaacttatcgtacttaccacaagccagcgtgggcaacggctgggcttgtagtgtagcttttctctagccgacgcatccaggcaagggtgggcgtgatggagtttggatgggccctgtgacggcctatgcggcttccgaattcacctaggcacaagaggggactgcccgctgccttgcgaggagtggggttgaaacctgaggtgtggtgtgcttggttagagggggttatgcgaatggtcctgtcacggcctctttccggtatgtcgtggtggcatgtcggcgcacggaaacatgtcgtggggctgtgtcttgtgggtacagttgtacacctctgatcagagtaaaactattcgaatagccgtgcccgcggttatgggcggtcaaccagattcaccgtgattagtctcaccctagtttaatctaatgaaattggatagtttaggtggatggttgggcccgttgcaacgtgggatagcgttggacagcggatgattaatattgattaattattacaactgtttaattcttacaacttctgtttataaatgctcgctttatgcaaatgaaccactctagctctcctttgataattccctgcatcatacccctattccggtatggcttgctgagtacagtgggtagtactcagtcttgctctattttccccaacccaagagtacgagtatgtgtcagacagtgatttctccgaggagtaggatgcctgtggagtggtgttcccgctgcagatcaagtcaaggctcagctccagttatctttcgtttttccgctgtatttatgtaagacttttatgatgtttgtaagacgtggatctgaatgtcaacattgtcatttgtgtaccccggccggtcctggacggggattttcatgcacattctgcttggaattctattcgggaatttctgggcgtgacaacatccaacgtggattccacgcataacatggagtacacgtcatctgccacgtcacatccaacgtggattccacatatggcagccacgtggcttggacgacgcatgtcactagccagctggaaagcaattctgtgacgagcaccttcgtcatggatagaagcatttctatgacgaaatctaccattttgtcatagagaaacttatgtgacgcgagttctatgactaatcctatttcgtcataagttcatcatagatgttattttacgacgattattgcatcttccatgacaaaagtagatcatcatagatgtaccgatctctactagtgcacgtcgtcgtgtcgccgccatcgctatcaccacctcgagcaccgcccgcgccgcgtaccgttgccgtcgcgcccgccgtcccatcgccgttgcccgtcgcgtcgccgccctgagacacgcaccgccaagccatgtgccactgctgcgccgtcgtccgtcgcgtcgcaccacaccaagccccgtgccacgtcccgtcgccgcgcgccgtcccatcactgtgccccgcgccgtgcaccgcgccatgccattgttggatagtataggagagatatactatgaaacgttggatgattgtattgagcctcagggggccggtatatataggagtacatgtggaggagataaggaaggattacagataaggaaggaatccacataaatcaatcctatcctaatacatctctaactaccatatactctaacatccccccgcagtccaagcgtgagcagcgcggacacttggactggagaagaaaccggcaagagtgcttaacatggatgatagccctttgtgccatagtcgatgtagtcgagatgaagttgtcgtagtcgtagtagccagtcgtcgccgatatcgatgcagcacaagtcacccaatagtgtgtggttgcggttcgtggcagggatcgcggcgtcaggcgcgagagtgcgcaggtgcaggcgagaagccaacaaacacgacgaccaaaaggataaattaaaaaaacactatggtgaccacggcgcgaagacgtgatgacggacagacgacgatgtcgaacaatgtcgttgtagcttgggacagcaaaacaacaacatccttgatctcggtgaaacgacggcgtgggcgacgcaaaccgatctctgatcggaaaaggaaaataacagcagcaagcagcaatatgccaccaaaaccaatctgaacctcgagctcatggcattgatggctttcctggcagcatggaggagctcacgtgcagcatgttgactcaacccatgcatgcatatgtgccactgcagacgtcgagcatgtatgctcgtagcgtgcatacacaggtgcagaacagccagagccacgagtagacggtaacgatgagactgctgttggtgctgcttgacgcgaacgacgaacgtcgccgcccaaggagattgagacatcctcccacacagcaacaaaacacgaggccgcgtcgagatcaagattgatccttcggtggcaaaccatgatgatgacatgacgccaggagatcgatctctccgaggagaacaatgacgacgactggaagaaaaaaaggtggccgcccccgggagcgagatcgcctcccgggggcgacggcagccgaagcgattagcatcactctgataccatgttggatagaataggagagatatactatataacgtgagatgattgtattgagcctcaagtgactggaatatataggagtacatgtggaggagataaggaaggattacagataagaaaggaatccatacaaatcaatccaatcctaatacatctctaactacaatatactctaacagcaatgtgcgcctatgccctaaccgcctctagcccagcatctagcccggttggccatgagctggtgagcttatcaatcttagcttccagcacaagcccctcactcgcctataaaagacctcccagccttcacgagctcgtcctcccctctctgccttttcttcacccttctacacatttcgtcgaacatcttgtgggcgtgctgcagcttcttcccggctccaccgccgccgcggaacttcgtcgttccgccgtccctcggtaagtcctcactcctgttactcctcctattcctctaggaactacctcccccaactatttcgtcgattagggccataatcgtgacaagcccgagctccgaagctccgcccaaggaggtcaccgtggacatgccatcccgggggctctcccttcgatttttctagaaaaacggaaccctcatgcgccataaatgctcacgccctcaccaatttggtcggaaaccctccgtatcgccctagcacctagctacccgtgcccggccatggcggccatgcggcgcctctcgcccccgcgccgtcctgtgccgtgactgccggcaggaggacaccggagtcttgccgctccctcccctggtcaccgtcgggtcgccctcggccggccttgctgcgcgcgccgcgtctcccctgctgctcccgctcggtctggaggtagaagacgatagagagaacgagaaaagagaagagaataggttgtgggccccacctgtcattagcaccatccaatttcctttagaaaataattcggtagaaaaaggaataaacccggggtcccacttgtcagtcggtacaaaggctaaagatatactgtatttcggattaaaaataaatgaattatgaacagtagcttttcacaatttctccgattaattcgaaattgaatctttaaactagtataacttgctcattttaactcggatttgagtgaaacttgaacctaaattcatctaaattcataagatttctaatggtatataattcactatttaataaaatacatttataattataaaataattaatatcaagtaattagataatggtcaacttaaatatgtgctcataaataggattgatattttacagtagagtagatgtaataatataggcctttaacatgttttgtcactatagcaaccccataaattagttataatcaatattttaaattaatggatgtataggaaaataatagtgctgtttattaatctatgtcactactcgaaaatcgatttttcatggcgtttggaaaatatttttcatggcggccatgtggaaaaaccgccagcacagaaaatcgtgggggtggggggtcaagggccgccagcggaaacacatcttcgctagcggtgtacttaagaaggccgccagcgaagataggatatcttctttggcggctttcttaagctcacgccagtgaaggtattgtatgttcgctggcggtaaggggatgcggcccaccaacgaagatgtaggtgtctttgctggtggccctcttaacttaacgtcagcgaagatatcttaacttaacgccaatcttcgctagcggtgtggtgacgtggaccgccagcgaagatacctacatcttcactagcggcgtcctcaaccctccgccacctcaaatcattttgaatggaggttcaaacaaaccgacatatgacgaccgccagggaaaacacgctgaactatatgaaccagctacattaacctcgagcaccattaggagcacgattttctctctcttaagaacacatacatagtggggaaggttttgatcttgaatcttttgaaagatttattgtaccagaggttagttatactttgtcctactctttttgtcaagttttttttcatttttattggttgtatgttgagatttttcatcacaaaaaatacttgacatggaggaacaaaaacattttttatttgttatttggagctcaaaatggcaaactttgcaagaaatattgtgcatgatccatgttccatatatatatatgtagttttcaataggtttatttttagcagatttatatattagttaactgcaaaagaatgagctagctaggaagagaagagaaagaagggtagtttggtaattcgtccgagggatgtatgttttatatatgtagatttttggctaggtttaattatcttgttcaaaatatttaaaataattaaagttgtattatttttttcgcaattaattaattaatgcatagatggcggacagggcatggatgtataaagagagatatcgtgcgtcatatattgaaggagtcgacatattcatgaaagcagctaagaagaatgctgcatctaagaagacaaaagatattagatgtccatgcgtacactgtaaaaatcagaaaagttggaaggatccatctgtaatcgaacaacacttggtaacgcatgaatttgttgcacgctacacaaactggtcacatcatggagagatcccaagcaagcaagttccgaaccaggctacagtacgcgacgaagtgttgagctgggacgaggatgtcattgtagtagctcaagaagaagaagaagtgcatgcagtagaacccgttgatgatgatgatgttgttggtggcaatggttagcacagtacagttgatgatgccgatgatggtaatgtcagcgtagatgtcacgcctagaaattcacaagtaatttccgaactaatttgtgcattaaaacactcgtgcaggaatcagccgaggtacacaaactgacaatttaatacacagattcatcaaaataactaaaacgataaatacttacataagagacacttagtcctcaccatgaagaaaactgcagcagaaaacaaaatctagcgaagcttcagctccactcccataggcagctcaactgggatctaagccaaaggtcttctccttctggatcctttctcttcaactgaggtttgatgattattgcaaggtgagtacatggaatactccgcaagccacacagcaagtatgcaagtgcacatggataccaaaggatggcataatatagggttcatttgcgaaagcagcatttagcaaagggttgagaatttgtaaaacagtagagtaattaatcatccatattaatcaacactgaacagcaccccaatgctgcacaggcccaaccaaacctgaacaaccaaccccggtcgtacagatcaaacctccaaacaaggagtcaaattaattatcacattgttgtcattaatgagtagtgcgggactaatcacgaaaaacattgttagacccgcccataaccgcaggctcagctattcgaatagttttactctggccagagatgtaccactgtacccataagacatagttccacgacatgtcaccatgcgcctcaataccaccacggtacctcggaaaggaactgtgacaataccccttgtacaacacaactcaccacagtgcaccattcctggatcataatcagcccctcaaaaaccagaggcattaactccccagcgactcccacggacttctcgccgcttcttagtctggcaccccataatgaaccatgctatacaaaaggtaaagccgttgcccatgctgacttgtggttggcacggttaatatttcacaacagtatctcgcgaaccggtccttaattgtcatgagcacgaccttcaaaaccatgtgctcaccacccaccattaatcagattttaattatcaattataattatcataacacgattcaccaccgtgagctaccattaaatataatggtaagtaatagtgaagcatgatttatcccattaatgagttaatgtttctaagcatgactaagtaattttgtatatagcatttagctgaaccaaaccaatatataaggtccaagctaatcaatttattacccataggaaattaaagtcatcttcggccataattaaatgggaaaggctgactacccaatgacaatcgaaaataatgcataagttgaaataaaacattagctttaaatgggttcaacatgctcaaagggttgtttgggatctgtgtgacttgccttgcaaacaagcgtcttcaattcgtctttaggaacttctccaacgaacgaacgatcctccgaaacaacggaaaactaaacctagaacgcaaaaccaggaaaaacactaataaaaaccaaataaacagtacaattaaaattcataaataggtagagcttgaatttagatgaattatgagacttgaacgaactcattttgagttcgtatgaattagctatgaattttacaagatttaatataatttagccttatatagaaaaggaattacgatttatttggaaacgaaaaacgcgctgacgtcagcgatgacatcatcaccggcaacggactggactgcaaggtcgcaggtgctatgaggctcggccgggctatccgagagcactaacgcgaagaggacgacgagacgaactcacccaagggcggcacgaccacggacgacgacgggagatggccggctacgagattgagatggcggcatggctctgtccacggtgatgatggcgtttcggtgaggggagacagcaaatgaggggcggacggtcttcacctcgctcctgcgatcccgtgggtggcgaaggcggcgatggacggtgatgagcggcactgctaaaaacgcggtgacggaagatgagcggcacagccttcacggtgacggagacttccggtgggatttggaggaaagcgacggcgtaggtcggggacgaccgaagaggcggcgcgacgtggctggagcagctgccggcaaaggagagagaagccgagcgtggcagcggctctagggctagggaaaaattcaggaaaaaaaggaggaaacggaagaggaggcccgaggcatgctatttatagccaaaggaggaggagatcggctcggatacgaggggaatcggcggcggaagggctagggttcgccagcaaaatagaagataaactccacttcgaatccacgcgatataccacgggatatactccgattcttgaggggaaagaaagaggaggataagggcaacaaatcccctcaatcaatttcggaaacgggacacaagatgcgacggatttggcggtggtagcggctgcacacacggctcggcagggagtctggaggttgggggcgacactgtagcagagggacacaatacagacttcttgccgggctttctttctcggcccgattggaagagggagacaaagcagacttcgccgcgagagacagccgctgctcgggctgaagaagagagagagagaaaggagaggagtgggccggattaggccggatttggcccggagctaggaagagaattttaattgattttataatttaaataattgctgaaatgatgtttcatttattaaaaataattccaatgctcaaataaatccaagaaaaatcctgaaaatacttgggcacacaaagtatttaataaaattttatctatatcaatttaactttcaaaattttcatagattttattcacacacttactttaattattaaataatctccaacaattcctttttcacaacgatttataatttagcgattttcagggtgtgacaaatccaccctcttacagaaatctcgtcccgagatttggaacggctagcaagaaatcggatagggcaatcctttactgaccactctgttgaactgactagccaatctgacatacctttatctaactctttttttcttccttcttccaatagaactaacacctaacataatcctcttgtagacattgtcaggtctgccttttgaaaacattatcccttcaacctttcgaatgttgatcacaagatctccaaacattgttgtattcgatcaaaggttccgctttagcttttccttggaatactttgaagtatatcaagtccatagaaattttgcctataactggagtcaaattgattcccatgattccactttagtccaatccaacctatcatggtaaaatgatttcctcttacattatggaaacaagtttcttatcctttaagtatattagtgaaatatctgagccttctcaatccgggcttaaaaatgctttaaattgatagctaatcctgaagtatcttctttgatctgacctttatgtttttgcagtaaaaataattattgtctgtatctcaaatattatagaattgtttcctataacggtgacccattaacctttctaattctagtttccaatgtagcttcttcaatagcttgactatcaactatctggacggactatcaagactttacttccaacattggtgtaaaccactttgcaaccgtattttatggcctctgcagttccaaaataccttgaattagagaactccacacttgatttgactgtcctagtgattattgttccatttcaattgactatttatttatcacctttctatgtatccttctccttattatcatctccatacttcagattgacatagtggtaatgtccattgtcctctttgtacttcagattaacatagtagtgatatccctgcttatctttttaccataggtgtacgtgtaactgatagaacgacccatctaccgtctcacagaagctttgtagtgattcgtcaaaacttcttgtacttagtgatgtgtcggaaagcaaaccattcttgtccttgtaccatattagtagagtataaactttcttaagtgcttccaagtagactctggtgtaggttccactacaactttatatatccttgattaatcatcacttcgtctttattctcattttcctgagttgccataaacatctgtttgacatgagtatacctctgaccatcgataaatattaaggttcatgtatcaactatattattccaatacaataccgtagaatccatagtctcactttcattgattacatacttattcaacacggtgatgattctatttaactgaatccataacctttagatagactggcattccttaaaacaactttgaatctcatatatctttgacaatctggaatacatgaataaactgattgcttggatccatatcttatcctctgtctaattattattgcacctgccggagccatattttttttactcatggaaaacgaaccatttaaatctcttgaactataatgttctttgcaatatagacattggttggcctttcattcatttgggtaatagtaacgtagttaattcgtccttttagttataatctgaccaagatgcaatagagaatattgttgtgactgacatcttgcatcaattattattatacttcaaacttgctccagtttccatgtaatttactgtagacatccagggtagaatcatatgtgcaaccatctactgtgaatatccatcttacttgattgactattaatgctagaacttcaactatcgacctttaaaaattgtctcacattgaatagactatcgtgaacacattttccatgtatctccctctagaactgttgattcttagctgcgattagcatagtttctacaaaaatgtgttgactcaaaacaattaactcataccaatccccaacatgaaaggggtgcattcctcttcattaacaatcttcttactcaaactaaaacatatacaaacttgaacctttcttgatgatacctttgctgatcacatttgacagtattatcttgttactattaatagaaataatgtcatgagcacccggcggcgaatgccctaatttatccctctctttcacggtaacaataataatcaaataattaaagttctgaatttttccagacagcagcaaatttaatgcacacgatagcaaatcaagcagagcaaccaaattaatccagcttaatagcaaaatataaaaggaccagtcttggcttacagtagcaaaaaccaatccctagatagtagtactccacccgtgttcttgagacacgatcagagtaagtggacttccaataaaatccagaaaacgtccccaggagatggatctcctgataagtagtaaaaaccaatccctagatagtagtactccacccgtgttcgtaagacaatcagagtaagtggacttccaataaaatccagaaaatgtccccaggagatggatctcctgatcacgtcactctccaaacatcagccggcagcagcgacacttcaatagatagcagatgggagcgccataagctttttccgagagaacaaacctcgacgaaaacaaaaaaaaaacctcctcccgtactgcttggtagagtttatatatagtatatacggcacgcaggccaactcaaatacggcgcataggcccatgacacaaactaacagaactctgtttggactcaaaacaggagaagtctaatcacttttgctaaatcagccgctaatgaccctgctaatgataattggctaattagcctaccggtacaggaactgaaccaatatatatatatatatattctttgaattgcttcttttcttcctgcacagcaacttgtatttcttccaccaaaaatacctggctcttggacacatcatcctccctcccttgaaacaaagccatccttggctttggattaatttgagtcagttctttctttttctttacaacaggaaataccagtgacttgatagaactatcatgcattggtttcagcacatgtttaacaccaagatgcataaaagaatagtgattacttctgccctcatgcgttgcattaagatcaaactgccatggtcttcccaaaagcatgtgacaagcattcatcggcaccacatcacaaccactttatcaacatagctcccgatagaaaatgcaactct

SEQ ID NO: 10046 - DNA, 19812 bp, Oryza sativa
cgggtgggccccacccgtcagcgagggtggcgggcgggcccgcccgtcaacggcgcgcgcgcggggagggaggccgaatgggccgcgggggagaggagagagagagagtgggggagagggagatgggccgagccggcccaaaggagggaagggggacttttagggtttttcttttttataaaacctttttaactttgtttatttcttcttaattatttttttttgtgctctgaaaattccactaaaatttatttacacattttaggcttttaggaaatatacaaaaatcctctaagccttgtttgacttttactttgcacattttaatttttggaggctttcacacggattttaattattctaggcataatttaaaggatatattttagggtcgttttgggacgtgacataacccctatgtattgcaacgaaaatcacgtcgttgcccaaaatttcgtggcattagcccgaaaaccttgtagtgaagcaacaagaggaccggcgcagcatgactggtctgaccggggaccatgatcggtctgaccggcctagtgtggccggtctgacccgatctcagcaaagagctggggggcatgagatgtttgatttagaggccgatatgactgtaaattcagacatttgtgcccaggagttggaaaaggattggataatccgtttaatagaatattcgaaagatcctagtcttagggttgatcgggaaattcagcggcaagcatttaaatatactttgcttgatggggagttatatcaccgaaatatagatggggtattactgaaatgcttagataatgatcggtccaagtttcccataagatgaattggttgcttaagagagtggggttttattggccgaaaatgattaatgattattttaggcattatacgggatgtgaagcttgtcaacagttcgttaatgttcaattggtgcccgccgcagtgttcaatcctattattaaaccatcgccgttccgaagttgggctttagatttcataggtcaaatttatccttcgtcatccaaaatgcatcagttcgtgccagttgtaatggattatttcaccaaatgggccaaactcatgctgctatgacttacacggaggtaattgactttattttaaaagcatattgctcataaatttggcattcctcaaacttttatgtctaaggaggtaagaagtttttccaaattttatggtattaaattgttaagttcatctctttactacgctcaggctaatggacaagccgagttgagtaataagatgtcgttgaaattagtcaagaaaaagatcgaagaacatccaaagaggtggcatgaggtgctttcggaagcattatgggatgataggatatctgaacatggtgctactaaagttactccttaattttgagtaggcttatggacaagaagccgttttaccgatagaggtgaatcatggctctcttagatacataaagcaagatgacttattggttgaagaatagaaaacatttatgggagacaatctttatgatgtgaccgataagtgtttgaaggctttggaagtgatagagaaggagaaaaggagagtagctaaatcctacaataaaagagtgaaagaaaaatctttcaagcaggagacttggtatggaagacgattttgcctttgggttctcgatttatggagttccgtaagtggtcacatagttgggaatgtccttattggatatgtggaatcgtttcagggaatgcatattttattttcttgagacgttacaagcagaacgatttcaaagagcaattaatgggaaatacttgaagaaatacttcccgagtgtttggcaagttcccaagtctttaggttcacgatgttcaccaaaaaggcagggggcatgtgtttacatccaaattttgcacctagtgtcgatttccttcacggagccggtctgaccgttatatgttggtcggtcataacgttgcttgtggaccggccggtcaaaccggcagaattcgatcctgagtatgtgtttcagaaaagtttcagaaagtatgtgtttttgtttttgtctttgttatatttttataattttggtacatattaatcagtttatcgcatatttaggtcatatcctaaccactggaaatcgttcttaatgccgctatttactttccataaaaatatatcaattctaccgtctatgtttttgttagaaacagtcttatagcaaataatacttataagatgcaattagtttagtcaaaatgaggatagatggggagttttgtcaggaattaatatattttgatgttagcatatagcactccaattgtagctctccatcagcctctttgttagttaatgtcccaaaactaacaagaatagttgtaactgttttatttatcaaaatccaggtttcaagctagcaatatcgttggatgatatctttttctcaaggtaattttgatctatgttgtactattacaatctcataaactcctgaaccaactgtagtggatgtttttttttttggcgtgtatgtgtgatgttaagaaggatggatgtgtcaattttagcacaactgactttacctacaattttgtatttcttacagcacaaatgttttgttattctcaaacggtttgctttttgaagcattggtcaaaaaagacatcactgagtgatcttaagtggcggagtagatagcaccagtatagtttctgatccccttgctctaccaaagtaggggaaacatggaagaacactctagctcttaatatgtatctgctctgaaatgctaattattatagttgcttctccgatatatatatatatatatatatatatatatatgtgtgtgtgcgcgcgcgcgcgcgcgcgcgcgtgtgtattgggtttgcgtactaatctgaaatgctgatgagtgttaagtaaataattgtggcttgatccttgaatgctgcaaatgcttggtagtacacacatatggccttctcttttcttcactttgttttctttatttctttccttatgtggcactgagcaacttcaattcaagtctgtcatgtggcactgagcaacctcaattcaagtctgggtgggttacgcagggacatgtagcaaacttgatattacgtgtcatggcttgtttgatttgtgacacatacatgttgtcttacgaatgcatgaatgagtgtgtctcttcttttaggacaggtttcacatgcattttcaagctcgtttgtttcatggccctttttaacggacaaaatacaaatggactggtgatacaattcgacatagaggaagcacgtgatgcgagtgaggcgcgcgcaccgcgtgcacgaggggaggcggctgatcctgacatgtgtacaatcctacagttacaaatcctgctgtaaacgcaataaaaaaaatcagccggctgtcacattgacagtcccaattctaaaataaacaaatcttatactatacgtgacatattataaaacaaagggagtaaacttgcattccatactggtttgtttatctctactattataaaaactagaaaaaaaataccagtgcgttacaacaggtgaaggctattttaatcttattattattatacgtttcagttaaggtgaaatctaatgtggtaaacgatgtacccatcgacaacaaggcgcctatggtgacttcgtcaatctcaaagatttgctagcccagtcttcgaatatgctcatatatatagatatatatatgtatatgtatgtatgtatacatatacatacatacatatatgtgtatatatatatatatatatatatatatatatatatatatatatatatatatatattctgagctgcaattaagagtctaatcgtctcaagttagtatgtgaatttttttaaagagatttcttatacaattctgtctgtatttccaaaagcgaacgaacttaaagaccgactgaaatacggatatgtatttcaaaaaacgaacaaacttaaaaaccgactcatgtacagatgacataccaaagtaccgacaaaaatatcctcaattttataaatagtagagaattgaagatgtttttgccggtattttgatatgtcatccatgtttgagtcggttttatgttcgctcgcttttgaaaatacagatccgtgtataagtcggatattaagttcgtttgcttttagaaaaacaaaatgagtcgtagaagaaatctcttaaagaaaactcacatagtaactttgagataaaagtcgaactcctaatttgcagctcatgattttctaagaaaaatgtatccaagcgaatttacgcagctaattttatcctagctaaatcgtataacaaattataataaccttaacccgttgtaacgtacatacatctttttctagtttggagacaaaaggagtaattcttttactctcacgaagtaagagcagatgcaatcccgtgtatgcacctgaaaagcggaaaatacggtagaggagggtgacgtgtaaaacgaaaaatacgaatatgggcatgtacaaaattagagtctaatatgagctctctatattaattactttctatattaattaatgtcactatagactatcctcctaccatagtagagaaataagatttctaaactattaatacactagataattttttattatagttctttccttttcccgtcctcatgcaacttttccttttcctgtcctcatgcaactttttattatagttttttccttttccccatcctcatacaacaaatttttagataatatagttctttccttttccccatcctcatgcaacaaatttttagataattttttactgtacttcttttcttttctccgtcctcatgcaacaaattttctggtaataaatttcttttctccatcctcatgtaatctggtaataaactatttttctaagagaccgttattagccaccattgtacatgtctaaggggagcgctggaaaacacgtttattaacactacgtaaaatttaaaaccatgactcaaatatatgtttagagaaaatatcgctgtccaaaacataaaaccgtaggaagcatcatttgattgagtcgtgatggctcttgttaagaacgggagataagcactaaatcgcatccatatctaaattcataaataaagtggatttccctctaaacggccgtcaaatgccaccgggagtgcaaaaccacgttacatgtggcgatccgaatgcaaattttgtcgttcatttcgagcaaaatagtgaaaaaaaaatgggcttcctagagtccctactggccggaaaggtccggtcacagtaatgaaatcataagaatttaaaatatcttaagtaccaacagttgagaaataacatatggaacattcttgtaagttgtaacaaccaataatttagcaaatcctggaataacttcttgcatgggattttaacattcagtagactattaggatcagcatgtgatcataaaatggtcggcccagtaacaagggagcaaaagatacataactttagctggaaacttgggatataaggaaatattcaaacaatacattcgcacagcctccagtagcaccatttattcctcctcctcggcctcctccagccatttaacaaaaggttccagtgctttgacgaaagattgcctgacattaaaatgcaaatattatagcagtttcaaacataactgaaactctacaacatctacatgaaacaaatattatccactagtgattgcaatctaaagttcgcattggtagttagtttctacttaacatgaagattgaagttagggcacggaaaacaagaaaaacaagaaagccattagcgtatgactaatcaagttataattattattataaacttgaaaaatggatttttctgatattttaaagcaacttttatatagaaagtttccacataaaatgcgttgtttaacagcttgaaatcgtattaacaaaaacctaggtaaaatcagtatcttgtacaaaagtggacctacgtaaggcaattacctgccctttgggtttgaacccttgcggaaccaaaggaggatggtatcttcagctaggacatcttggtcatacagcgttctgattatttcaggaaatagcttcatcagcttagcatcctcatagcactgtgtctgaactttgtatatgagttcgagttcaagcctgccacttgtgcagaatgcattcaaaaggccagcccatgctttcacctgtaaagggaatatttttagatataataaatgatacccatcataacaaagagaacctagaaagatcaaaatggtctttagaggttaatcctaatctccacaagcataactaatagaaggtgcttcttcctatttgggatctagacaacgcagcatctagagttttccctttcagcaaactgcaaaattaataatacacttattcatggatatcttcaagtaatttgtccaaaatagacccattccaaagtagagttaaagctcttaaattggatacctaatagacgatccatcattgggaaatgtgacacttccacaactttagtgaacatacataatgaaagcagccctcatttaccaatttatttgaatgcatcccaaactattagagttcacacattcaaatactcacacatcacctaagcagttaaaaggtaatcttcccatcaagaggatatactgtccagtgtagtaatagttggaattcgtacaaccaagggaccaccaagtggttaattgacatgcaaataattgatcaggattatactgataatctggtagtcatattaatacatatatatacatttgattatgatctcctttttcttttgtgaggatagttgtgaaattttagggtgcgttcggcaccccaagttcccaacccctctccctcgttttccgcgcacatgcttttcaaactgctaaacggtgcgttttttgtaaaaagtttctatgcgaaagttgcttaaaaaaatcaaattaatccatttttgaaaaaaaaatttagctaatacttaattaatcacgtgctaatggaccgcttcgttttccgtgcacactgtttgggttgggatccggctggagtgaacacagccttaatctattttagaggcaacttaagacattatattgtcatttcataaaaatacttgcaatattccccgggtttataccacagtagtttcgaagcatgtaatatcacatggtcgtagattagactctaaacttaactgtgactacgcaactgacacaaggacatgagtggcactataacttgttatctactggtactattgggcaggttgacggtgcactcaatgtggtagtagtaattgaaggagtaatcaggtaagaggaaatggccaaccaaatgtccaacatggtagatttggtgtttgcactcacaacagatctgattcactgatttgtgaaagttcgttcgccgcttacgactggccgtccaattatgtggcctgtgcaggcaactattaccaccctaatgccatctataacacggtaagtgacgctgactttaacctaatactgctctcatgtcacagataactgacattttgcatcaatcgccaaaattcaactgcaaaaaaatattactgcaatttttgtgaatacctcaagaaaatcctacccatatcatgtacatatcaatccaactatccaaatatgtattgacaaatgaagttgcaaagtttgttgcatttatttcaaagttaacaggcttcttgtccctaaattagaaagtggaaatgccatcaaatgccccatcttccaaacaagcaaccactcataatcattgctttaacctgcctttccattaaactgtagcttttgacaggcgatatcaatgttcattttccctcagtaattgatagcttttgcatatcatgggttaacataggccagttaaccccatgatatgcaaattcgtatacatttagctcctactatccataccagcaaacatcgttctactgttctatggatagaattttatttcttttgcctcccgagaaatgattggtcaagagaaagttctccagaggttacactgaggtagttttctatttaggtggagggcagacgatccactttactatgagaaaaataaggaacgagaggtataacaaaatagaaatatgatacaccacaaaacaatgttgtacacttgctgactatcctcacctatgctagtaggcaaaagtagaatttcagaagctgaactaagatatacacattccaagtatcccacaactgctttaaaatcaatgccaaaataaaaagatttacctgccgaagtgctgaattagaattttgttgctggttcttcccagaccactgaacagcctccatcagcacatcccatagcatgcgaacaacctctatatcaggaaatttagcatctttcacctgttgcttgacagcttctgtgacttcagatatttcagcctcttcattgatcattgttgtcagtgttaactttatctccttaagtttaacctcaaacatcttcttttcattgtactcaacaagacttgtcagaccttctttactgaagagagcataatgaaacactagaactcagaatatcatttaactacttctgttcagcaaaaaatcatgataacaacttacgtgaaatgttcagataaagcctcggaggttctttttgccgatgggaaaaattccagcaaattgtcctccattttgcctttcttcaaaagtgcaataagatcatctaaagtgttctccttcagatattctttgaaaaactcagtaatgaacgaaagcactatccctttggaaacaagattatccttgagcagtggctggaagacagtttcaggtggaagacctgataacttctgagaaaaggcaagtgctgtgaaaatggcaagtttcttcctctcattttcttcgaagaactccagtgactgaaggaatttgcgcataacattttcaagattctttatcaagaaaggcctcctgcgcaatgttttctgaatgtagagaacagaaggcaaaattgcttcacgctgcgctgcacaatcaagtacagaataggggtgacgctctccttcttcctcaggttttattgtgccaggctgagtgcgccctccaatgaatacaacctgcagtttttcaaatatttacatttaagtgttcgttgacaacaagggttattcaaggaaattgaaactccagtacttaattcattttgcacatctttcaaaggcacaatactatttgtagttttacttttgttcaaaataaacacaaaagaattaaatcacaaatagctcaaaaataactgtgtatctatactcttttaatcaggtagtggtggtggcacctactcccattttaaatgtttgcatgttacctcttcttgaacttcttaatattaaaaaggatcaaaactaaatggatagccacataaaaaaatagttcaagatgaatattccgtaacacattaatacattttgtttaatccattgcaaagcaccggcatttagctaatagtataaaaatagcttgacaaatggcagtttggtgccacagagtacagcatccaagcaagcaagcaagctaaaactccaaactaattacaatataagctagaagagaactgtaataatatcttagttaactataaatatagatgtagactattaaaggtcataaccacaaatgcaacatccaagagaattctacatacatataattctatggaaatacctcaaaaaaggtgtcaccgtaacgtgagaagttgagatccgaggactcgatacttttggcaacaagttcctgtcagtgaaaggtctttataagaattgattgcacaggataaaatacaagtaaaacatatgtatgtgaaggtcggcaagatagttttacatataaatataatgttagcttgtatgtcgatattctagcactccaaataatgttcaacatgattacaagaataaaaaaattaaaatttactatgaagtcataattgttgtatagcatgtaatgctttggattgaatacactaagagatgaaaatgataacattattcactaaatatgttgagtacggggctgaaatggcaatacatatctgtgaaataaattgatttatcagtgtaatgcgtaggttttatttttgttcaactgacctcttaaaaaaaagtactagcaaagaatgataggcagactgctaagaatattttcaagaataattgcatgtcccttatgagcaaaaagtatagacaacaataaatattttatcagaacacccaactgaagataaatgagacgaaagttaggtgacatgtcaaggatgtttacaagggctacccaggtctccagcattatccagataaatctggacaattgcatcagagaatgatgcagggtccaaaggagcagcaatattccgtttgcgggtcttaatccgctggcctctgcagtatagcataacaaaaaaaatcattaagatagccttactatatgatagttgcaaagaaagctgaaaacttcacacaatactatgaattgacacaacaaaccacatgacagctcattcccttactgtatgatcacacagtgcgtagttaaggtaataatgagaaaagacaagataaatatatcttaaaagcaagaacatcatgcaaaagaaacatgcaacattatctctactattgctaggtcagataagacagattacaaacacaatcataaggactaagtaagcaacacggactaacaaaatttaaagcacagcacttgaacaagtttgcgcctcatagatacttaaacaaggaaagctctatcaaaatgaaatcaaagttgaaattatgcccatacattttgtgagcttaagttgcagtacaagggcatttaggaaaagcatgtctatatgttactacttgcaatacgaacaaaacagaaaagttctacatatgactcaatcaaaatatctgtatgtgcagttgtgcatattgatctagcatacacaaatttataggagtaacatcagtgatagctctagctgtgcagattcattcgtaatgttgcattccaatatagtgcttaaatgatatgaacacccagtacaacagcaccagaagaaagtaaacaagaaatatctaaaagaactagctaatacccatgctttgctacggataaaaatgaattatatgtgggctaataatatttggaacaagttaattataaggtttttgggacaatttcatccctgattcgctgtagatgtatttgcgtgataaacctaaattctagagaaaaagtacaacagagttagtggctggcagattcactggcaccaccattgcgagaccaagagccttacccaagagtgggcttctccttcgagctgcagacaaaaaataggtaaaagagaaattggatcagacaacaagaaagcatcatctccaatttggatgaaattcaagtgatcatggcataaggcgtataaaatgttaaacaacaaagcagggactgctaataattcaataacccgttacccctgcatacttaaaatggatcaagtgtccctatgtgtctaaaacataagtcacctatcaaaagaaaattgaacttaaataggacaaaaggtaaaataatggtatgcactaaatggccaaaaaaaaaatcaaatgttttattgccattgttgcagaaatcacgaaaggttttttgtacgaggctccccatgctttatggtcctaacacattcatagaacccctcccttaaccagatgttattttattggcactggaaaaggccatcgggacattccaaaacatgtcaaaaaaaatgtgtaaggtaagtaaaaaaaatgtgtaaagaatgtgtaagtaaaaaagaacttggttatgatggagtatccagactctggccgagaaacctttatgcagctacagtcataaaacataacatactgatatgtggttttgtgaaactttctaaaaatatcgacggagaattccagaatcttcataaataacaacggacaactcaagaatcttcatgctcatctcagggtaaaattcacagaacttactaatcaagaaaaactcaaacatctgacaaccgccaaatctgtgaggaatcaaggaacctaactgactaaaagcagaaaaggcagctccatcaaacccatcaaatcattgaagatttaagaaaagactatcaaattacccaaacaacgaaaatattgacacgataaacgtctggataaacatagctaattccttataccatttcaatgagacgaacaaatcggacaaatctaccagtacgcaacgaatttgatagacctacaacgcaggaatcaaaccaaggcacatcaaagggaacctcgcttactcacagctaccagatccgatcatactgagcgctcggaatccccaagcttcaaccatcaaaactcgccggaaaatcgcacatccaagattacccaaatcaagagcgcgtcaccaagaatcaccaaacgaaaatccagcttccaaacaagaaagcagcaaacagcagctcgaaccccctcccactccgatccagcacccctacaaccgacagcccacagatccgccgccatacaggcaacaaagggaaggaagaaagcgagatctaaggctaccgcagaagcgggacgacggcaagtacctcataaacacaacgatctggcgcggagggggaggggggttgagtggatccggggcttcagggaaagttgcgcgcggccgccgacgcgagggagagtgaggagggtaaaaaacctagctcttctcagggtaggggttggtgcggcggtggcgatcggggaaagagggggtgataaagcgtgtgtgcggggcttcgggcggaaacggggaggcggcggcggagaacgagtggttgggatcgaccagaggtcccgtgtgggctgagtgatgggtcggccgaagttcgggcatgggctcaataagctggcgtctatctgtgggccgatacgtggccattggctgaaggaataagattcactttgactccctcgactgaccagctaatctaaatcgtattcctcaaccgcaataccagaaatcttaacccccgagctgttaaaaccggtacaaatttgactcccttggtgattttggatgacgattttgctgatgtggcgcacacgcagcagtgttgacttggtcttcgtcccacgtggcattgacaagacgactccggcggcgtaacaccgagctccaccaacctagatccagagctccgaatcggccacgacagacggctagaggacgagatgtggtagcagggcggcagcggcggcggctggagaccactcctcgctttgcgtcgccgcctcgaggccgagacgcgcccaccgccgccgcaaaatcggaggcggcgcgcagcatccgctctgcatccgcaagaaggagctgcttccgcgggagttaaattgggcccacatgtcagtgggcccacatttttttgtgtgtgtggatgacaaatggcccagcatatattttttaattttaatgccacataagcgccacttcaatgccacgtggaacgaagatcaagtcaacactgtcatgtgtgcaccaccacgtcagcgaaaccgtcctccaaaaccaccaagagagttaaattgtaccggtttagatagttcgggggttaagatttctagtattgtggttgagggatatgatttatattcggcggtcagttgagggagtcaaagtgatcttattccttggctgaattagtttttactagtagaagcagagagcaaggttaatagtacagctcgctagtggctataaaaataacacatcatcctgtttatagcttgtttcaaaagctaataaatacagtaatgatctctacatatttctcatgcacagcattttattttttttaatctcaaatagtatcctttgattgactgctaataaatgatgcacaaagttacacacatgcagggaaaaaaaactgggcctacagcacggggagccgcgtgcagcctggctgcaaaatagtagcccgcgtctctctctcctacccttctctctctttcaaccaggcaaaaatctgctatatgaaacattatagcatgctgatttagacttattgtacctgttctaagagatccatcggctgcctaaaaaataagctaaagcaaaatttaaattttaaaacaattttaacatattttcaacatagttttttttcagtgttaacttttaagtcactaaaaacacatatataaaagttttgcacacaaactattttttgtttaagttggcaacttttctagcaagaagacaatcacgatcaggacacctaaatgcgtggtggtgatttagagtcgccaaccacctcaacctagcaaaagctagatcaagatggttttgatatattaaaccgactagcagagccgatttagatggaacaagcgataaacacccgtcttgtgggtgaacggaaggtttacgggacaaacctacagagggatttcgcactctcgcgacgaaagtggatgatttacagtgcaaatcgataaagactgacaaactaagctagaactaggcgacaatactcttgactctacctgcaacaatgctctaccttctctcatatcaccagtcatcttgccaagtgaaaataatttttttcctagctgtcacatcatagactccccaagaccatattcacctccatcttttgtcttaaatttgatttaatctaatccatgaccagataactgatgtcatcaccaaatagataaaacaaactcaccagacatgaagaactaaatattttcttccttgtcgtcttatgaaccaagctaataaatctaacatccacgctttcccgtatccgtagactgaattcctgataatttgaaaaaattcaccattgccttgaatccccgaagaaattatcactacagtgctcgctctacttcttcagtgacgcagattccgtatacctctatcgtgcaaaccctgcatatcttggatatatcatgtactgccaaacagacccgttgacgtccttttgctcgggtccatatcccgccaactccaccgcagctccacgctctagaagccgtctgtggagattatggataccccatacctacacgacatgtatagtccgactgggtatggggtgccatgtatagatagaatatttttaaagggactcgggttaaattccaaactcgtatgtcaaggaaatacccgagatcctagtcggttacgattgtatcttatcagtaactacctattccgttagggatatggattgtgctttgtaatacggacccctttccctatataaggaggggttcgggtgcctctaggggcacgattttctcccagatcaaacgatcaataatacactcggcggatcaatccccggacaggagtagggtattacttcttgattaagaaggcctgaacctgtataaaattccttgtctttcaacccatccacttttccagcttgatagccacccccttttagtattgccgaaatcttgtttcgacagttgccgcgccaggtaggggtagcatcaagttcttcgccgactagtgcgatgggtttcgtctccggcattgacgacttcgtcttcccacctgggcaggcgtttcggtttggcagcctcgacttcatcaccaacgacttcggcaagatttctctcctcgactcggattcgaaccagtcgggaagaggccaggtccccgccccgttcggtatcccgaaatcggccgggatctaccccaagatcatctcagccgagttggccccaaaccactcggacgagatccaatctactccaacacgacccgatcaagatgatggagcctatccgctaatcctgatgaaactccgcgatgacttggctgccgtcttcaccaaaagggcgtcctctccccgtaggtctaggcgggatccggccccgtccccgatccagtctagttccagggaagtcggcgtcatactccagcctctcggcacggtctcgacggaacaattggacggctacctcagctctcccagtgtcgactcacgactgacggagatcgtagagtacgacgacttcggctaccgctacgactaccgcaacctcgacgacttcgacgaaggctatgaagataactacacgcccctttacttcggcattttcatggccaacaacgagacggaagaacagtgtcaagcccgacaagcagaagaacagcgcgtgcgacaagaagccgaacgtcgccgactggaggaggagcgccaagcacaagagtgagaaaggctgcagcgtgagcaacaggagcgcgagcgggctgcaaaggaggctgaggaccggtgacagcgcgccttggaggctgggcgacgagcacgagaactcatcgggcagcaagatgtcgaggggacggcggtttttcacatccctttacagaacgcggttgcagcgatcaccctcctcgacaccctccttaagggagacgcactcaatcaggccaatcacgtcgtcaacatcttgaacaagaccaagaccatgatcgcagcttcggtcccggttaattccgcaagcgtccgcacgccgactggcagccgagttcctcctcttcgatctcaagactatcaccatccaagcctcagcatcgtcggcgctgggtcaagtcgcaagagcagggatcacggcaaacgatctgtctactcgcctcctcaccggcaaagggagcgtcgagctaaacgtccccactccccacatcataggcgtcccatcgatcttcgcgagaccattaaccagcgcgcgcggcgagaggctacattccccaccattcaccagatcgctacgacgacgacgtggatggagttgctgccttcacaagtgacctgcgtcgagtggattggccagccagcttcaagctgactggaatcgagaagtatgactgctccaccaaccctgagtcttagctcaccgtctacagtctcgcaattcgcgcaccaggaggagacagcaaagctatggcaaattatctgcccgtggccctagcggattctgcccggtcctagcttcacgggctaccccgtggcacaatcgaatcttgggcggaacttcgcgaccacttcatcgctaatttctagggtacctttgaacgccctagcacccagtttgatctttacaacgttgtccagaagtccggagaatcccttcgagattagatctgacgtttttccgagcaacgcaacaagatctccgacatcatcgacgacgtcatcatcaccgccttcaccaagggcattcgccacgatctcttagtcggcaagtttggacgcaagcctcccaggatagtcaagcagatgttcgaaaaagccaatgagtacgccaaagccgaagatgccgtcaccgcatccaagcagtcgggcaccacttggaagccgaagaaagatacgccgactacagggggagtggaagtaccaatcacaaggatcgcaagcgtaagcccgaagaacttgtggcaaccactacaccatgctcccgacaacgttcacgcgtcaacacttttgacaagatcatgaactcccaatgttcgcatcatccaaattccaatcacgcagccaaagattgcttcgtctacaaacagttcgtagagcaatacgctaagaactcacgcaagacgactaacggagatcaaagcacgtcaaagaagaaggatgacgaagatgatgccccgactggttttcaagaccatcgcaaggaactcaaccacatctttggcggacccctagcttatgaatccaagcgaaagcaaaagctgattgaacgggagatcaatgctgttcagcccgacacaccccaatatcttcggtggtcagagacagctatcaagtttgaccactcggatcatcctgaccgagtggtctacccgggacggtaccccctggtactagacccagtggttcgcaacgtcaagctccgaagatccctcatcgatggtggtagcgcactcaacatccttttcgccaagatgctggacgacatgcagatccctcgcacggaattgaagccgagtaatgcgccctttcacggagtcatccccgggctgtcttctactccactcagccagatcactctgccggttgctttcggcactcgggagaattttcgcacagagaatatttgcttcgaagttgttgatttcgagacagcgtaccatgccatactcggacgaccggcattagccaagttcatggctgtcccgtactacacctacatgatgatgaagatgccaggtccccgaggagtcatatccctgcggagcgatattaagcaagccgtcacttgcgacaaggaaagctgcgagatggctcagacccgcgagatcacgctcgcccgagaagaaatccgactagctgcgtccacagcaaccgaaggagaagtgcctgcgaccaagatgacaaagagcggagaaagcaacgccaagaccaagaaaattcctctagatccttccgatcctactaagactgttgtaataggcgctgagttagtgtaacatcctaaaaattcctgacaataaaaatcactaaaatttcgaactttttaaaacttttgcatcatgctggttgttatgattgctattgcttgccaaaccataaatgatcacaaagaaagtaaagaaaagatcgacatttaagcaatagatataatttacgagaatatattattgttaaccctaccaatatttatgcacaagatagtaaagtcaaatattaatttctattataaattaaaaatcagatattaaatattcgaaccatgagtgatagcttgatgtcacaattagctaaagaaatagtaagattaaatctaatttatttggatctactctcatatgaaatataagtacacatgaaataatgaacacatcaatggccccatctataatagagtatctcactagaatatataattaatatttgaaacaccttatcaagctcctcataacatgaaaatcactcatataaaataatggtcatataaataaattaagctttatatataaataagattatgtgagttttaattaaacaattagattaatattgtaccgagtctcaatttactatttatagaataaatggattaaacctatctgtgtaaaatatattgctatacaaataaactcgaccaatctaccattgtattattaaggacacatcgttatattaaatataatattacccccaaagtcttcaaaaatatataagttcactttagggccaataatttaaattaatctaaaaagaatttatttgtgtgataaataaataaatatgggtggtaataattttggataaattttcatgaggagttagtgcttaaatttagttaacatttaactaagtaaaattagggcttataggattaaaattgtataggagataggctaagaaatgaataataggaaaggacagtgttcattgcccctaagtgctcgaccttgtcccaccgcggcacctagccttcccgtgccgctgccttgcgccttgtccccccgcacgccatggtgtcgccgtcgcggtcgtttaaacgcgcctcgcccggtcgtttcgctttgggcacgcagctgtcgtgccccctcgggtcccatcgtcccacgcgcggtcccggtggcgtcgcaataacaataccggtcgcgctgccacgcagtagagccccgcgccctgtcgctgccgcgccgctcgaccgtcgccgtcggcct

SEQ ID NO: 10047 - DNA, 3052 bp, Oryza sativa
atatttagtagaacaacagaaaactcaagatctatcccctgaacaacaagattccaaaacaattcctatggaacccattattctaagaagccatgaagatccttcttcccactctcaatttgaggtatctagacctcaatctgaaacctatcttttgccttattcttatcctattacaactatacttattccaactgccaacaacgaacagcaaaagggcaattttatcaccactcctaaagataaggtagccaaatcctttgatattcccaacaattttcctaatactaatgaccagatgtctaattccttgacaaaaatccaagcgtcatcttacgataaattgacgctccaaaaagaagtttctaccttttataacaaaatcgactcttcggtaaacagagacctcgagagttatattaccagagtcatcaatacctctttctacaacataatcgatgatcctaaaggtattaccagatcaaaatttagattgttccataatgttctcttctccaagatctatatccaacctaatccaaataaaacactttgttaccattctcgaaccaaaaactcctttgaaagaaaatctcagaatcaaatctcggctgaagccttctgcacaaataatgaaatcctagtccataagcaagatctttttggaagcatatttgttatttctgatacaaatcaatttggcacttttaatcctgaggaagaaaggaccaaaagaaaacttaagattaatgacctcttccaagaacaaaattatactaaaaaggaattaagagacctaaagggtaaatttcgaagtctagaattacaaaataatagttgcatgggccaagatgaagaggttgtcaactccatcaacagttatgttaagcagaaatggtatgcagaagtaaggtacaaattcaatgatggattccaattcagctataagactttaattgattcaggagctgatgtgaactgcattcgtgaaggtattgtcccattcaaatactttgaaaaatcctcccataaaatccatgctgcagatggaaatttactaaaagtcaattacaaaatcccttctattcatgtttgcataaatggagtctgcattaaaacttcctttttgcttataaaagatctaaagcaaggagatattttgggaacgccattcttatccttaataaaaccctttattgttactgaaaaaggtatccagtttagaatcagagataaaaatgtgaagttaaaattttcttctaaacccgagcaaaccatgttaaactatttaaaggagattatcacacaaaaagagcaatttgtgagtgacatatcttctgaaataaaaaatgctaggatttcccaaacccttaattatccaaggtttcaagaaaaaattatactattagaaaaaaggtttataaaagatatatgttctgatttcccatcagctttttggcatagggggtagcaagctcgaattcttccttatatctctaattttaatgaagataagattcccactaaagcaaggcccattcagatgaatagttgacttttagaaatttgcaagcaagaaataaaaaacctgctagataaaggattaataaggaaaagttcctctccttggagttgtgcagctttctttgtagaaaatgctgctgaaaaagaacgaggagttcctcggctagttatcaattagaaacctctcaataaagttctacaatggataaggtatccaataccttataagcatgacttaatacgaaggattcagggttcaaagatatattctaaatttgatatgaagtctgggttttggcaaatccaaataaaagaagaggatagatataaaactgcctttactactccttttggtcattatgagtggaaagtaatgccgtttggtttaaaaaaaatgctccttctgaattctcggttataaaattcaatatgatcaagttcaaccagtagcaagagtaatagaatttgcagaaaaatttccagatgagataaaagataaaacagagttgcaaagatttctagggtgtttaaactatgtctccaatttttataaagatcttgcaaaaagacagaaagattttaaccgagaggttaaagaaaaagcctccagcttggacagctaaacatactcaagctgttaagaagatcaaaagtaaggtcaaaaccttgccctatctttatatcctagatcaagttgccttcaaaattatcgaatcagatgcctcatattatggttatggaggaattcttaaacaaaaaaaggattccagagagcagttggtcaggttcacctctgggacctagaatgaggctcaaaaaaattattcaaccatcaaaaaagaaatattggccatagtaaaggtcatatcaaaattccaaggagaattattgaatcaaagattcttgctgcgtatagattgcaaggcagcaaaagatgtcctccaaaaggatgtggagaacttagtctccaaacaaatttttgccagatggcaagcaatattatcatgctttgactttgaaatagaacatatcaagggagaattaaactccctaccagatttcttatctcgtgaatttttacagggctatggcacctaaaagggacttatcagcccaagggagaactacagaaagttcaccaaataagcataaatataatgaactaggaaatatcattcctagaacccctacagttcgagaaaagtattggaataattcatcttatatcctcaatatagaggaagtaattctgccattagaatttggagactctgatctcaatattatcaagattatgggaaagtatttcccacaacactaatattttatccctgaatatccacggaaagatcaaaattattatgagactattatgcgagacaagaagtgcacagatattccatacaaggaatggtgatgaattgggattcacaaaattattgatccaaaaaattataagtatcgatgattggaataaatcatcaaattctgatgcacccagaaatatatattgtacatcctgtacaaa

SEQ ID NO: 10048 - DNA, 1869 bp, Oryza sativa
ttctagcctaggaccagcacggtacttgactttgaacaattattcaacttttcattatctgagttgagcatttgctattcctttgctacatatataagcctacccagagctccacagatttgattacagccataccgcaagtatttgccaaggcatcgatacatccaacctccattggggtgcttggttgagtcggtgtatgtcaccattccacttgcattggtaagatcttgtaagagcttggttaaaagcttgagtgtgtgtgatttttgagctgccactacctagtagttaataggaacgcgcatatttttgggtatatttcttgttttctactaacaatggcagggatacgcaagataattggggatagctgtgctcaacatcgacatcttcatcaagacatgaggagtgatcaacatgaccattatgaggtaagtgatgatgttctaggtaagatcaaatctgcactgccttatttcgagggaaactatgatcctcatgcttacattaattgggagctagcggttgatagtgaatttcaaaagcatatcttgtctgagaaacaaaaggttatgtgtgcctctagtgttttaattaaacatgcttctaatgattggaaacatctttgtaggcataacaaaataccacaatcttggaaagacctgaaacgatatttcagaaatgtttatgttcccatgtattatgctgacattttgttcaacaaactgcaatgtttaaaacaagataccagaactattacttcatactatcatgatatgcaagcttgtttattacgttgtggtttagatgaatgcgaagaagctaaagaattgaggtttttacgtgggcttaacaaagaaattcatgacatgcttgcttgtgaaaagtatagatctctttctcatttgttacaacttgcttgcaatgctgaaagtaaaatagagtaggatatgaaaaagaaacacgctatgtctttgcctacaattactaaccatttgcaggaagtgcgttatcacgaaaaggaggaaagagacatgaaagagccaccaattccattgttcacactcaagttcgagacacctccatcatctgaagaggacatcaaaggtaaacttaatggtgctgaaattaataaaggtgagtgtgtcgttaatgaattgaatctgtccacatttcatgctatagtagagcaaccattagtggaaccaactgctgagattcctttgtcacaagttgatttgtttgctgttccttgtgataaagaagagttgtgtgataatgcttcacttatatccataccacaactagtgaatgaacatgctattactactgttaattattactgcgctgattttaagcatgttgttcacattgctaatgaagcagaggagcgtgaattgagatcttctttaaatactttgggctatgttcagtttgatgatttttgtgagctcgataatttgaaggagaaattatttgctaagtctgatttgccatgtccaaccaatgttatatttcacatctttggtgaatataatgatcttggaatatattttgtgcatagagtttacatctgctcggatttagaacttcctgtacatgtggataaaacatgcaagctagagagaaatgttattgctaaccaaattgtctcgagtttctcttgttttgattggaagaaacaggttgttgtaaatggactacgcgatgagcaccatatggaaaaattgaggacggttttccgtgaagaaggggaggatgatgtgaccatggctactacggatacaaccattgctcacatcatggaagaataagatgatatcaagatcaagtcctccaagtgctggaatcagattcggccacatg

SEQ ID NO: 10049 - DNA, 1113 bp, Oryza sativa
ttaaaatttaaatgaagaaattcgcaaatatacatttaaagagcatataaacttcaaatggccatatcttggccatttgaactcggaattggaccgttcaagtctctaatttttccttaagaagtcaagaacccatttttgtgctttgtttctgcttgttatatggagtttagtagattaaaagccttttcttttccgttggtcgtgtagacgctgcagcttcggaagatccgctcttcgtggaagttgaagccggcgtttgggaaagcgagcaaggcaagtcacatcatctttgaacatattgaatcccagtttgtaaaattatgttgatttaaattattgcattatcgctttatttaaattcccgcgttatcactgttttatttagccatacctatttacctttgttatgaccttattattgttattggtattatttctttgttcaccctagattaaacaaaacccgaactagtggacactctactcatggtaccactagtatgattataggtagatgcttcgcttttaattaggtaacattaggcggttttacaactctagactttgggaatgttcatatcacctggacactgtggaattgttggagtattgtagaattggattcacaccgccccctctattcaaaatccccaaaaatggttttaggctgggctcggggtgcatggttttgatagtagcacctcggccatataaggaccggtcttcgggcctctgttgcaaagcactaccgtacttccacatgtctagtgggtaaggcttagtttgtggctcagtctagttataaacaaaagtacacggatggaggtggatgaagtcgggggtcgatggacattctccagggcaaatgaaggctacacgagctgcggcccggtagtcgagatgtcatggcacagggccggtgtcctgctgctaggggctcagtcctgcctgcctgtcccgggggttccggccgtaggtgggattgggtcggtactcttgtctatggctaggatgggttggaaactatgtcacgtcttccgtctgtataccgtggtggtatgtggcacgtggttacacgtgaggaagatgtgtcttgtgggtaaagatgta

SEQ ID NO: 10050 - DNA, 817 bp, Oryza sativa
ctggatctttcgatccgctggaaccaccactgtaatataattgagattattactgtagtagcataaattgccatgttagaaatagtaattattttaacccatatatttcataccttaatttgttcatgtccaatctttcaagcttcttcaatataggtttaacccaagactgatccacggcactaacatttctcatgaaaggacgagtagtatttattaactcatggtagacaacatataccggcagtttcccgtattcatcaccttccagtaggaaaaatggatgcacctgcaaaaagaatatatacaaactggaaagggtcaacagtaattaaagtttgtaactaaagaatgtagtcaaaccaaattgacaaattctacaaaacagctttaaaccagtcactgtgagattcatgcgttcctgttgcatgagacaactattatttgcagctaatatccagcatatctaaaatactttgtcgacaattacccgagaacaaactgcatactctcagcaaagcatattcagcatatctaaacagttcaagtagcaactgaaagtttcattggcttctacatctagtaaaaagtttggcacaaaaaactgctaccttttggtttggttaagctggctaatgtttcattcgccagaatcatctcaatttacccttgccatttatgcttgacactatagcaaaactaatctgatagattgcagaagtcaatacctgcactagttgtgccctgtatccaaccgtatgataaccattgtgatgcagcatcctctcagcgagctggttaccatatccaacacata

SEQ ID NO: 10051 - DNA, 3525 bp, Oryza sativa
acatccctccccgataagcattggatattcccatggcgccactcaaaagtagcatcggccattgcaacctcggccgatgtatccgcttgaataatttcaacatcatcgccgtcccattgaattaaacattgatgcaaggtagaaggcacacaacaattggcatgaatccaacaacgacccaaaataacattgtagttaccttgcacatcgacgatgaagaaagcggttggtagcgtcttgtttcccacggtgagctctgccgaaaagataccctttgcctccgttggttcaccattgaaaccattgagaatcatgttggtcttcttcaactcatcatcctcacgccccaacttcttgaataatgagtacggcatcaagttcaccgcggcacctccatccactagtatcctagagatcggcttcccatcaacatggcctttgagatagagagggttcatgtgacggtttgactcatcgggcttctcaaaaaccgtgtctttaggacctaatgagaattgagcaacctcggcttcatccatagcacaaaactgcataggcaacatacataccatgttcatattcatgtcttcttttggagatgattcacctttatcaaccgattgttcctccttctcctctacaacaaccggtttttccttctctatggacttatgcctccataccggtggtggtcgcaactcattgaaccttttatctctttgctcttcggcttttttctctcttatctcttgagcccgaagacgttgcaaccttctcttttgagtagccgtcaaatccttaggcatccacctaggatccggctctgttccaggaggtaaataatgccctctattaaccttgtttgaagacgatgaagccctcacatcgccctttgcaaaccttctatcaaaccggcgctggagccgggtcagaccggacgtagaccaccggtcagaacgggcagatgcccccggcaaaacgacatttgggcgcccggcagacaaccttgaggggtcggtcggaccgctgtcgggtcggcggtcagaccggcctgatggcccgatcagaccggctgtatggctgcggtcagaccggccaaaaggcctggtcagaccatccgactgcgatgagctggtaccggcctcggattttttccttgaagactctccaacttcatctccagaaggtattgacacatcatgagaccccactttgatggtaattacttccgaagtccttacctccaccttgatgcgctttctttccctcttttcttcattagcccgattcttaccatataaccggccgttgttcggtgaaaataaacgctcatgaattggcctcctcggtcctccccacccttggttgaattgcattggagggcatgtaataaggataaggataacccggcggtggccattggataagaaccccatgacatatcttgtggatgatgatatggaggtgaatgcgactgtcttggtgaatgaccaaatcgctccctaggaagtgatcttggtctttttcctttgttgcgaaccctctcaccaccttgcttctcatacttttccaaaagcatatcaaaagtcactttggtctttctaggggctttagaagttgaagctccactcctattttccttccaaacgccaacctccggtttctttggcactatcattttaggccttgcttcaccaatgattactccttttcctttagtagattcggcttgctccggccgaatcaacaccttcttatcattgaaattaatcgcattcaccggaaaaggatcatgatcaagattcatcttggagccatcagtgaacttcaatcgtccttcatctatggccgattgaacctatcgtcgaaacacattgcaatcattagtagaatgagaatgagaatcatgccatttacaatatgctcgatgtaatcattagtagaccggaaataacccaacgggcattccttacgtgcgtgcattaatccttgtcccaggaggcaaggtacaccaaaagttgatacaattcagagtttaacaagcggaagcgtaaatagataacttattacatgggcaacgaaggcccagcacacacagagacaaacgagaaacagcggaagactagggcgacgaccacaggcgcttgacggcaggcacgagctagacaccgaagccttcatcctcctggaactcctcttctggggttgggaaaaattgagcaagactgagtacaaccaccgtactcaacaagacacacccacaagtgcagaataaatgcaagggagtacaaaggagttataccataaagggtttagggttgcagtaaacagcatttaaagatatttagttgctcagggctattttgtaaacacgattctagaactaaacaatattatttatcaaggtcgtgaacccacacgaacctgccttaacccaaggcctacgatgattcagaccgaactggcaacccgaccctgggtcccagctcgtcccaagccaacccaggccaaccattccacattttagttgttaagcaggttttaagaattaaaacactaacttgggtacattgctcggcttgcccataaccgagggcgcggctattcgaatagattttactctgatcagaggtgtacatctttacccacaagacacatcttcctcacgtgtaaccacgtgccacataccaccacggtatacagacggaagacgtgacatagtttccaacccatcctagccatagacaagagtaccgacccaatcccacctacggccggaacccccgggacaggcaggcaggactgagcccctagcagcaggacaccggccctgtgccatgacatctcgactaccgggccgcagctcgtgtagccttcatttgccctggagaatgtccatcgacccccgacttcatccacctccatccgtgtacttttgtttataactagactgagccacaaactaagccttacccactagacatgtggaagtacggtagtgcttggcaacagaggcccgaagaccggtccttatatggccgaggtgctactatcaaaaccatacaccccgagcctagcctaaaaccattttgaggattttgaatagagggggaggtgtgaatccaattccacaataatccaaccattccatagtgtccaggtgatatgaatatcccaaagtctagagttgtaaaaccacctaatgttacctaattaagcggcgaagcatctacctaaattcatactagtggtaccatgagtagagtgtccactagttggggttttgtttattctagggtgaacaaagaaataataacaataacaataataaggtcataacaaaggtaaataggcatggctagataaaacagtgataacgcaggaatttaagtaaagcgatagtgcaataatttaaatcaaaataattttataaactgggattcaatatgctcaaggatgatatgacttgccttgctcgcttttccaaacgtcggcttcaacctccacgaagagcggatcttccga

SEQ ID NO: 10052 - DNA, 15770 bp, Oryza sativa
cgcgccgccgcctctcttatgaagccgcgtcgtgccggcgacggtttctctccctccgccgccttcgctgcctatataaggccggcgacccctcccattttgcccgatccatctgagctccaagctctccctctctctctctctatctccctcccccactctccaatccacaccggctgccactttccctttgcttctccaccgttggccgccgtccttgcctccccactgtcggctgccgccaaccgccatcgctgccgctgacgagtgccaaccgccgggccgccgccctctgcctccactcccttgtccctctgtgctgcgcaaagaagaagaaagaagaagagaagaggtagaagaagggatgggaagagacactgacagtgggccccaccttttaaagtaacctctttttattttatttcattttaacctttgggcatccatatctttttcttatttatttatttactttctaatttcaaaattattttaaataatattttcaaaaccattttattttattcaaatacctttttatattgtaaatttatttaatttatcttaaatatatttaaatttaaatatctttgatttatttgaaaaccctttttaaattcaagtttctttaaatgactctttttatttctaaaccattcctatacaatcctttagccaccaaaaagctgctgtgggaaatttcataccttccatggggacgctcgtatggtccaaggacctcgacgttgaatcgagggtcgtgaaacccagcataacctaaacccaaggtcgaagtgttgctgttcacaccccacgcttcgacgcgtacagtggccgaagctttactactctttcgacctccacaacacgctgcacactagtccttgggctatgtccaaccctagccactctgctatcactcacgactgtagagtagcactgttcatctccaaataaaattcccaactcactagtcattgtgctacttgactgtagcatcgactagaacgagccaatattcagccggcatgctacccaaccttagcatcggctaaccaacccaaataattagccgttatgccttagcatcggctaaccaactccaaatatctagccatcgtgctactctactctagcaccgactagaaaaccaaatccaccgaataaacctcacctatccaaaattatcctttctttgattttattcaatttccaacctataaaaaccatcacctctcttttattcttcaaattaaaagtttaatttaaaacccattcctttttcctctcgcctcgctccaattttatttattccttggctttatcgtttcttgtagcaatttttcttataggctttatttgccatctttttcgtattcgtacgttagaccgtacaggaagttttatcagcatccaaggaactgacatggacccagatggctacgctgaagccacgggaaatctcgaggtgcaaggcaagacataactaaaattttgatcatatagaaaccttgatataatcttcagatttaaatttgatgcatgatatttactcttttaacatctcatgggtagatgttatactttagaataacattgtggtaattggtaatgctttcaagaattattgcatgagcctataaaaggaagcattggttatcattttatgtgatttactattccaaacaactttacaaacttaggaatccggttaaaatgggcatttatgagttgagattatgaatattgaggtttatgaatgttgatatatgatgaagtttgttggtgtggggagtttggaaagttttggggtggtttaaccggattatatttacccccttataccatggaaatgacatagttgcgtccatccacacgatcaagtaattggacttagactagtacattatcccactatatgaaagagtgttggttggctcactaggagaaggattggggtgaatgcatgtgtaaggaggttgggggcatggtttacaacggtggaacccgtgaaagcagcgaccatgtagccttgcctaggcctagcaagtgcccgactgctaggatggatcaatatcccactcgtgcagtaactagtagtaaatgggaccttcgaacggctctggtgtcctcaaccttgcaaactgttgacatcgtgtgggtaaagctggacagtctctgcagaggtgaattaaatcattcgaatgtgccgtactcccggttttggagttgtgtcatcagggtgattcctactcctgaagtataagtagttttaaaaattaaaatgttgaggataaagatgatttatgatttttattacttctttactttattattgtttaatctattcatatctatttacacctaattatttataatatgtcttgctgagtacgtacataagtactcatccttgcataatttgacatatagttaagctaacaagaagactggaaggaagcaagatctacggcaacgacaagtttttcttctaggctagtctacactcgagcttttgcctgtggagttctttggagtttattagttgaagtttaatagtttaatactttggattttccttgtattttacaataaggatattttagtttggatcttttcaacctttaacagttgtataattagcttgtataaacaaatttgtgtaaataatcgaaagctattatgtgtatcaatatgtgcgtgatcgaaatcctggacgatcacgagtggatatttggggcaccaggcctaaattgggtgtccccacaaaaaggatatcagcttctaagcaaaatcactgggaagagatgggaatagcccaatgcttagctctatccttagccgatttcaagaaagatgaactaatgctgccagcagccaactacttttggtccaatactttcaatagttttttattcaatcatggaccaatgactccaactttgttagacataaagatgctgactggctcggatatcacaacttccatcaacccctttgccttaaatatcaggtgcactcataagttaaaaaccaaaaatattggaggttcgtctgggtacatcaatgagcacatggggacagggccgatttctgacagagaacacatagccttccccaccatgtggcttgaaagaagcatcttatgtggatcaacttgtggcccaacttcaaatttccaacattttgcccaagctctagtagaaaagaaaaaattccctttgggcaaatatgtgcaaggttcaatataccaaatgatgcattcagttgtcagcgatattttgatagactcaacaatcagctatggaggtccttggtggctaattcagatatggctcaatgtacacactaccatatatagttgccgatatagctgctctgtcagtgtcatcctttccagcaatctatgccaatgatgaaaatcccagcactcgtaggtgtatgtcctttggagaggtagcatcaccttacccaggcactaactcattggctaattcattcaaagtctggttcaaccgattactgttcaactatttggaaccatgcatcacaattatacaaatatttgagtcatgccactacacgtcccttcgctgcattttttaattctttgggaccaaattgcctccatcttgttttttcatcctctcctctctactattcatcttctccacaatgggagctagatttggggcaccttgcctcaatccctccacacagtgatgaaatccacgagactgagacgagaaaacctcacctctccaacatctcgacgtcgtcctctttgctgctccaccaatatcttcgtcttcagcttgaactccctctcatcgcaatgcttattcctcttgccaatggcgtttcttcctccagcaaaatggctgtgctctgctctccctcgccattgctcaccacttccatcctgctgccttgctgctcttccccaccagatgcaaggactggcaccaccgttccacgacaccccatcggtgaggctgggttcgtcggtgcgaagccaccacggcgttcctcttcgccctcagccgccctgcttccccactggccatagggcccttgcaccaccacgcctcaaagctccgccaatgtccccatccgcgcgcctcaaaccagaaccaattagtaatggcatggatccaattaacccgtgaaaaaatgtctgccctggccaatttagtaaacttgttttcttcgcggtaatttcgtctctacatctttcaagtattgctgaatcatagatgtgttctgaatttctgcatgtttctttatcctgacttttgctttcttatacttgcatggtgaaatattttatggcccactctactagcccattccaaaaggaacaaagaaaaggaaacacaagttaactagctttatccggcaccgccgtcaaatgcttgcacgatggggctgtgccgcgttgccccgtctatctcgccatcgccaaccagtctcgcttgccctgtgccgtatccgagccactggagcatcacatttgtttcccctcccataaaagccactattgcttccaacttcaaactagaaactgccacaataatgggtagactagaggccatgcatggttaatctcatttactctcttcataaccctccttccatttctcaaatattttggatagtcatggctttatctttttgcttatgcttattgttgacagctgttaagtatcaaagtctcgccgtcaatcactgcataaaactgaaagtataaaacatccaacatagtgggggtatatttccaacaatttccacgagtgttggtgtatatttggatgcaagtgacaaactacctaagttgagaggaaatatacatgaaggaggagaatcaaactcatatccaaacttatagagttttggacccaaaaacccaattaaacacctctaaatgggcccaaccaccatgccactggactgagggcccacatatcagtgtccaggaggaaaagcggggccaacggagatggccagggttcggccgaaccctgagttcgccaaaccctgacagaggcctaggttgcattcggtagtaactgcttctcaatgacggtttctaccgtctctggcgctccaaccgtcatccaaatggacacttggcatgaggagagtgaagatgctcataagattccatggaggatatgcacactcccaaggcacctccacctataaatacccctcatcatccttcattccaacacacagcaagcatgagttgaattacaagagggggagagagtaagagagaaagagttggaggaatcccggagttattggtactttcctctgctttaatagataatatctttatcgagtaatttgagatttactttgtgatgattatctcttagttagttcctattagcgtactggaatattgtgcactagagacagtgtttactttaatgtttgatcgacattagactagtattaaaatagtgtagacgtggttgaagcatctaagcccccgttgttaattttggtaattaatgacaagcgctaattgtggactaaccgttgtctttgagataattatattgagttaggttcacatcatgagtatgtatggatgattattgatggattaaagttgacggcgcaaagcaaaaggatagatgacggtaaactagtggttgaattctaaattgatcgaggtgttgggcaatcaaaattgtgctagtttatttatagctttgccgtactattaagaggggtaatgaccgagctaagagatgatttaaattgccacattaggtcatttgcatattcacttgtcctcacatttcaaatcacattttatttctttgtgcattcactgagattggcctgaccagggccagtctaaccgcttgctccaagccggtctaaccgcaggtcagaggccggtctgactggccacctagtggcggtctaaccagcatgactggccggtctgaccggcggcacttgtgcggtcagaccggccccctggaggccgggatggtgttgctctggtttgggcgatatagagccgacggagccgtattcggtctgaccgagccgaggccggtctgaccggccagggcaatggggcccaatgacagggctacaatggttagaaaactagccgttgtagagtagcacggtctgaccggccacacacctccggtcagaccggcagagcactgagttgggggatttcgcccccaacggctagttttggtgggtgggagtataaatactcccccaccagcagcaaggggtctctcttggcacccaattcaattgcatacaccccttgcacctctctcacacacatttgagcttagtgtttatccattgtagtggttgaggttgttctagccaagagtcaagtgcattgcttccattgtagagctagtgtggcacttaatcatctccgagccgcgtcatcgcttgttactcttggaggttgccgccttctagacggtttgtggaggagttgcctggtgacctctccgagaagattatggaggaggcccggtgctggtttgtgagtggtttgaagttcactaccttcggagtgaaggaaaaactaccccgagtgatcgaggcttgggtagtcctctccggtgggccggctcccgccttgcccaccccttgacgaagggggcgtgcggtggcttcgtggttgagcggtggagttgggctcgcctcaacggggagtaggaaaccggtgagtttcagaacctcggtgaaaaatctcgtctccttgtttcatttacttgttgcatttacatttgtgcaatttacattcctagagatatactagagatcatatcaccctaggattgctaaactagacttaggaagtgtgatttactttcctagtgatatacttgagccactttcaccctaggattgcaaaacataacttagttgcttagttagacttgtccctcaccgagcctagcaacttatgttagttttgattagatgtcatgtaattttaaatcacctattcacacccctctagtcgacatctcgatcctacagtggtgtctatattatttaataccagtatttgatgtgtatcccatagttcgttagaggtaggtgtagaggtggtgacagccctcgagattacttaagtcctccctatctaggtacagagtagaacacgttctggtagcagcgagcaagccagtggctgaagtattgtgataggattaaattaagctttctgtagacacggttcctccctaggtaatcctctctaccctttgcctatttttgctttgtatccttggatgaacttgaagaggaattgaatacacacattttcttggaaaatcgataccttggaataatcccgggtgaagtgctacatcggtatctccatgcgcttgtggattttatctatgaccgtaagaaatatcaacacttatatatgctttatccgacacagccgtcaaatgctcgcacgatagggttgtgacgctcccgttgccccatctatctcgccatcgccaaccagtctcactcgccctgtgccgcatccgagccactagagcgtcgcgctcgtttccccttccataaaagccaccattgctagcagcttcaaactagaaactgccacaataatgggtagactagaggccatgcatggttaatctcatctactctcttcgtaaccctccttccatttctcaaatattttgtatagtaatggtctcatcttttcgcttatacttatacttatcagtcaaaatttgaattttcaaccttaaatttggagttgattttaggatttttttttcatcgtagtttattttttagcatttgcttttagattatcaacaacatgtatataaaagttgtattcacaaattatttttcggttgtgaatatgttgttgggcttattccatgatggggctgtcagtcatcacgcaccgtcctccatcttaggagcaggcgtattgcctccatatataccttcctgcttaacagctcaaaaaacatccgttgcactacctagaatgctccattggttcacttcctagaatgatttattagttctgttcccttatttcccttgcatgaatacattttcttaccgtatattgcaaattttaagctatccgtccgtccagtttcatctaacttactaatctgcgtgctatttacatatacaggaacaagtttgatgataaacgaggcacacaattgtgccaaacgaggcgcacaaccactcatggtaacttcttatcctaggcacaaaacatgaaaacatgctgatcgcttaatatttgcttcattttattttttttgcaccgcttgcaatccagtgtttctttttctctatctctgatctctataatagaataaggtttcttatattggtctttatcaactaagaatcctagatgatgtcccgcgctttgctacgggatatatgttagataatggagaaatgatgaaatgatttagattgaaatattatgaaaataatttgagaatgatgatttagtatgtgtatgtttagttttaaaatcaaataaattgtagatacaattattatatgcttgcatgttgagctttgtatacttaataggttgatgtggcatgtttgcatgtagattttaggctcttttttttgacaaattggcccttttgaaaaacttatttcaaaactagcccctgccaaaaacttaaaccaaaaataggccgtcagctcagcgccaagccccttggcgctgaggttgtgcatggaagctccaacgggcctggcgctgacctcgtggcagcgtggcggtcaaggagatcacccagcagatatgtcagggatgtcagcgccgaagcggttggcgctgagatggctaagctcagtgccagatacattggcgctgaggtagcggcatatatgccgctgccgcgccgccccagcccgacgccctgttttgttctgctgtgaagttagggttcatcggccccctgcgtcgccctctctcctcccctccaaaaatctccccaaatccccctcaaatcgaagctccttagtgggcgttgcgttggatattgatttgcaaggtaaatctcctccaaaaaccctaccctaatttcctcaatgttttcctcattgtttgtagagttttttggttgaaatcgtgggttgttaaatgtggctcaggctgtggtgtggattagggaatgtgggtaagtatgcgacgttatagttgtatattgatgttagtatagaggattcatatatactttttgtaagttatgcactattttgctaagagtgaagttgagacttgagagggatgtgtattgtaaatattttggggatttatattgattaattttgatgttgataggcatagatattaggaacattgtgaccggtggttgtaaattcaatatgcattagaattgttccattgacttttaagcaagcacaaaaaggatgtttttaagcaaatctcatataagacttctatatgttgattcatcgggcatgcatccatgcgttgaggaccttaaagagatattggtgtattatgtaggcaattgtcagtaccatgtaacagaagtaatggagaacattagttgagcaataactttgagtgaaaagttagttctttcactactttagatttttttttcttgtaataaattccttactcatttttaattgttccatttacttgttgtcataattttattatgttccaattgtatcaattacagatgatttgatattgaattgcaggatggagtactttccagggttggaggatttctacgaggagaagcaccgggctcccaagatagcgagcggagaggttagccccaaaatgtcatatttcaattttttgcacaacttatgtgtatcccatgaattttggaaggtaaacgataaggaagtgaggtacagtacagtcacacatcaagtaaacatacgtatagcataatttgactgaaaattggagaaaataaagattaactttgaaagtagtccagatttattaaatcattcaagatggaagtgttgttctatgaaataaaaacaaccaaaaggtaaagcactaacatttggtgactgaagtgttgttcatatgtctcatgtttttgctaacactaccatgttatttgtgtctattgatgcaacacctcaaggttcaagtcagaggtcacacatcacacatcccattcaacgaccagtacattccgtacctacgtcgagcgaaccttttggcgttcgtcaccatggcgcagcggccgatgcctctatacaacgctgcggctttgacggcccttgtggaccaatggcgcttggagaatcacatgttccacctacccaccggggagttgatggtcacactggaggacgtcgccatgatcctgggtcttcctatgcggggctaggcagtcacaggtgacataagctcaaggaactggaggcagcgggtggaggagtacctcggtgtggagcctccagtggcaccaaatggtcagaggctgacgaagacctccggtgtgccacttagttggctgcgtgccaacttctccctgtgtcccgccgatgctgacgacgacacgttgcagcgttactgcagagcgtacgcgttatacatatttggcagtattttgttccctaactcgggtggagatatggcttcctgaatgtggctgcctttactagaggactgggacgaggcgggtactttcagttgggggtctgctgccctagcctggctctacaggcaactgtgcaacgcctaccgacaaacgagcgccgatgccaatattgctggatgtgtttggctgctacattgcagggttgacagtcggaagaacaagaaggtgactgattgggcttactaccatcaagatcatatcacgcattgggagaaacttgaagcgaacgtagtaccagaccacggggagcacaacaagatggagttcgatgcgtacttggcctggctccacaggaactatcatcttgtcctacgtccggcctggatgctagccgacatagcggaagaccccgaagatgtcgaggagcagaacgagtacaacacacgtacccgtgaaggtggcatggttgagtcgggacctattcgcaatagagtggtgagtactagcacgcgtatgtaatatgcacgctcctgctttaaccttgcgacttactgtatttgtaacctacaggcacgagagctcttgcggatcgtcaacgacgcgggagtggcgcttggcatggctcctaggtcggaaggagagagcagcaccctacgcaacacccaataggtactcgtttagtaagacatgaaactatgccggttttctccaaggcgctaactgaacaatttggttgcagagactacagcaacgatgtcggaagttggcagcacggctggaatgtaggtccaacgatgccgtcgatcaacctccgggccaccaaaagggggaggaacaagctgaagtacacgtggaggcggatgaagaacaagagggggatgatgaggaggcggacgaagaagaggaagcggaggaagaagaggaagtggagaagaagaggaggcagttgagctcggtgcctcgcagctggaggatgcaccgcaatcgttacaggccggtccatcgcaaaccgggttgtctcgaccactacgcaggcgggctccttcccaggactggtggtacactcccggtgcgcctcgtcctcgcactaggggtaggaagaggtaagacttcctggatggatggactggctgaggagtagatgtgtatatacttcctggatagatgtgtatggactacggcttttgttttgtgactatggacttcatggagtgatggactagatgatggatggtttcatggcctatgtacttgtaggaaaattgatggtttaatggatggatggaatgttggatttatgcattttctggatggatttatgcatcatggctttgatggatggaatggatgtaatttatgcatttctggatgcatggaataaattgattgattgatggacgaatagtggattgtctgtgattgcctgtgaaatagtgtaatggatggaatggatgaatagtgtatttttgcctatgaaatattgttgtctgggcagagagctggttgtttctggaattttgcaatcttagcgccagactacttggcgctgagatgtccaacgtcagcaccaaatacattggcgctaacatctggatgggctgaggagtagctttgccgccttggctaagtccaaccttggcgccaaccactttggcgctgaggttgtacatctcagcaccaaggcgcttggtgctgacttccctgccacgtcggcagggggattacctcggccgccacgttggcacgtggtcagcgccaggcccattggcgcttcaatgcacaacctcagcgccaacgggcttggcgctgagccgacgacctatttttggttgaagtttttggtaggggctagtttcgaaataagtttttcaaaagggtcaattcgtcaaaaaaggggattttacgagtgctaataaatactatgtttgcatgttgggctttagatgttcagtggacattaactttacaaaaaagaagagattacatgtactctgcccattacttatatagattgtgcagataaccgttgtatgatgattaattattaagactgcgttcgggaggcaaggttggggaaacaaaagcacacgattatattgtgattaattaagtattagcctaaaaaacttgaaaaatagattaatatgattttttaaaagcaactttcatatagagaaacttttgcaaaaaatgcttcgtttagcaatttgaaaagcgtgcgcacgaaaaacgaggaaagtgtgttgggaaagaggggaaaagaacacagcctaagagcaagtataatagtgagctataagtctactataagcttatgtggaggagagaggtaataaaaaataacacaagctccaagacaaatacattaaatgtataagtgagagatagagagaggagaagaaaattatagccaaccttatagctaatctagtatatatgttggctttaagatgggctaatagtagaaagtgagctctaagcaagctatatgctaatgtggaagagagagataaaaaaaatggatagtgttagctctcctgcaagagctagctctacacaagctccaagaaatatgcatttctgtgggtctagtcgtttttgtcacaggctttttgtgtcttctgtgtatggttttgcctgtttccctttagcaaattgtgcagttgtctagtttttggacccggttttccttataaacagggtcaactctcttcttctaatatatccggtagatctcctaccatctaatgtttcaaaaaaaaaagaaatgtgcattaaattcatagagtgagaaagagagagaatggaaaaaaataaagctaaccttatagctaacttatacatgttagtactacgtaagtagtgagctctactatttaaacttgctctaagagcaagtttaatagtatagccaactactagctccaattcatctataggcaatctaatagcttattcatacaatagttacatactacactattaatatctggtcccacctttcatacacaatgcgtcttggagtccgtgctatagttggctacaaatctgtagtccactgctcttctctcacctcatttatctccttaaaatatgtttgccgctggcttataggctgctattttacctgctctaagtgttttttattggattcagtttccagaactagcagttcaaatattttcttagagcaagtttaatagtccagccaactgctggctccaaagcatctatagtcaacttaatagccaattcatataatagttacttataaacatatatactacacaatcaatatttggtcccacctatcatacacacatgtgtcttgaagtctgtgctgtagctggctacaaatctgtagcccactgtttttatttcttttcttttatcttcttaaaatatctttatagctagcttttagtctgctattgtaactgctattacccctcttaattattcaaccctcccagaaatatgactcatgttgttgtgacattcagttagtagttttatctatgaggtcgtataaaatcagatgggtttgtagttagggtacaaatttcgattatttgaacaaccaagcatagtaataaaatctttttattactctggctaatcttatgtggtttactcatctaaatatattttctttgataattaggacatttaaattccacagcaacgcgctggatattatcagttaatactacaacaactgctaattatttactctaaatgtagggattcttgttaccatgaaaaaaattacctgtttcaacattaccacctgcggatcaaattaggagcagagattatgacctaaatacctcttattaaatagaatgtttatgagtggacgtgtagcggagtaagataagaaaataaataagatgtgattaatgagacaaatagatatatatcgtttcgcttattcgtggaataaaccaaacgacatattcgcaaacaaaaagtaatatgtgaataaaacttttatatacatgttcttagtgatttaaaagtaagaatcagctctaaatttaaattgtggctgataaatacgagtataagcatacagatagagctactccgaaaactgataagtatgagtatatgattgaatctgaaattgtcccttattctaggatgcagggatgtactttaactaggagtaaagaaaatccctgtttaattaacgccaaactttccccaaattctaaacttttttaaaattatagaggcctcaccaaagtcgacagatcccgtaaaagaacaaaacttgcgggacgcctccccttacccctaatcccactccacccaacgaggagatagcgcaagagaggagagggtttctgcggcggcgatggcggcggcggcgaacctggaggacgtcccgtccatggatctgatgaacgagctgctacgccgcatgaagtgcagctccaagcccgacaagcgcctcatcctcgtaggtccgtacgcttcctccggcctcccctcatctagcttccctcccttctctttctttctccttccacgctccaagatctggtgaggaagtaggagatccaactcgtccccgtcccttccttgctctaggctccgggtgtgcaaggcttggtggttcagatcttagtcgcttcgcctttttctgccccttttgtttaatgctccatcgaaagtctagtttccgatgttttccctttcctttgcaactgtagtgacatggagaagccgttgattgtgattcgggtaaaccaggtcgaagtgcgtgtggacttggtaccaagagtagaactgtttcgctcttccagatttcttgccgttgttttgatggattatttcggcaatgagtgcttgtttgatggactgatcttctaaaacaatcttttcttttattaggtaaattgcactaaattcttttagaatgtgttttcttgctctacttttctatgcgtatgaggctgaggaaaataacgaccttattatcctgaagaaattctttatgtcattgtggtagcatggaatttgtagcaattggcttgttccatggaactgataaaaaatatttttgtatgcattgaagtcacaagggagaaaagtagtatttctcagtgttgtggaagtcagaat

SEQ ID NO: 10053 - DNA, 6959 bp, Oryza sativa
acaaaacgtagaataagtaatgaacacaagtaatggctaatacctttgtagctatcattgcgtccaagatggagtgatgactcgtcaatgatacggacagtgaggtcagatgtggaggagcagagagcagcggcgagacaagctgcagctgctgacttaccactgcaaggctgcccacatattaccacaagcgccatggaaaatgtatagacctagcatatgaagataaaatgtatcacaagtgtttccaaggtttaaactcttcactagtaaatctttcaatgatatagcaattgagaaattttcccaaaaaggtcagatgcatgccatagccagtctcaggaggtttgaagtctaactccactacaaaggagcagtaaaacaaatgagaatgcgaccagattgtgatcagtcaaatatcacaatcaggcgaatttcaacaagttcttactagttcattcaaataaaactaatttccattgggataaacatcaccaccaagcttcaattgtacacattgatgcaaaataacgtgggggcaacgggtattttgcttgcaaacaggaggggtgctattagttctacacctcgcatcaaagaaatcatcactgtccgggtggatttccaatccatatgccacgcgaggctcactgctgaggaggatgacgatgaaggggaggctacgagagaagaagcaataccttcgattccgtccgaactcagacggaggccggtggaaggaggatggccgagtcgcccctccaaacagtggcggaggacggaaaaaaatctaggtatgggtgtggcccatggactagcgcgagaattagaacataacaagaagaaagggaaaaaaacaatttcaattcacgaaattatatgacgcaacattatcccatcatgacgcaatctcaattctcaagcatggcaacaagcaccagtcataagttcacaattcatcatccatttgccaaaagtgtaaatagaagaggcactcataaataccagaagattgcagttgtcaacaatacatcacatgtaagaacgaactattgaggatagatagacatgtagtgatgtagacctgctgctgccctgcctgcctcactgcctgttgccggctgccctgctgcgctggctgcctgcctcccgcggccgccgcgccaatgcccagtgcggccgcaccgcagcgcgcccacgccgcctgcctcccagagcggccgcgcgcccgcctgccccgccggctgcagagcccccaccgaccaccgcagctccctgtcgcagtgtcgccgtcggccgtcggcccgtagcgccgcgccgccgccgcttgcctcctcagccggatgcctggattggattggggattggggattggggaattttggaggtagggtttcatgttcaacaggtcaaaaggcccattacacaaaaaaaaaagcccaattggttggcctgttcgcacgtgggctgtgggcaggattggcttcggcaatcggcagttggacgcctcgccgccggctcgagcgtccgggctgcaacggcgcagatcaatcctctgcagggtgccggcggtggcggagcggaccgtgcagaagctgggttggaggtcgtgcacaatcggggtatcacctactccctccgttccaaaaaaaaaaaactcaattcctaaattttcgtgtctaatatttgaccatccgtcttatttaaaaaaaatttaaaaaatttaaaaatataagtcatacataaagtattattcatgttttattatctagcaataatgaaattactaattataaaaaaatttcatataagacggacggttaaacgttggacacggaaacccaagaattgagtctttttgagacggagggagtatggctgaggctgatgccgacgagcccagtgatgccggacgcgctatctcagcctgacttcgccgtctcgcgccggcccagcctacttcaccccgcgctgctctgcgacgaccgtgattcggtcagtcccacgctctcgcctctcgctcgcccgcgcgcaccgccgccgctcgctaatcgctagagttagggatcgggagcagtcaacagtggcttgggttggaaagtttgcgggtagaggtgtcttcttacatgttgtcccatttaatctgggtccacctaattgacatctaaattaggagcattttaaaaagtgatggcaaaattacaaagtttagaaaatagagataaaatcatttgcattgcaaatgaaagtaggggcaagaacatgattctccctatatatattgttagagttggagaaagaaatggaggcatggtggacgaggtttagccgcgatgtcggctagtgtggaaaaaaagtcaaaaaaaagttttcatctggcttttcaactaaccgaaattaatttgattataattcggttagcactctcgattaactggcattagaaaagaggcctaattatttatctcgatgagtgttaagttgtaagttaaaattagtcaaacaacttatgttctgtctcaatttcgaccaaaattacattaagggcataacaaaatctttcaatcaaaattaagatacataattgagatacaaaattagtataaattcatgctaatttcattgccattcggtgaactattccaaatatttcaccgaatggccatgaatttggcatgaatttgtactataatgtaatgaacttatttgattactgaatttggcaaaatggcatgaattttcgcatgcatggcaataaattgtactgaatttgttctgaaatggcaaaatggcaataatttagcatgaatggcaagtcagatatagatggaactagcttaaagttgaacacaaacatagatcccacataatgtctagcacataatcttaaatttacatggtagcagcaccattaaaagtagaacacacaggtttgtgtggagcttgggataccaggagcaaaacataaaatagtctagacatcaatctacataaatagtcttgacatcagcttgggatacctggaaatgacaggccacatcacaaaatacataatatttgatattgttcaaatcgacgtcagtcttcatatcctaagcttcttccttggagtaagggtgtgtttagttctttgggtgtaaagtttttaagtatatggacacatatttgaagtattaaacgtaaactaataacaaaaacaaattacagattccgcatgtaaactgcgagacaaatttattaagcctaattaatatgtcattagcaaatgtttactatagcatcacattgtcaaatcatggcgtaattaggctcaaaagattcgtctcgcaatttacatgcaaactgtgcaattggttttcccatattaaatgccccatgcaattggtttttggccaaaaattttttggatctaaacaaggactaaactttcttggagaccatctaggtggcttataggaatgcaaattgctaaattgttagcaactgaggcagtagtaaggaatatagtagttttgataacattacctccttgtaggcccatcagtaggttttttttgtgtggctaggaatatcagagctattcccatactttacttttgtagtgttcctccttggcttcctcttcttgcaagttttcagattatgtaggacataaaggataagtagagaaattaatatagatagattaatacttgccttttctttgtcccattaagatgactgttggtattttcttaacaacattgctagaaatatgaattcccggcaatggcgcaaaaataatcctggtatatttatggttacagaagtaatccgcaagcgcatggatataccattgtagcatttcaccgaaaatattctcatatttatttaatctcaagagaagatttataagaaagaactatgctaataatttatatacattactcgtatatatcaaagtctaagcatgggttaattcagatcatatgggtagaatgacacaaagcagaaggacttagattctctcatttaaataattttagactatctggaagaagaaatagaaaaggtaattattcatatacttctaataaacactcaactttagtttacatttgctagtatacaattgtgtaaccaatacccctaatagtgccctcctggtttttcgaaagaccaccccgggttgccgagtttcttacgacaacctgtcatagtggccgtccaacggggctaaatacggaggagtaccctccccaggaaagtgtcttaggaatatatatcaatgtggaggaatacccgtgctgaattgtcaccatcagcggcccgtcactactgtcccacagcatatatgtctaattaatgatatctaataatctaagcgccatgcttacattatcaaatactactctataccctcgagaataatatagagcaatcattcgcatgaacattaaaccacaccactgcacctatctggtaggctagtcacacaactatatcggcacaaataaaaatgaaaaccagtgctcaggcaaagtaaagtactgaatatataaagaaggatattctattaattctgaaagtcttacaaaagaagaaagaaaagctactagagccatacccgaaatcttccgaagactcaaggactctgagaactattctattgtactccacttagcactagagcactaaactaaacttgagagagagatcaaagcttcttacttgaggtgtgtagaaatgaatgaagtgacccctttatatagccttccaatgacagttaaaacggttggaattgtcggaaatgccccccaaccgtcattacggaagcatcttgaacgtacacgtggagggccgagctgaggcgtcgttggcagggttccgccgaacctaggccagcctagcaggcctccaaattcggtcgggggatgataggtgggtcctcatggcggttgtggcaattatgatggttttcaggatggttacacctgacttgtgagcccttctatccttaagcttgcttaggagtgagtttttcttcatttcttcaccatttatgtgctaatgatgaaccctgagttcctctcaacactcaaggctgttgttggcccgatctttcggtgagttgtgataactacgatttgggagaaacgttgacgatccgactacaaccgtacgagacgttgtgttgcgccttagcgatcgatacacctctccgtaggttgttgatcttgccggtgcagatcaaccctattcctgcaagcaaatcgaagaaacaagcaagaacaagaataaagcaatctgatattgcaaataggaatttaatacaaatgataagttggggttccgaagaacaagcagacggacggtctagccgacacgcgcgctgcaagcaagtagcaatggctaaactttaatctaacaaaaacccaagaaaccctgaaggggtacctaactatttatagaggtgggaggacgactaagagggtccaagggtcgtgctccaccagattggggcgcaccccacatgggccccacatgggccagggtcccaaacaaagttacaagcccattggcccaatacaggagacgcagcaccttgcttttgtgattgcggccaaacgagatagatttccgagatgaggctggatccgttggaaggaggacttcgagagctttccatcaagtactcacgggcccaaaacggagcacgtatgtagatttggcggccgtttgaagtcagcaatgtaacacgtggccgaatcagattgcagcacatggaggacttgatcttgatgtcttcttgttgattcatgatgtgagcaatggtcgtatccatagtagccatggtcacatcatcctccccttcttcacagaaaaccgtcctcggtttttccatatggtgctcttcgcgcagtccactgaaaacaacctgtttcttgcaatcaaaacaagacaaactcgagacaatatgattagcagtaacatgtctctctagcttgcatattttatccggaactacaagatgttctatatctgaacaaatgtaaactctatgcaccaaaaatattcctctatcattatattcgccaaagatatgaaaaatagcattagttggacatggcaaatcagatttagcaaataatttctccttcaaattatcgagctcacaaaaatcatcaaactgaacatagcccaaagtatttaaagaagatagcattcgcgttcctctacttcattagcaatgtgaacaacatgcttagaatcagcacacaaagaaatagtagaactaacatgttcattcactagttgtggcatggatataagtgaaacattatcacacaactcttctttatcacaaggaacagcaagtaaatcaacttgtgacaaaggcaactcagtaattgattccactaatggttgctctactatagcatgaaaagtggacaagtgtagctcaccttgagaatactcaccttcatttctctcagcaccatttaatttaccttgcgaactttcttcagataatgtagctgcatcagccttctcctcattcgcgagtgatggaagtgacatctcaaacatatcgttcttctcattttggagacttttctgaacttcctgcaaaacatcagtgataggaggcacaagcatatcttgttgctccattggattctccaaaattttgcgctcaacaatgcaagcaagcatgaacaattggcctatatgattatatgtcacattaacaagcccagcctgaatattgaaattaagccctctgaaaaatctagtcattgtgttctcattagattcttgtaaaccactataagtgatacaaattttaaaatcatgaaagtactccctaacagttttgtcaccttgttttagatgttcccatttctcaaggagagcacgtctatagtatgaaaacacaaatctttttctcatcagtattttgcattcatcccaagttt

SEQ ID NO: 10054 - DNA, 4811 bp, Oryza sativa
atcgctagttgaattggggtccaatcatatgcgttcttatcaattctggagttcaggtaatgacatgtactccatttaggtgttatgaccagaaggatccaatgggcactgcggcattaatatagtgaaagttaattaagtactcaagcaatatgtcatgctgttgtgtatatttagttaacacacttactattgattataggcacacataatgtactccttgtctcggcgggaccacaaggtgtcgtagatgtagttgaccattccttgacggtcattctggagatttgtgacagtgaccacttgtggatcaaggaaggcaacttccagtgcatgcttctgacaccattgacaacttaacctacacacaggatcaacaatcttgtaagcaagttaaaccgattgttattaccagaatgagttgggcgacaatatttacaaggagtagcacttaaggaggcttgtgtccaccgctcggagcctgtagaggtcgaaaagatccttaaagtcgaccacgacataatttgttggaccaaggaatggctttccatcgtgctgtccaaggatatcggtagctttacttggcttcctggcgttagatttctccatgtagtataagtgaaggtccttgcaagcggtgcccattgcggcaagcacgtcatctccaaccaatggcatgcctagttggaactcctgtggagcgacgtatttcttcttgacctctttgcccttagtctcttcctggcccttgcccagatctagctttcttggagctagaagcgaggcctgcacctttcctcctcttcctctcccctttgcttcgggtttatcgagagtaattctctgaggggaagagtgtgccttcctgctcttcttcatcggtgggggttcatgaatcgtcttgctgtcggcctccgttcggtcctccccaaaatccgtgtcgtactgcatctgcacatcgtaagattgtgcatgacgatcttgagcaggaggggctgaaggagcagaggcgggtctctttggtggacgaccgcctggtgcaatggttggcctcgctgtaaccctgatctcaatgaggtccttgggccattggatgaaggtaccacgggcatttcctagtgagaggacctcgtcgttcggtggatacttcagagggaacagctcgtatttgggcttcaccgagtcgacttgaacttttgcacagtcggccctgagttgcgctccatgcactcttgtctctggggttggcttgtacgcaagtccctcggctgctggaacagtgaaggtcagcatcaccctaactatgagggtgcagctcgttggtttctgcgatagattaatcaatttttttagaatattatatatcatatggattcgtccctatgtctttcatgtattgagtaagttcacggttaccgttatgtggtcgacggtgctgtcgaccgatgttggattttccgccaactcagttgatgtgcaactgctgcgtttttcgatgggacttcctaactctttgtgcgcagcagcagtggcggcctgggggatctgttgctcttctcggatctcttgcctaatcttggccctcatcgactcgagcttttcgtcgaattcatatgtcagctcagctcatatcgactcccggatcttggcttcaaggcgtgcatctttctccgccttgttggaagtccgcttcttgtactgccacgcgtagtctggaaatccatacttccagggaacagaagacccaacgccccgtgtccgtccacggtgttccttgttgcccaacgctttcgtgaggaggtcgtcctcgcatctttgagagcaggcctcttgcgaggcttgttgctcggcaaccaactccttctgcattacaatttagtggggtcaaataaactgcacgatgggaaacaatgcgaacatctagtttgactagacacttactatagcttcgtatactcgttgatcttctgcatttggcatgaagattgtgccatcatcatgtttctggtacctagccctggcccagttcctagcccgagggtgtgggatatcgccaaacacgagcggtgtgcacgattcctccgcttcttcatcctcacgctgccattcctcttccttaccggcatatccggcggtaccaagccggtgcggatgctggttcttggtctggagcaagcgatatgcctcgcttctagctttggactcgggggtcgacttcttcgcatggaattcctcccagacctgttctgtgatccaaggaaatttctctcttggatctggatttgccgggttgtagacgaactcaccgactagcttagtcttgaagttcttccaagcagtgcccataaccttgaaagcagcccgcctgagacggtcctcatgctccgcaggataatcaaagctctccttgaacgttagccaagcaatgtccttctctgcgaccggcacgagcttgaagtcgtcttgcagaatactgaatttctgcctccctatgaccccgcagatagacctaaatcggctcaatattttccttggagatgtcggcaaccctacggcgtccaccgctgttatgcggaaccgttccttaggaattttgttccctgtcctaggagtacgtgcccttgaggacccactagttgtcgtcgacattggttcgccttgctgagacattgtctacttttttccaaaaaaacaaagaaaacacaattgagtgctacaatctattacaatctattaaccacatttcacaataatttcattcatgcaccacatttcatcccaacataaataaaccacatttcatcccaacataaataaaccacatttcatcccaacatgaataaaccacatttcatcccaacatgaataaaccacatttcatcccaacataaataaatctcatttcatcccaacatgaataaacccaacatgaataaaccacatttcatcccaacatgaataaaccacatttcatcccaacatgaataaaccacatttcatcccaacatgaataaaccacgtttcatcccaacataaataaaccacatttcatcccaacatgaaccacattgcatataaataaagttaaatgaactacatttcatcaatcactacaatcatctatcacaaaattcataaatgcaccacatttcatcccaacatcgacatgtctcactcacagttcaatcacatatcatccacatccacatttcaatgacatgtcattcacagttagcagagggcggcgcgatggaggactcacctgaggatggccggtggggctcggtggcggcggcgcccgggctcggtggaaagcggcgccggtcggaggagacaccgatcgggcaggtcggcaccgggcgggcggcgtcatgctcagtgggggtcggcgacgtgggtcggtgaggacgcgggcggcgacgacgaggaaggccaacaccggtccggtcggtgtaaaggctcggtggcggcggcggcgggctcgggggcgggggtcgtcggtgaggaggctcggcggcggaggtccaaatggagggccgaggaggctcggtggtgacggcggcaggcttggcgagggaggacgactgcggcggcggcgggctcggtggcgacggcggcgggcttggcgagggaggatgacggcggcgctagggttctaaggaggcgggaaactgtagcgggacttagaaaaattttcgatccactctgagaaaccctagttatattagagtgatgagtcatctcaatcgggctttgccgtagggccagtcacagatgacgcatcggtgacgggctccatactaatgcccgattgagatgacattcaggcccgtcacggatgactcatctgtaacgggccctaagataatgcccgatagagatagattaatctctatcgggcttgaactaaggcccgtcaccgatgactatttttccatttcccaggtaagtctttatatttgtgagtacaaaatatatagctgctgtataataatttattttattagttataacacattttcggatagtaaatgatttcaaatcgaaatatggtcaacaacaaaattgtagaggttatcaagatctacaacttttattttggtcatttgtctatataactttgtttccaacagcttgaaattgattttgacaatatgacaaatataatcaacatttgtaaatactaaatgatttgaaatggaaatatggtcaacaacaaagttgatcctctcatcaagatctataacttttattttggtcatttatctatataactttgtttctaacagcttgaaattgattttgacaatatgacaaatataatcaacatttgtaaatactaaatgatttgaaatggaaatatggtcaacaacaaagttgatcctctcatcaagatctacaacttttattttggtcatttatctatataactttgtttctaacagcttgaaattgattttgacaatatgaaaaatataatcaacaattgtaaatactaaatgatttcacatggaaatatggtcaacaacaaagttgatcctctcatcaagatctacaacttttattttggttacttcttcatccgacaaagtgatagttatattattcataaaaatcacatttttctcatctggtttacaaatatcaacacagatatgttaattttgtaaacattggtactatcactttgtcagatgaagaagtgaccaaaataaaagttgtagatcttgattagctgtacaagttagctgtttatggctttcccatttaaagtcatgtaatatttacaaatgctatttagatttgtcata

SEQ ID NO: 10055 - DNA, 5354 bp, Oryza sativa
ctcccatatatatatatatatatgtcgacgggggataccctagaccagatatagagggtattggggtccgttggaacgaggatctacgtagtacgacatcaagcaaacagaaagcaaggattatactggttcaggccccttgataggtaatagccctaatccagttggtatgggattatataatggaaatcacaaattataaagggaataacaaaacttgatggtaccgacgagaccgtagtcaaattggttcgactagatctcccggcgacttggctcctgtgcgctccgacttcgtaggctgtggtgaatgtgttcgcggtgagattcgatgccctaggtcctgcccagggggtccattttatactaggggtcagttgatctccaagtaggactcggagatatcggacctctcacgatatggtaaagacccggtcttgcccgagtaggactccttacatccgtggattctatttctattacatgatagatttcctaaacgtataccagaactatccgtatacgcatgggtataccatatcagtactcatcgtacgtccaaggatagagggtataccttatccgtaaccttgacagtagcccctgacttctgcttaaatgaactcatgtaatcgatcggaacttctgatgtcggaatcgttgtcattctcatctggtcgatcccggcatgagaaccgtagaggcaaagagtcatcgacaacgtcgcatgaagttcaacagttatgagtgaatttaaattgaagtatgaaaactaccgcgcgcaatggacccagaattttccggcggcaatctctctcctttcctcggaatacgcaccgtcggtagtgcacttatttaaagggattttggaaacccatttgaagtccgttcaccaaaaaactcttcagccttctagcgcccttcgtcttctccgctctccgcaaagaaaaccctagcttgcttcttccctcttgttctccggcgatcctccggcggcgatggatcttgacaagtccacctcaaccaccgcgtccatgaagaagttgcaggacgacggtgccctccctggtcgcgggaccatgtagagggagacaggaggtattaaacccgaacccgtcttgggccgcatggttgtggtcgaagattacatttcttgcggttttcttcctctgccttccgagtttcttcttattgtcttgaacttctatggtctttctttgcttcacttgaacccgaattccatcgcatttcttagcatctttgctcatctttgtgaggcctacattggggtagagcccttccttgatctcttccgcttttactacaagttgcgttggatggaacccaacagggtatccggatgcgttggattccgacttcgggatcgcctgaagtcacgttacatacccttccaatgcccctcttctcgtagcaagtggcaggcgagatggttttatcttcagatagaaaattcagaccccgtccttgttgttcctgaagaacagccagacaaaatcccagagtggaccgccaaacccgccctaactccctccctccagtctttcatcgacatcatcgatgacctctgaaaacgggggttgtcggggtacgaagtcgctgccgactttgtaggtaggcggatccaaccgctgcaggctcgcgcccatccggcctttgattactctgggccagaagacatgacccgggtttctcctcggggtattttttcttgtatttcaaactttactccgagtgcgtctgtttctcctgacttatcgagttcttgttctcgatttataggtctggacagtgacaccgtgggacgccgcgtcggccaggtgatgattagtgccccctcagaggcgagcgacatcccgatccccctttgcgagaggggcccggccgaacgcactgctgcgatcaatgtgagtgtactcaatgactcctttacatctttctcctcgagatcgcgtcgtgatttcacgttatgtaggctctccctctgacggacgtcatcggaccgctcgtggatcatcaggcggcggcgtcattgaaggagggcgtcgccaaggaggcgtccgatgttgctgctgctgccgctgctaccacgagtggcagcaacattccgaagaaggggagtaaattctcctctgtactcgggacccatcggaaagcgccaaacccggcggtaagcctctctcttgttttttaacgcgtagtcggaataacttgacctgacaccatctcatcttacttaggactcagacgcgtctcctctggctcatcgaaggcaaaggcttgtgacgatcggcgagaagtaagtagacgtttttgaagtcttttcattcacggagtcttgatcgcttagctttatgaaagagaggaaaatcttcgtaggacggcgcgggcgaaggcgacgcaaggtgggaccgatgctgcctccagcgcgtcccctgcggcgacctcgacagatgtcgtggtcgctactaaggaccgggaggcggcaccgagtaaccccatcatcagcctcatgcctactcggggcccatccaccgatgacctcacctggggggagctccaagtggagatggagcatatcctccaggccggcgctcgcggcgtaggtcgtgagattgaggaggccagggtggtggcgtcgtcggcaaaccagcgtgccgaccaactggctcgcgacctggcggaggcccgcgagaacctcctaaagatgagggagctggtggtcggcaacgagaggcagcggcaaggacttgagcaccggatgtcggagctcgagaacaacctgtcaaggatccgaggctcgctgcggatatcgcacaccggcctgcaccaactcgccggcgagtgtggtgtcacgactaccatcccggcgaaccctgacgagttctcgctgacgtcctcactcgcggaactggctacggcgatggaggagatcacctccaagcatgcggccaggattggggaggagacgtccaataggatctacaccggggcgtgccatgtcctcgcatgcgtgaggctggcacaccctgatctagaccttaagaaggctttggatcagggggccgccgatgacgcgcgcaagggtgtggtggaggaagtcgatgacttgggggagtccgtcctccccctttttgaagagtaagatatttgttttcccctatacccttaatcctcatgctgtaaaacctttgttggatgcaaactgctcttatctgaacagtcgtttccctcgttttcttagcatgtgattccgagtactttgttgtcgttgtagagatatcgatattgaggatgtccagcagcgcgggcagcctaatatgccggtggtcgttccggcgcttgcactcgagccgtttgtgccgcgggaagaggtcagtcaaagcccgtccgcggaggcgaatatggcgatgacgtccctaggtttgcgtcttagtctctttcactccttgtattcggattgacttaattagctgtgtcctcgaaagagaagagtagcttgacttagtctttttcgtcccaggcagattttgagaacacgatggctgaccgagtttgtcgaatccaatattggaggacgaagctcgagatggccaaactcgaaaacaccatgatcgaggtgaagaaggatcaggctgtggaaactcttcgaggtcgcgaggtatggttcaactcgtacctcaagagctgctgtacggcgatggcgagggtctgcaaggagctccgagttcctcgcagagatctcgaggagtcggcagccggatatatctcatggttgaatggggcttgtgcacagctcgaagggatcggcaaacgtatcgacgaggccctaaagcaggagtgtcgtcgatcgagccagtacaccagaggacatgtgctggcctgcatccgagatcaccgcccgcagcagcacctcgagttccttcacgaagggttctcacgttctcggaggactcccacggagattgatggtcttgagcagtcgatggcgccgcttaccgagaaggtatttcggtccgtggattggcgttggccgtcctggtagtttttgtatcctgtaaaaaatatctcaaagaaacatgtaatatattttggagtatctatgacttgcaagaaacacttgtgaaatagaaaaggaatctatctaactaagttttcttactctgggtatgttgtgtatgagcgttttctcactttgcgacttcgatcagtcacttgagccatacactcttcctagcccctagccttgtcgtcggagaattattctcagaggataaggctcttggactcttgacttgccttggttgaaaaagcgctgaccctagcccccagccgtgaagttggaaaactcaatttccgattacacggcttggttaatacgcacggcgagaactcttacatgaccagaacttacatggtcgtttgtctctacatgatccgacaaggccttatccgctctaggcgtccccagccgaagttcccttaggttcctcagaggccttgtcaggatggcgtaaagggacatgaggataggtttcaactctaggtgtcgtcgtggtaagggatcgccgggaaggaacacttagactgtagtctttacctgaaatcaatctttattgaaatcgtaagatgtcttacaagtatggatactattgatttatacataaaattttcgtaattgatcaatgttccatgaatttgctaactcgcgaccatcgttgtctgcaatcttgaatgcacctggccgcaagaattgcgtgatcgtgtatggtccttcccacttgggtgagagcttgttacgccctgcttggctttgaacccgtcggaggacgtaatcgtcgatcaaaagtgtgcgtgctctgatgcgcttctcatggtatcggcgaagggcctgctggtagctggctgctctgacaacaactctttctcgatgttcctcgagtagattcacatcgtcacttcgctgcttctcctgttcctcgtcagagtacttctgtactcgtgtgctctgatgccgtagctccgtggggagcatagcctatgagccatacacgaggaagaagggtgtctccttattgaacgttgtcggtgtggtgcgcacggcccatagatcagaggggagttcttcgacccacttcttgtcgtgtgacatgaatctgtcgtagactcgggtcttgatcccttgtagtactatgctgtttgcccttttgacctgtccattgctctgagggtgagaaaccgaggcaaaacaaatcttgactcccaatccaatgcagtaatcctggaagtcggaattgatgaactgggagccattgtctattatgatgcggtgaggc

SEQ ID NO: 10056 - DNA, 1480 bp, Oryza sativa
cttgacgtagtttagctcccagatctcctcaatgcgcccgtagtatgtgtttgacccaacttgatcctggaatgcatctatacggacgccactgttttgcactgtgcatttgtcatcttgtttgacggtgtaaaatgtgtatccatttatatcgtatccttgccatgtgtctatggtccaagacggtcccatccccaccaactgtactgtctcatttgggacaaccgtggacattgtcacacgattcttgaaccattcgttgaaccgagaattatgttctctgttaatccatgcatcagatggccccaagttctcatctcggattttcgctaagtgctcctcaaagtatgggccaacttctgtcatatgttggagcacagcgtaatgagcctgcgcgtacgacgcttgatcgggcttaattcttttccttccgattgtgccaacacctgacaaccttccctcgtgacgagacgctggaactccgataggatcggcatcggacatgtaattgacacagaactcaatagccacctcggtcgtgtaaccttcaatgatgctcccctcgggtttagctctgttacgaacgtacgacttcagaactcccatgtacctttcaaacggtcacatttcccttagaaaagctggaccacatagttttgtttgcttcaccagatgaacagggagatgaaccattataacaaagaaagacagtgggaaaaacatctccaggtgacagagggtattcacaatattggtctgcagcccatctagatcttctggatctataaccttctgtccaattgcattgaagaaggcgcacagacgttggatcgtgtgacgcactttcggtggtagaatgcctctgatagtaactggcaagatttgtgtgattagcacgtggcaatcgcgagacttcattccaacaagttttagatcgtccaatttaacatacttacttatcctcgctgaatagcccgatggaactttaatatccttcaagcatgataacattgcgatcttctcatccttcgacagtgtgtggcaggctggagggaggtacactttacctgtctctgcatcttgtatgggctggaattcgctgcgaatattcatgtcctgtagatcaaggcgcgcgttcaacccgtcctttgtcttcccgggaatattcaacatcaggccaaccaaactctcacacacattcttttctacatgcatgagatcaatgcaatgacggacatcaagatctttccagtaaggtagccgccaaaatatggattttttcttccacatacccttctcctttgtcttgctacgttttcttttcttcccaaactcattgcttatgtccttgaccatattgtggacctcatctgcggacaaatctttgggagcaggctgaagttctctcttaccattaaaaattttcttctttcttctaaatgtgtgacgtagcgggagccacctccggtgacccatgtat

SEQ ID NO: 10057 - DNA, 8698 bp, Oryza sativa
cacaggcgatgaaatgcctgatgacgtgcaaaaaagaacaaaaccaacaaaatccccccagggagagaagcaaacctaggaaaaactggccctttggttcatcagcctggagaaaccaagaggcacatagacaagtgcattgtaataggaagaactatgattcaggaagggccaagaacaaacccgggtggtgtgcctcctagatcggccgcccgccccatcgaccttggctccagattcgccaccatcctcagatcctcttctttccaccacgccattggctacttgcatctaatgccgctgctcatgaattttccatgtgaaaagactaattatgacttataccttagtaatatcttacttaaatcaagcatagtagcatcttactaaaaccgtaagaaaaatgaaagtacaaaaaaatctcgagcgaaacaagacaatcccatgggtgtaatttttcaacttgcaagaaaatttacccaagtaacaatacgctaatatgtatgaactatcaatttctgacctaaaaaattaccagcactacaagattaaaagtgaaaattgggactggcaaagctgctagataaaaaaaatccaaagcaatgccctatagaaatattaggatatcagaaaaatgaaccaatagataatgttacaccattgggaaaaattttatcattggcaacgccgttgtgatttaaatagtagaaaaatgcaatcttggcaccatctacaaaataactcttcgtcttcataacaaaagcacatgtaaactaatgttctactattcaatccatcagtacattaaattagcatgaatacatgttgactaaaaataaatatgctgaggtttatctaaaacaccatttcatttgaagcaacacaattagaggataaaacatatggcatcccatattaaatatttccatggtttcaacaagtaacaacagcatttgcacctagataatccaaccaaatcactgaaactcattctcaagaaatgcaactaaatggaaattttgaaatagcacattattctaccatggtgtactaaaataaatttgaaaaattctaaatcattataagtaattcatgctaaaatgaattttcaaccacatgatataaatcaaacaacatgataatttaaatatggttacaggtaatgacaagcatatcatgtatataaatgctgggggcgccttggcacgcctcctatatatagtttgctcgaattgctgtttcgagcagtggtacctactatgtattacttcgtacataagaaagaaaaatgacagaaaccttaaaggtgcattatttgaatgataaatagtcagactatgcatgagtcgctgcataaaattggtcgtgcctgtgattacattctgtgttgacaacaaaacatgcaagtaacagagccctgctaaatctacatgacaagtaacaattacacaagtccaatggattgacgagataagagtattagtcaatagatagtccagacttcagagaatatatatgattgcttccaagcgcttcttaacgtagaaatgggagatgcaaactgctccaatctgaatgctattggttgccacgaaatctatccatctcattctgaggttgcaatgaccatctattgacgtgagtatggtggttgggtctcctccagcttgtacttgaatggtttaatttgaactggcttagtggccatatgtcatgttgaatactgtcttgtgaaatattggtgagaaaagcaacagtcagtttggcatgttttcaaacttcgctgctcaatggttgtcttgttaatggttaccgtctaaaattttttagaatggtcaaggactttttgatatttcctctatgaagcttcttgtgtcacttcgtaggttcctcaaatgggcgttcagtttatttgttcttttaatggatacactgaaaatagataagatatgaaaatcgatttgaaatacatatgtgcgtggatagtttgaaaaaatatgctaagctcacatgaatttttgtaactgcattgatcatcacggttacataatttatctgtgtcgccttcagaggatgcttctgtaatgtaacggaggaggattatgagtaatataactgctatatgaggtactaaaggcaataataactttataagagtagatcttgatctgcgtgattctaaatttatttgaaacgtaaatgcgcaaggatagtctggaaagtggaaacagatgataaacttgcatggattttgggaactgcattgaagacgttgatctccaagatatgaatccattcaagaagaaagaacgaacggatagggccgaaggaggaagatttaccaagatgagtcgaagagggtggctattcaaccttgacgaagtcagcatgccaattttttaggtcgagaccaacacctcagcagcgtcatgttgctcctttccagctcctcctcaccacactggctgctggcctgcatcagcatgtcctccgccgccctagagtgagggctgccaacggcagccatcatcttcttcaccaataccatcaccttctcgaatggatctgctcctccttccccgcgatcgagggagaccgggacagcaatacacacagataagatcatatatacaccttctttgagccaccaaacagcaagcatgtgatagctttcttgacatcagaatgaccataaattcaagggccaatcattgagcaaatcttggcatacgcatttgacctctgtacaaattcttagaattccatttcctacaaaccaacaagaaaattaacgatgtaaatatgttgtagcacccttcaacaagaaacttggaattttggaaagcagactacctcatcaagtgtaaaatttgagggaccatttgagttggcatctagggaggtaccgtttgtctatatggaataataagatttattagtacaaggaccatttgagttggcatggaggaacatggactcatggagtacaaggacttcaccttgcaatgaggcattaaggaccaatgatgttttctcaacaattgaatatgtatattctgttttatccatccaacatataaagctgccatattgagtttatattgcttacaagttatacccaaactccgtacaagttactaaacagaatatgtacaggaggcgcgttgttctaatctctacaataataagtgactcaaactgcacattgattgattaaaaagaattgaaagctttcagcaagcaagcagatcctatagataattgttaccttctgaaaaactggatatccagctttaaatcttatgcaaaggaagaccattattggctagaatggcccagctcttgtcacaagaatgggttgcataggaatgttaatatctcaaaatctgttcatgttggaagagatggagttagtttttgttcaaaaccaaaaattagtggaactttaaataaaggcaaaatttgctaaagaacatctaaaatttgtgtaattggctgaaggacactgcaaaatcgtgtcactgctaagggacactacaaaaatgatgtaattggctgttggacactggaagcattattttatcattttcgagcaaaaagtggagagagaaattttaaaaatacaagtttgcccctgcctcttaattgcacaatccaagcgctggttcacagccaagtacacacttattgtggatgagctgccgcttgagcaggtgtgaggtgaggtgcgtcattgccgacagtcaggggcatcattgccggtggggaagagcgctaggcccaaaattaacctctttcaacttgaagtacaaggcagcgcagagcagtagtatcccaaacgtgggggtgtctcggccagcaccgccgccatgaaagcttttccagcgttgcgaccaccatgtcgttcgccgcctccgtatttggcttcaaggtgagcacgaagccaagtcgaatgatgggtgggcgcagaagaacgccgcgtgcgattgtgagtagagctgctgatgatggagcaggagctcgggttgcaaaggggaaacaaaatgtaaagctcgataccaaattttccgcatcgccgccgctgccgcttgcattggaccattgcctcctcgcgtccggccaccccgccgtcgctgcccttcctctccctgacgcggcccccacctccaccgcttcctctccctaaccctgtccgccgacgctccaccatcaggtcggcctacaccgaccccaaaaacccatcccgtttgttgctcaatattgagctgaagcaagaagaagaacagtgccaggggcacattcgtactttccacggtttttctctctccattagcatcaaatataataaaataatagatctagtgcccagcagccaattacaccatttttatggtgtccctcagcaatgacacgattttacaatgtcctacagccaattacacaaattttggatgtcctataacaaattttgccttaaataaaatactccatcggaatataatcaaacactgaaaccattgtaaaagccaatatgtcctatgtattacatccactacgaagcaatattcgacgagtacaatggaacttagaatctcaatatatgaattacaatgtatcattataaatttcagttgctttcaacctccttgcagttttaggagtaggattaatacatagacatggttactctaaacaaattagcatgttaccgcactttaaaataaactaaagcatagttaaaaacacccatccatgacccgcatgatatattccaggttagcaagttaaatataagctcaggccctcctatataaagccgtggcattttggttatcaaatttacagaaagtagcaacgaacacagaaatgtcaccttggtctaccaaaagatgcggtatcagatgggacttttgcaggaagatctgggtgtaccttagtgcaaagcttctcagcttgcttgtaatctttttagcttcaacttgcatgcaacattgttcaagtcacgaggcggaggcggaggcggcgacgggcacgcggcggttgtggcggccgtgctccgagatggggtcggcacgaggcggaggtggcggcgccggaagaaggagagggagaaggtgagtcgggaaggaggagaggatgacgacgcgagagggaggcagaggtggcggcgcgagacggcggcggcggcgcgaggcggaagagggagaggaagagggggaggcggtggcggcgcgagacggcggcggcggcgcgaggcggcagagggagagggagagggagagggggaggcgcaggcggcggcgcgaggaaatggggacggcgcaagggggaggcggaggtgacggctcgaggggtgccggcggcggcggcgccggagagggagagggagagggtgcgggcggcaacggagggtttggggagttaggtagtgggcattattttgcgaaaaagcccctattattttcactttttacatataggttcctatccgcgatttctcctctccaaatacgttactgagagacctatacggaattacgaacaaatatgagagtttctttgcaaaatccgacgtggcgtgctccccggccgcccagcccgccacacttaaaggtttcttttagtgttgattaaattacttttagagtacttttagatttaattaaattacttcctatacattcataattttagatttaattaaattacttcctatacattcataatgctagaggtgactacctattattgttttagtcaattccatagtttgtgctaattaatttagtttatagatagagttatgtttttatccctacaatggaattacccctaatgttatgacaaagttactttcgttttgtctaaagttacttctataatatatgtaaattacatttagactttattgaatttacttttgtatgtctaagaagtaatttagtgatatccaaaagtgaaggaggatcggatgtgaaggaggaatcgagatagagattgtcccggaaacagagtgaagatcggctgaagtccgaatcggctacgactaagatcggcagagttcgagtcggacggggttagccgattgagccgaatccgacaatatgacacagcatatgttgtcggtttaggttgacgtgcttcatgatgatttccacgcatggatagagtcctgagaagtcaattgtatctattacttaggatattttatgtaatttccttagagatatgtttgggcaaaagtctactgcaaagacttatggtatcttagagtttgttagagataagagtcgtgtccgatatgaacatattttgtaattctcgggtataaatagaccaaagccccatgtaatcaaactaacacacgttcaatacaatctcggcgcatcgccacccttttattttcgttttgtttcgacgagttcttacttttaggttgagctgcatcggtttcgatcttcaacaagaggtaaaacttgttatggtggcttgcgttctcgagattagtgcttccatcttcatgatactctaatcttgtttatgtaattcgacgagttatcatatatcttatataatctccggcaatatcgctatctaacctacaatcggctaacaattgttactagaaggcagccgattaggttaaataccgatgttgacttagattatataggatatctaccactctatgacatatccgacgacttgattgtctagatattgtccttcttttcatacttatagcttcatcagttgagtttgatcttatgagttgtgattagaatcttaatctctagcctgtctttggttgctgattagggtagtattggggtttcagccgatcttatctgatttaactacatttatcctacatgcttctttgacatgttaaatttgccctttatgttaagatctcgttgcatttaagtatattaggctttttgtttgatatattctactcgctttaatatcctaatatagagtagtatcggagtattagccgatacatgctagatctatctgatcggctatgctatgaacacatataatctcattattagtatatatttcgatctaagtgatttatactgtctcggcatgacgaccgatctatcccaatcacttgatttaagtatatatcgatctaaggattatatattgttaatatctgcagccaatcgagtagatttagttctttttatttcttaatgactgccgatcgatgcaaatatgacgtcggctcaaggataaatgatatgtcatcggcacttagccgatcggctatcgtttatggatttaaccgcggttttctttgtcttagtttcctgttgattgcatgatcaaatcaactggcacgctcacacacccaaaggcaagttttggacctgcactggagttaagcagatcacccaggcctcgtgtttttacatcaacacgcttttggcacgcctagtgggaccgattagaagtcagaaccgcaacagcattctctcatggctgagaaaccaccagcatcgccatcttcggctggcaaagagacccctaccaagaatctaaagtctggtgcatttgaggttcacgaaggaaacattgcccccgtcactatagacaagctaacacctgagtagaagaatgagctcaatctgatgatgcagcaaacacaacaccaattcttgaattcattcatggagacccgtaaaggaacaattgttcagaggtacaagatgaaattagttgctgatgttcctaggacaaattcttccaaggatggagaagtacaacaggtctcagatggtacaactcaatcaggcgataaaggcgctgcagatggctcaggtgacaaaggtggtggttctcaaggggctcaaggtgatggttctcagggatttcatggtgagaatcttaaccaagatggcaacacgacacagctacagtttaacaacttccaatatcggattgactatgccctacaacatgctttgattaatcaatctggaatgttagtcaacactttgtcaaacatggtgaagtcgatggttgatggctcaatagctgaataccaggctacaggaccggtttatttgccaggaggtgttttcccaaactattggcccttgatcactaataatcagccagctgttcagccaattcctcccaatgcaccatcggctcaaccgacagcaccagtatcggctcctgcaccagctacgccatcatcgacaccaggtcaattaattaatcctcgattgttggtaagagagcagccatagcatagtggacaaaatgtgaatcggctaactcaagaccaagttgcagctatgtttttaccacctcagcctactgttgacctagtccagcaacagccgattcagcagacgccaccaaggcagcaggttgtgcagccgattcagcagacgccaccaaggcagcaggttgtgcagccgattcagcagcaaggtttgctaaatgcatcggccgggttcagaacacccgacaatcagccaaggcagcacgctgcaaatcaagttgtcccagagcatttagttcataatgtgcatccagatcaaacggtgatacctcaagtgattcccgaacatttggtgtgcaatatacagccaaacttccagaattatcaagggggcaatttgaattatcaatatcagcctccatcaccgcaagttcagtatcaataaggagg

SEQ ID NO: 10058 - DNA, 6269 bp, Oryza sativa
tttttcttccccatacccttctcctttgtcttgctacgttttcttttcttcccaaactcattgcttatgtccttgaccatattgtggacctcatctgcggacaaatctttgggagcaggctgaagttctctcttaccattaaaaattttcttctttcttctaaatgtgtgacgtagcgggagccacctccggtgacccatgtataccatctttcgtgatttcttcagccaccggcttcgtgtatgttccttgcaatcggagcatgccttctttccttttatagtttgtccggaaagattaccgagtgcaaggtagttattaatggtgcaaaacaatagaactcttagcttgaagttctcctgaccatatgcatcccaagtttccacaccttctttccaaagaatctccagatcgtcgatatcattgccgggttgccttggaccttggattaacaagcacaacataatatatttccgtttaaagcataaccatggtgggaggttatagttcgcaataagaactggccaagtgctgtgagtactactcatgtcaccgaaaggattcatgccatccgtacaaagacatatcctcatgtttctagggtcagcagcaaagtctttgtgttttcgatctatattcctccattcaatcgaatccgctgggtgtctaagcataccatcattccttctttccgtggcgtgccaacgtactaacttcgcttcgttcgggttggcaaagattctcttgaaacgatcaatgataggtagataccacacaacctttgccggaccacccctctttgacttatttccttcgtcagcacttttctttcgcttgtatcgagaagccttgcagataggacaagcatccaagtccgcatattgcttgtggtacaatatgcagtcgttgggacaagcgtgaattctacggacctgctttgcttcgtatgtcgtctcgggcaatgtgttctcaacaggaagcatagccttcaaaattcctaaaagatctgtgaaactcttgtctgtccatccactacttaccttcagcttcattaggtccaaggtaactgacaacttagtgtgttttgctttgcatccagcgtacaaaggcgtctcggaatcacttaccaacctgctgaatttcattccatctctctcattctgggctgggtcctcaacgtcacgtaacatgtcttgcagcagatcgtgatccacatcaaccatttcaccgcccaatggagaaggtataaacatttcatgctcattttcatcttcctgattatgcgcaccacttctgtctgctgctgctccacttcctgattcttgctctccatacttcacccaacatgtatagccctccatgaattctcgttgtatcagatgaccgtgtacgtcctctccgctatcaaacatattctcgttcttgcaatctgcacatggacaacacatataatcactgtttcttcttatccgatcctcctccgcggcgttcataaattttattacgccatttcggtactccgtagaatgacgtttcaaatttttggcatacatccaacttcgatcaattgctacaaaataaaaaaaacaaattagaggcacatattataagatcagtattgcaaaagtaagacgtgatgaaattgctcaattaatgatttatattactcacttgattgatccattttgatcacttttgggaatttaatttctgttttccttggaaaaaggacaaaaaatgcccccaacagcctcccaccaaaatagtgaacagtgggatacagttacactaggtggtggggggtatttatactgtgcaacaaatatctgtaacggccctaaaacaatcaaccgtgacgggcatacaagtaatctctatcgggccttaataaaaggccatcaaaaaatagtgtcatctgtgacaggcaataaacttatctcaattgggcctctagttggagcccatcacagatgaccctcatctgtgacgggcttcttttagggcccgattgagatatggaaccctcatctcaatcgggcatcaactataacccgtcacagataagtgtcatccgtgacgggctttagttttatgccgatatactatggctgtgcgaccatatctcaatcgagcgaaacttcggcccgattgagattacttccttgtgacggcccgcaaattccagtcttgttatgggccgtcacagatggaaggatctgtactagtgtcccatgcatgacggtgatggtggtgtagatgtgtgtgggcatcgacaacggtccacggcctcgttggtccgtgcgccggtgttggtgacgtcatcttcatatagactcttcccgccctgccatttagcctcgtcggtggaggtaaagatggtgctcgtagtggggactagcatggcattggctggggtgagaataagatgacggtgtcggtagtggtgctgagctcgagtatgttcatggtggccatgaagaggtcatcagcgaaagcacaaatgacatcggtggtcacaaagaagtcatcttgatattgctaggagtaacagagacaccagtggagattccaagcttgtggtcacttgcggttggggtagaatcacccatctagcctagatggcactggtcgaccattatcatggtacatgagtcagcctactgatcgctgcagcacgcacttagtattgagtggttttatgggatgttaggggcatagcctagcctgggaacgatgagatgcgttccaggagctgggtggccctcttgtatatgcgccgacaatcggggctgaactcaaatgatgttgagccgtctccgatcgtagtgacttgactcgggagtgcgccgatggcggccatgaagaagccgtcatgtgtatgggcgctgcggagtgatagaggcaccggtggggatgccgagttcgtgatcactagacggtgaggtgaggattcatgtgaggatgacactggtggcagcagcgagtcggaggacttcgccggcagcagacgaacggtggcggggcatacatatatataactgtttcgttcatcgaacggatgaggttggcgagcgtgacgccatcgtcgttggcgtgaggatgactccggtagtgacgatggacgtgaggtcatcattagccggcggatactccaagcacgttggtgataacagtcggcggatccaaacttgcacgttggcgacgaatgcgcgattggcaccggcaacggtaacaaggccgagcttgtcatcggcagagaaacgaccggcgccaggacgatgaccagggacaggttcgccattggtggcagccaggagtatagacgccgatggttgatgaccacaccgacggcagctccaagcttgagagacggtcggcaggggagaaacggtcggcgccggcaacgatgaccaggatcaggttcgccatcggtggcagccgcgaggataaacgatgatgattgatgatgacaccagcgccgactccaagcttgcgcccgttgtcggtgaaggcacggttggcgccggcgacgatgacggggtcaagctcatcatcagtgtcagccatgaagcgaacacaggaggtcgacgatgcgcgagcacatcaccggtggtgacggcaggagtgaagacgccttgaccgtgcgggccggtgtgatgaccgacggcagcgatgccatgatatctcccaacagaccaccgaacctcgtcatcaccgatgatccgccacccttgcgtgtatgctagctgaaatggagaagacaagagacaaagaaacaaatagcattacacatggcaggtagcagcatcaccgccatgtgctgccgatcacgacgttccacctcttcttctctgtatgtgtgtctgctctcggcggcgatatggcggcacaacttgtgctgcgtgtgtgtcagtctctcttctcgtatgcctctgcgtttctgtcttctcccctcctccttagcacgcctcctcgccggacgccgagatactgcggccaacgtcaccggccgccgagcacacgcgttcccgccggacgccgagatactccggccgaaatggcgtgtgcctctctctctctctctctctctctgtgccttttcgtgtgtgtgttctgtctctgtgtgttgtgtccctgtgtttctcctgtccccctgtaaaatgaaatggacaatcttttataggggtgataagtcggttcacaggctagctcatacatggattagtatctgctcaaccagccagccgcttccatctataagccaaatttccatttagcaaatatcatgattatgataattccattgtattgtgatatgattattgaagcttccattctatggtgatacggagagtagtatttccatgtgaaatctcaggtgcttgctgctattatctgtttcgtttccaatctgacgtgatatggatcaattttccttgtatacttatacgctcacgcactgctcatagaaagaaactttcatatagagctatcttgcccttttgatttccttggtttccatgcaagcatgtacgtggtttccatgcatatgatgtgagagattaacggccggcaaatcatgtgattaacttcctctaatgacagtgatacagtggcatatgcttccattcccatgaaaacattcacacctttttccttccatcagccaaccatgaaattggatcgatcaccctatatcaaaatgtcgcgagtacgtatatactagagcagccgacggcaagtgtctcacaatattcatacgtatacgccatgtacgccaggttgtgttattagtgataattaatcaccaatttcgttattatatcgccgttcccgaaattaatactttgacacacttcatttctttcatttataaaaaaaatgtacaaaatatcgtcgaacataaagacagaaaaatagcagttaaatctataaatgatagccgatcggccagttgccgatgacatatcatctatctttgagccaatgttgtatttgagtcgatcgcaaatataaataaacaagaacgaactaaatctattcgatcagctgtggttattaatgaaatataatcctaatatcgatatatacttaaatcaaatgattgggatagatcggtcgccatgccgagacaatataaatcacttagatcgaaatatatattaacaagaagattataagcattcatagcgtagtcgattagatagatctagcatgtatcggctaatacttcgatacaactctatattgagatactaagacaagcagaatataccaaacaagaagcttaatatacctaaatgcagtaatatcttaacataaagggcagatatagcatatcaattaagcacataaaatatgaagctaaatcaggtaagatcggttgaaaccccgacactaccctaatcggcaaccaaaagcaggctagagattatgattctaatcacgacttataagatcaaactcaactgatacagctataagtatgaaaagaacaataaaaatctagacaatcaagccgttggttgtttcataggatggtagataccctatataatctaagttaacattgatatttaacctaatcggctgccttccaacgatagatgttagccgatttgaaggttagataacgatattgtcagagattatatagagcatatgataactcgacgaattacataaacaagattagagtatcataaagatggaagcactaatcctgagaacgcaagccaccataacaagttttacctctggttgaagatcgaaaccaatgcagctcaacccgaaagcaaaaactcgtcgaaagtaaacgaaaagtaaagggtagcgatgcgccgagattgttattgaacgtgtgttatttgattacatgggttcgggtcatatttatacccaagatacaaaatatgtccttgtcggacatgactcttatctctaacaaactctaagataccataagtctttgcggcagacttttgcctaaacttatctctaaggaaattacataaaatatcctaattaatagatacaattgcctcctcaggactcaatccgtgcatggcaatccatatgaagcacattaactcaatccgacaacgtgaaccaagtcatattgctggaataggcttaatcggctaatccttgttcgactcgaactctgctgatcctgattgcagccgattcagactttagccgatcctcgctctgtttccgtaacgatctccatcctggattctgcttcggttttatcttcatctccgata

SEQ ID NO: 10059 - DNA, 18489 bp, Oryza sativa
  unsure (1)..(18489): unsure at all n locations
ggccaaggaataaaataggatttcaaggaagtgaaaactaaaggagtttatttgtggattttgaactttagacaagaaattcaaaggatatggatctaaagaaagagattggtggactttttaaaatttggaaaagaaattataaagggatttctaagataggaaacctaagggaattttgaattgagagttttaaataaatttcaaaggagataaaatttaaaagagaaatgtttgaggtcttttgaactttataaaaagaatttaaatataaagtttttaaaacaaaaggggtttgaaatcaagatatttaattttgagttatagattttaaaaaggataaaaataaagatgctccaattttaaaagaattcaataaggatcaaaatgctccaattttatagaactcaataagatccaaatataaaacttgacgcaaatattttctttaatatttaaaaattaaaataatcaaatgggaaggaaaggcaataatttaatttctaactttggataaatttgtgatggtggcaaaataaatggaagggaagcaaataggactttagccccaatatatgtggtatggattctcggtgatttattggtgggctaaatgaaattggattttgtacggaagggattagaaataggtttcttagcacaagagcaatcattctggaaatattattctagtgccagaaagaatcaaacctaaactggcggtttgatttatagatagaagattttggatagtagaacatctaaaggagtttgtggaaggtgttgtatgaaagagaacaaggatttctaaggataggtctaggtcaagggttatatccagaataaattcccgcaaaaaggaaattataccggtttagccccaaagataaaaatggttaatgggatataacagagagtcgggtcaatcggggaaatattggcccaagctaaatagtagactttggaatcttgaatggataatttggaggaacaggatttcaaaggggaaatatttgtgggagtatataactggattcaaagaaaatataatttagagccaaagctagagattaaataaaataaatggaaaggttttataaaatttgggaaaaaacaaaatagagaataaaataaagattttaaagaagagaacttttaacttagcaaacaaaatctagatccaggttaaagaaaaaggaaaaagtaagattactccaacggaagaatcgagaagaacatgacttaaaatattccgcaaaaatttttccctgaaatttgagtccgttacacttttgtaccaagttctccacttttttgcagacaattgtcaagctctaaaggttgttgaccacttggctagattaggcttggtttgtctaaatgggattctattggtttcggtgttgatgcaatgagtagggttaatattgcccatcagaccaagaaagaaatgtgatggctcttgcaacatggggatcataatctggtttctaaggtactgaaaatagaaaaattgaggaagaagccctaagtatgaagaaatagaataggatgaagtatgaattacagaagattgatgagaagcaatggatttacctcagggacatcagaagtggtcgccatcgatcttgagcggagaggtttgccgtcagaaatttgcgtcgccaagtgttgatgtgaaaacacggcggcctgggagatctgcttaactccagtgcaggtccaaggctagactcgagtgtgtcaagggcgtgccagctggtttgatcctgcaatcagcaagagagataaaagcagaattagtcagacaatagccgatcagccggaaggttgatagtgtatcgttcgtggtctcagccgatggagttagaccaaatcggctatgtactgagtatatcaaagaatattaaactctaaacatgcctaatcggttgtcataccgtctatcaagtttaataaattggtttaagacaatattgtgaaagtagccgatgcgacaatatttagagcaagaaagataatgtactagctaatactctagtatgaacctatataaacagattgatatatataaacatatcaaatagaaatcaggcatgaaggtgcaagaaatctagccgatactgactaaagcttgacatgcatatataaaacgaagtatctatataagtggtgaatatacatgaaacaagtagtaaaacatgtatattaggtaagatcagctgaaaccccgatacttagggatgcaagtggggcgggcaagtgtgcttttttgtcccgcttatcccacttctaatttattttttcttctaaattttgtactaccatgcaaaaaatagactagcaagcgggtttttatgcgggtagtgggactacccacttgcatccctaccgatactatccttattatgtctagttgttggcttgtttgcatggttctaggctcgtttgcatggttctaagcacgactagacaatcaagcagttaaacacttttcaggatggtagatacattagctaatctaatctagcaagacaatttagccgaaaccagcataaaccctaaagcaagcagcggccgataaagctaaattgagaagctaagaatagtttaactaatacatatgatagcaatgactcgcgatatcgagcctaacacgtctaaagcaacatgttagccctgatagcgcgggccattgagacgaattagctcttgtgaagaaatcaccaaaaagaggaaaagtaaaaagggtggcgatgcgccgaagttgtattggattggctcccgtattacaatgctatggggttcatatttataccccgagtacaaactagtccattatggacacaactcgaacctttctaaagataagatacaaacaagaccataaatagtggtctcttgccaaatctctaacaaatcgactcaaactaacctaattaatagatacaattactttatccgagctctatctctaattggcaatgacggttatcctaatctaggcccatgctgagcccaaggcataccatatcagtcttctcaacttgttcaatcttcggccactgtttccagccaatgtggtatgcagcgatgcgtagtccaattctgagtccaacttggttcaacaccaaatccgcttcgatcttcttctttcttctccgaatctaatgcccgcaagttccgttgttaacaccaagaaatcaccgaagagcttgaatcgttggagaaatcaataagggctaacaaagttgttgaagcagtggcggaaaaggtgatggagtgaagttttcgagggggttcttgctatttatgagctaacggttgaaatggaaagccctaggattttgcgggattgaaagagatagtttcgccgcgtcatataacacagcggaattggggggcaagtgttaacaacaaaatttgacaagatagattcagattgggagttggatatcaaagcggatttgaaagaaattggatcttgccaaaacagattgtacatcggctgacagcatatcggctagaaatagagtcgaagtttgattgagccgatatggaaagcagccgatatagttcgacttgggcacgattgagattactgtcattgccatatagagatagagctaatttaagacaattgtattcattaattaggatactaatgtcgttttgagttagaggtatggtaagagtccaccatgtagacttgtttgtttttatctttaggaaagtttgagttgtgtccataatgcttgaattttgtactctaggtataaatataaaccttagatcattgtaaaaagggacgacaatccaatcaatataactttcggtgcatcaccaccatttacttttactttttcgacgagttcttacttcgagtcgggcatcgacagcgatctctcaacaagaagtaaattgtctcgatggcttgcactatcgggcctattatgtagctttagatgcattggtctttttattgtcggataaggccttgttggatcctgtagagacaaaagaccatgtaagatctgccgtgtaagagttttcgccgtgcgtattaaccaagccatgtgatcagaaattgagttttccaacttcacggctgggggctaggatcagtgcttgttcaaccaaggcaggtcaagggtccaagagccttctcctccgagaacgattctctgacgacaaggctgggggctagggagagtgtatgactcaacaaactgactgatcgaagtcggtaagagagaagacgctcatatacaaaacattggacccaccacataccatgtcttatacggaaactgacttcagatatggagggagttccggataaggaaagacaactagagttctacatggaaacgacaaggactactcggattgtatccatattggtttccctagttctacttggacaaggggacacctatgtgtataaatacaaggccccctaggaggagaggggagataatcaacacccaccacaatctacagaacaacagaagccacaacatataagccaacatatgccaagacaagacgtcggatattgacttcagggataagcacggctagtctcctacggtgtctccggatactgtcaggagagacgaaagcgctatccctgatctcgttgggcacggattcgaggaggaagactaccctattgtcgactacgagtcagatcttcagaccgccatgtcgacaacagttagataggctaccccaaatattgtactggtgtgattatgatgaataagagcaacaaccggcttcggccaacaggatgtagggttattacctgacaattcaggggcccgatcctgtataaaaatcctcgtccccatctcttttgcctcaatctcgcatatatcctagtaccaacgatccccatactatgcaaataccggaatcgtgacatcaaacgtcgacaacttgattgtttagactttaggtttctctacatactttgagttgcgtcaaccctagtcttgtctagaaccctaaaaactaacctggaattatacataactagtaacagcattggagtttcagccgatattacctaatatacatgatagtgcatgtctcataatctattttgtgtatatttgccacttatatagatagatcactctaagtaaatatatcaagtttgattgatctcgactaatccatcatatatggtgatcgattattacttgatatatttatctagattaatttgtttatataagtttgtattggagtaatagccaatacattatctattcttgctctaaatattagattatcggctatttctataatattgtctaaaagtgattgataaaaacaaaagagatagtattgcaatcgataggacatatttagggttttgttttacttatctatcataaagccgcaaccgatttggtttatctgtatcggctgggtcctgacgatacgtcgttggctgtattagccgatcggctatcgttcatctaattacgtttggtgtctttcttgctggttgcaggatcaaaccagctggcacgttcttgtcactcaaggaaagccttggacctgcactggagtgaagcaaatctcctaggctgttgtgtttctcgtcaacacgcttttggcacgcccagtggccggggccacttcaccattcatcattccaccatctttcactgaaatcacagacgacaacatcgtcctcgtcactattgagcacttgtctgatgaacagaaagcagagatgaagaaacttgttcaacagatgcaacatatgtgtcttggttgttacagtatgactcgacaagggaagctgattcaaaagaataaagtcgagttcccaaagcttattgaagaaaagactgataagaagcctgatggtgaacaagatggggatagagaagaatccaaaccaactctgcaagatcacattgactcagccgtgcatcatgcattgatcaaccaatctagtgtgcttgtcaatacattgacgggcatgatcaaatcagtggtagatgggtccattgatgaggagaaaactaaggggccaatatattttccaaatcttgtttttccatcttacaaaactgtaaggactaagttgggaagtggacagcatcaaacgactcctacatcggttccaattgcgccaggagttgatacaattttactcacaaggcaacagccgatatcaggggtgcagacatctaatactttggctctagagtagctgatgcagatgttgaagctaaagcaaccaagtactgaagtacaaccatcagccactcaaccaagctcaagtcagccacctttgattcttcagcagccagctcaacagccaattgggtcatcacagccgatcggcccatagtatgtgaatgtggattgatgaaccctgagttcctctcaacactcaaggctgttgttggcccgatctttcggtgagttgtgataactacgatttgggagaaacgttgacgatccgactacaaccgtacgagacgttatgttgcgccttagcgatcgatacacctctccgtgggttgttgatcttgccggtgcagatcaaccctattcctgcaagcaaatcgaagaaacaagcaagaacaagaataaagcaatctgatattgcaaataggaatttaatacaaatgataagttggggttccgaagaactagcagacggacggtctagccgacacgcgcgctgcaagcaagtagcaatggctaaactttaatctaacaaaacccgagaaaccctgaaggggtaactagctatatatataggggtgggaggacgacctaggggtgcctagggtcgtgctccaccagcttggggcgcaccccacatgggccccacctgggccggggtcccaaatgaagttacaagcccataggcatagcttggggcgcaccccacatgggccccacctgggccggggtcccaaatgaagttacaagcccataggcccattataggtgatgcaacaccttgttcctgtgattctggccacacgagatagaattcagagaagaggctggatccgttagaaagaggactccgagagctttccatcaagtactcacgggccgaaaacggaggtcgtatgcagattcggtggccgtttgaagtcagcagtgtagtaggtggccgaatcggattccagcacttggagtacttgatctcgatatcttcttgttcatccatgatgtgagcaatggttgcatccgtggtagccatggtcacatcatcctccccttcttcacggaaaaccgtcctcggtttttccatatggtgctctttgcatagtccatttacaacaacctgtttcttccaattaaaacaaggcaaactcgagacaatttggttagcaataacatttttctctagcttgcatattttatccacatgtacaggaggttctaaatccgagcagatgtaaactctatgcacaaaatatattccaagatcattatattcaccaaagatgtgaaatataacattggttggatatggcaaatcagacttagcaaataatttctccttgaaattatcgagctcacaaaaatcatcaaactgaacatagcccaaagtatttaaagaagatctcaattcacgctcctctacttcattagcaatgtgaacaacatgcttaaaatcagtgcagtatgaattaacagtaggaatagcatgttcattcacaagttgtggcatggatataagtgaagcattatcgcataactcttctttatcacaaggaacagcaaacaaatcaatttgtgacaaaggaatctcagcagttggttccactaatggttgctctgctatagcatgaaaagtggacaaattcaattcattaacaacacactcacctttattaatttcagcaccattaagtttacctttgatgccctcttcagataatggaggtgcctcgactttgagtgtgatcaatgggactggcggctctttcatgtctctctcctcctttttatgattatgcacttcctgcaaatggttagtaatagaagacaaaaacatagcatgttgcttcttcatgtcctcctctattttactttcagcattgcaagcaagttgtaacaaatgagaaagagatgtatatctttgacaatcaagcatgtcctgaatttctttgttaagcccacataaaaacctcaattctttagcttcttcgcattcatctaaaccacaacgtaataaacaagcttgcatatcatgatagtatgaagtaacagttctggtatcttgttttaaacattgcagtttgttgaacaaaatgtcagcataatacatgggaacataaacatctctgaaatatcgtttcaggtctttccaagattgtggtattttgttatgcctacaaagatgtttccaatcattagaagcatgtttaattaaaacactagaggcacacataaccttttgtttctccgacaagacatgcttttgaaattcactatcaaccgctagctcccaattaatgtaagcacgaggatcatagtctccctcgaaataaggcagtgcagatttgatcttacctagaacatcatcacttacctcataatggtcatgtggatccctcctcatgtctcgacgaagatgtcgatgttgagcgcagctatccccaattatcttgcgtatccctgccattgttagtagaaaacaagaaacatacacaaaaatatgcgcgttcctattaactactaggtagtggcagctcaaaaatcgcacacactcaagcttttaaccaagctcttacaagatcttacctatgcaagtggaatggtgacatacaccgactcaaccaagcaccccaatgaaggttggatgtatcgatgccttggcaaacacttgcggtacagctgtaatcaaatatgtggagctctgggtaggcttaaatatgtagcaaaggaatagcaaatgctcaaatcagataatgcaaagttgaataattgttcaaagtcaagtaccgtgctggtcctaggctagaacgtactagagacgcgagcctagacacaaacgataccacaagatagcactagaaacaactcatgcacaactctgatatatgaagttcagctcaaacataacagtattttctcttttctttctttcttctttcttcttttcttttttttctttccttttcttttctgtttttttttggtgcggctttttttttcttttttttttgcacctttctgcctttttttcactttttttcttgattttttttaacaaaaactgactcaaggaccttaatgtaagattacagggactcaaacataaatataaaatttacagggactcaaatgtaaaagtctaaacccaaaattaaaattatacaaaaaatggaatgctgaatttatgccggttccgtttttccaaacagatctcgaaaccgacaccaaacaaaaattcgccaaggtgtttgacacaactcggaaccgtggaagagagggagggagtcggactcggccaaaggggcgagtgggactcggccaggaggtggagtggatggcagccgaatttggtgtatgggataaaaaggaaactgatttttaaccaatccaatctactatatctttccaaaacaatcttgactacttccaaaatcagatatggtaattcaccttcctcctctcgtgcacgacacaggcacggccagaacaaacacacacaaggatcggcaaactctagatgcaactcaagaactccaaaactaaccgacagaaacttctgaaaactacaaaaatagaaccgtggcagcgagccgattccgttttcgtaggtcccgacaacaacagagacatggtggcagcgacgactgtggtacaaaacgtgaccagaactcgaaactctaaacgaactagacgctaagaccagcaacacgacgtgacgatgcaacacaaaattcaacaaagcaaaaactgaaaagaacaatgcaatggcacaatatggctaggtaaatgatacgaatttttttgtatggctattttctggttataggaagataaaaactcaccgagcaacaaaagctctgataccacctgatgaaccctgagttcctctcaacactcaaggctgttgttggctcgatctttcggtgagttgtgataactacgatttgggagaaacgttgacgatccgactacaaccgtacgagacgttatgttgcgccttagcgatcgatacacctctccgtgggttgttgatcttgccggtgcagatcaaccctattcctgcaagcaaatcgaagaaacaagcaagaacaagaataaagcaatctgatattgcaaataggaatttaatacaaatgataagttggggttccgaagaacaagcagacggacggtctagccgacacgcgcgctgcaagcaagtagcaatggctaaactttaatctaacaaaacccgagaaaccctgaaggggtaactagctatatataggggtgggaggacgacctaggggtgcctagggtcgtgctccaccagcttggggcgcaccccacatgggccccacctgggccggggtcccaaatgaagttacaagcccataggcccattataggtgatgcaacaccttgttcctgtgattctggccacacgagatagaattcagagaagaggctggatccgttagaaagaggactccgagagctttccatcaagtactcacgggccgaaaacggaggtcgtatgcagattcggtggccgtttgaagtcagcagtgtagtaggtggccgaatcggattccagcacttggagtacttgatctcgatatcttcttgttcatccatgatgtgagcaatggttgcatccgtggtagccatggtcacatcatggatccacaaggctataaatataaacctcaacagccaaatatgggattcaatttcaataatcactatcaacctttttcaccaatgaagcatcggccagaaggatctccttttgttcagttttcacctcaacctatgtataaccagtttgaacagcaattaatataaatgaggtgtgcaacagtagccattggccgatatgattgctgatgtgatgagagaacattttggccttaggcctaaggatagtgggatcatatatcggcatccctatccagaatactttgatagagtacctttgccaaaccgatacaagattcctgattgctccaaattcttagggctagacaatgtttcaacttatgagcatattagccgatttttagcacaatgtgatgaagcatcagctgtggagggcttgagagttaggtttttccccttgtcgttatctgggtcgacttttacttagttttcttctttcccatacaattctatcagaagttgggccgatctagaaaagcagtttgacaagtatttgtttagtggggttcaagagatgaagttgtcggatttgactgcaactcagcaaaaagttaatgaatcggtgccagattatattcagagatacaggaaataggtgctatagcttgaacttaatcgattcacaaatcacaactagctgatttggcttttcagggatcaatagttgcgtaagctgatcttgagttgactgttaagatgcctgccccctgcattggttgttgctaactctacataaatgtggaaggagccaaagaagagggaatagaagcaatcagttgcctatggccagccaactcagtcttgatggttctgtaaggtgggaaaatattatttagaaaatatgtatgccccttaactttctcctcaactattgatcatatctgataatgtattgaccaaaacaccagattggttgatcaaagcatgatgaactgcataatcactggttccttcttcaatcttcgacttcgacattgttacttttcccttttgtataattgttccttgtcaagtcatgctgaaggatcccaagtacatcttctgaaattgttgaataatttgttccatctctaccctctgctcatcggacagcttgttgggtgtaactgggattaaattctattatgtaataatcaggaatcatatgaatggcttgatgtcctattgggtgtgccaaaagtgtgttgatgagaaaacacggcggcctgggagttcagcttagctccagtgcaggtccaaatctcgctttcgggttcagggcgttctagacgaaaaatccgcgctcagccgatggtgccgggactgtgttggcatgcactaagtcgacgaacacaacgacctgggagatcttcttagccccagtacaggtccaaaatattgatgagatgcgggtgtgccaatcagtttgaccctgtaactgacaagatagacaaatatgttgatcaccagagagccgatcggttgacaagccgatggagtaattccagctgatgccgatactagtcgatactccctccattccataatataaggcacaaccactttttttaatgttccataatataaggcatgcatgtatgtaggcaattaactatggcctattctccattaaattattacttttttaaatcctccactctcatgttctctaattctattggatgcatgcattgtatttattaggatgatccaaactacaagatgataataattatttcttggtcattgagttaggggtggttatgccttatattttggaatggagggagtaggtttttaaacaatcggctatatgtccaatgtagataatgatataaagaaaatcagttgatgataataaaataataatataatacagtagaatccaatcggctaacaatgatatgatagaataagtgatcccatggttaaataatacatcagctgatggtatgatgtcattaaatccaaatgattagataaacaatgaaacctttgttgcgatcggctaaatccaacttatatgtaatccttataagccgatgcaataactcatcggctgaaaccccaatgaaacccttattttcaatcaaaagcaggttagtattttatggttctaagcacgactaaagtcgatacaactcgaagtatgcaaagaaacataaagtctaaacaataaagcctttgactattttttaagagtggtggataccttagctaatctaatctagcaaaacaatttagccgataccggcaaaaaccctacagcagatcccaaccgatataagtaaatcgagctactaaactagattaactaagatatatgataggtagttaggcaaatatatcaaccgaaccagagcgatccaagaggtcgaagccttgaacaacactaatgtagccgatacaattgccagggccgacggaacgtaggacttaccccttcatcgaagatcgaaaggtgatgcagccacgcgttaggtgccaagttccgccggtgataagtaaaaacctctaaaaagagggtggcaatgtgctgagagtagttgtattgatctatatgatagtttaaaatgaccccaagtgtacatatttatacccatgggtagttactagtccttattggacaagaaagaaactttcctaaagataaaaggaaaacataaagtctttgtcgaacactaaatcgcctattaggtatgggataatcaatcatgttccattggctatagatgcaatcaaacaagtaatccctaatctgatgtttctctgagatgtaagcaaacggtatagatcaaacttaaccgagacagtgtggatagctcttaaatcagatcaaatagattggagattacatgtgtttatattatagtcgatgacacaatacttaggttaaaaagatatcgtattataaatatattaagagcaagcttgtccaagatataaggactagcttgctcttaatatacttaggttacatgtgtttcaataaagacaatttagccgatgctggcaaaacccaagaaaaggcttggtcgatataggtaaattgaataattaggttagattagccaagatatataatagtcaataattgtataggatagattagaacatctacaatgacatcctaatctgctgatacaaaaccgatgcgacaagccatacctcttgttagaagatcaaaattgatgccctaactcgaagcaagaactcgtcgagaaagttgaaaaaagtaaaaaggacggcgatacgccaagattattattgaactgttgttattttcctacgagatcctgggcatatatttatacccatagaagttaacttgtccatatcaaacatgccacaaactttaaaaaacatactagccccttgtggactctaacatatatttctaaaatacataaggaaaactgaactcttattctaattaatagatacagtttccatctcaggaccttttccttgtttggcaatatctctgaagcctcaactccaattcgatacgaactcaaaatctaactttatcggctgaccgagtccgactttgtatcgaccgatacgatctccagccgatgcgctgctctgttttgggaaccacttcggatctatctttatcctcgcgtatctcaccaaattttgctgttaacaggagctcagnnnnnnnnnnnnnnnnnnnnnnnnnnnnnnnnnnnnnnnnnnnnnnnnnnnnnnnnnnnnnnnnnnnnnnnnnnnnnnnnnnnnnnnnnnnnnnnnnnncaaggtggctcttgttggttcacacaggattccacgtttcccatgtactcggggttagagcgtaagctagtgatgctttcggctactggattttatccatccttgggacaaaaatttactaaacttggcaaaaaaaaaagatccaaaataacatattattaactagcacagaagtttcccatctcaaactttggaagttttacaatctgatatttcagaatttttggccaaagatttggaagttttcgtcctaagggtatttcggtcattaggaaaaaattatacattgctaacttgaccgcaatggtatattatagaagttaagtgaaatgcgatggtataccgtagaacttgacgaacctaatgacatattctaaaataggcacaaaatcagtggcacacaatggattctctctatttttttatgcttgttcacttaatactatggtacggcatttttagaaaaagtcaaatattatactatataagtcaaacattaaattatatacacttataatataattttcaaattatacaattcactattcacattttataggagaaatatagaataatgatttattgtctattgatttatgagaaaaatattagccaaaattaacatatacctaaaaaataaaaattaatatgaaagaatgagggaaaataataaaaaataagacatagtcatgatatatagtgcagtgagaaaaggagaccacaatcgaatgctttatcattgagcaaaattgagggtattatttttttttatctttttatagtagaagtctgtattgtcatgttttaacatatcatgagattattagtaatagttaagtagaccaacccaacaataccgcatagaaacgataaaactgtaatggcttagcatagcacgagactaccgactaatggacaaaaaatagtaaattcattttgtacaacatatttttaaaaattttcatactatatcattctttaatcattattttcatttacacaacggctaactttacatttttgtttcaatttagacaaccccattctatccatcttcaagtccagtgatttccaccattgcttcacctccaaatccagtgactctacaaccactccatacacacactctctcccctttttctttttccctctgatagctgggaactgccagatcatacgaggaggagcccagatctagcgtcttcgctctcggtcaggtcagctcctgtcatcccgagtccttgcaaggccgataccctcggcctcaacgatgaccatgacaatagcgtgcatgaagacacgagacgcggaaagacaaaacggtgattagagggtgcagttgcacatgcgaagatgaagaggaggaatgatggtggctcgtgaagaaagagcggtggttggcagtgcatggagcggtactgacataaatcctcaaccaaatttgttgtgttttttctctgtgaaccatcagtcattataaacaaaatgggtaacattactaaattcgacataaaggtgaggcactcgagtatcttcccccttcccttcgcgtgaaagagaaatcccccgactcgtctcctccgctccttgcgcggttgcgccatctcgtggctgaacagggaggggagctgatctccatctggcgagcagaggaggggatcctggtgagcatcctcatcctctttttgatgattcatctctctcccaccgggagtacttctgtctggaatttgcttgcgttaaccctagcttctcttgtagatctgaaagaagctcttcttcttaatttcagagccttaaccttaatacaagtaacagtttgtttgttcccaaaaagtttgggggttcaactgaaccctcatgtcccaagttggatccgcccgtgtcacctatcatgaatttgaagagcacaacacataaaaatatgctgctaggaagcaagatgaacatattgttctaaaaaaagttggtcctaggcaccaggtagctctcccaatttggcattatccattggggctcttgtgctgctatttagtgttatattgtccaatatatgtgtcatatacttgccaattgtttggaattcattagtcatgttggaccaaggcggtggctaagtgcccctaggcggctcttaccctgtcaaccctctagtgcctcttgaaccatggatggacagcaattgtgcttttgcaccaatgtacccaacacatttttttttcaaattaccttgagacttcttagtcctggatgcttttacacaatgctcaatgcgaagttcagtaactatagggtacatgcatagtaatggaatgtcataacaagttcaatagaaacatagaacagccaaaaatgtaacacatagtataattcgtttgctgttttctttagaacactattggtttgtgttattaacaagtttagattcacattcattgttctgaatataattttggaatccaaagcataataatcatagtaccataccatctaattagagcaactgtgacatgttgctgtgatgtgtgcttagtaccaggaaattgggaatcattataggtaggttatgattttgagtgattaaaaggggagtttttgttagtctgagttctagcagcatagtgaacgacctggtatgttagctgcatgttagcattcctcttggtattatcaatcagcataaaatgcaatatgactagcgagcttcactttgaagctttaggcccttctcttttcttgagctccaaacttcaacttcctagttttcgattagcacgctttcaaactattaaatgatgtgttttttgcaaaaacaatttctatatagaagttgtttaaaaaattcaaataaatctatttttcaagtttataattaatacttaattaatcatgtgctgatgagctttctcgttttgcgtgcgctaaagatctcgagaggaatcgaacacagccttaactacatattgttgaaatgtggatgttgcaatgctttcatcaaggcaatagatgtgacatggcagatcgttgtaaatcagttttactatggcagcagtatttccctgtgtcaatttctagttgcactttagtgtattgctacagtgattgctagctcagcaccacctttgtgttgtataaatactttgggtttattatatcttgttttatttccccaaataggactaattttcatgagatttggtgtgctttctaatgcagactgtttttgtgtgcatgtaggaagctgattttatcatctgaatcaagtttatatatctacaatatctgcacaaatggaattgggggacaaggcagtaggctttattttaaccttgacaagtctatccatctttacatactatactttctgggtcatcatcctggttagtaacttctaggcgtttttcatttcaaatataacatctatgattttatttctggatgataagctgttcctctttttttcaatatagccatttgttgacagtgatcacttcgcccacaagtactttctgcctcaagagtatgctattttgatcccagtgcttgtcggcgtgattgtcctatctttcttaagcgtgttcgtgggtcttgttatgctcaagtcaaagaaaaagaagaagaccacttgattgaatttaaccatatttgttatttgattacgattgcaagctctatacaagaaagcagttttctcatatgattccgttctatgtagtggtttttgcatgtaagtcgtagtttcagctttattattattattattattattattattattattattattattattattattattatttcatttttgctgttgggttgtgaactaaa

SEQ ID NO: 10060 - DNA, 21935 bp, Oryza sativa
ggcatctaaattttggtagagtagagagacaagccaacccttgataacagtataagaataggaaatatcaccaaaacataaaactcagtagtatctaacttcagacagctgctatttcgtcctgaatcaaatatacaaatgtaattcctttgttgtcaaatacatgaagcctgtttcgcgcctgaatactttaccaaaagccaaaaaaaaaaactaccacagatactatggaaatttttattaagcacggattagctaacagaccttaatagttgtcatagatgtcactgcacctccaggtttttgtattgacactatctggtctgaagaatcgagaacaatagtcacagaagtctctattattgattcttcttcagcagttggatccgctagaacattatccttgtgaagtgcacatgtaagggaaaatggaacattagtaatcgtaagcttcctcttttctctgtttaccaattcatatttggctttgccttcattgcccccaacagtaaatactctaccatcatcaccgacagataccaaaggaatttccactgcaaatataacatagtattagtaatgaaaattaactaaagcaccttgagatgttaacatgaagaaaatggaacagaccaagaacttcagatgcacaaactttctataaaatggaaaatgaacaggcatagagcagcgagttttgaccagataatacttccatgtcaaatctaacaggacttgccttgccatctgaagttttttgttgaatttcaagaatcataaatgaccaggaaataatcagtaatatcctgtacataaaaatctctttgtacctacaatgttttcatctttttttttcaccaatgcagggttggttatgataacaggatcacatatagcctcactccacactccgcccagagctcataaggtcaaaacaaaacacaccttccattactctatttaggcaagcttctcacgcacataaaccaccaaacataagaaaaaggtttgtgagacagccacatgaaaccatattaaatgaaagaccacttaacatcttcattcacgacatcgactccaacattacaatctttcaaatgatacaaaacagaatgtggatcaagttaccccaatcttgatgagtcccgtttctcaatgtttactttaggggagaattttccattgaaaattttccccgtcaacaaactttacaaatctaagaagtatggcaagtaatactccctctattttatttagcatataagaaatcatacgagtttgcataagattaaataagtctataaaaccaacagaaaatgccatgatatgataaatgaggaaaaactatacgccatgtaaaatgaaatagacgagggcatatatttatggctattaactagttttatatatacataaaaaacttgcggtcttcctgaagtttcactaggtagaatagaaaaatcaacaatatttacatgttaaactactctattttatatggttctcatctaataatctcaaaatgtgctatgaactgtctcataaaccaatgcgtacaatatttagatgattagcaataaaaaattaaactaactatggatgtttaacactcagtcacatgcaccaaccagttcaaccaaaagcttaagctgatggagaaggatggacaattcacttatcctttaacactcctcgtcaatctaggatccctcctacctcacacttacaaggcttgccagcgttttatttaaacagtgcctgacaagatttgaactcaagacctcttggtagtgatacaaaattgaattgcatgcaccagaaagttcacccaaaagcttaactaatggagaagaataggcaattccatgagtttgtagttatcaaaaagagtatttaatgggggcactaaatctgtaatttgattcatactgactgaataaagcactaactgctagcacatattacaatagcatatttacatttcaaaatgaagagtaattaagtagtgaaaaatgtcaaatcaagataagctatcagaaataaggaacgtacaatgtgtaaatgcagcaacagctgagattagtgcagcgtcgaatagagacccatcagcattcaaacaatagacatcctgtaaagttgagatgtcaagaaaacaacagaagtataaaacacatactttttgcaaacttgtttttggacgggcattgcctgaacttatttttatgccattgtttgttcctttacaagagctgtggttgtataaaacacaaatactttttgcaaacttgtttttggacgagcactgcctgaacttatttttatgccattgtttgttcctttacaagagctgtggttgatgttgtactttacacccacctctattaaagaccttcagctgacagatgtacgtagaaatgttgtgttgcttgcatttttgcaatatcttccattaaaaaagtgtattcttttaaacatgtgtgtgttgtttgcatattgcaatatcttctgcaaaaattgcaattttgcaaatatgtgcgtttaggttgttgattaatctcatctagtggtatatatgattttctgatttcagggtactagttggcatttatcacaatgctcaggtacaataatagtatactggcaaatctcacatcatgcgctcagttctattgcagcaagcaaccgcagataacagatttggtgctgccacatgaactgtattttagggaaacagcagggaaagtccctgttggagtttccgttaaaaaaggggcatatttgttcaatgccataaaaaggaaattggagtaggaaaataacatcaagaaaccaaagcttccaaagaccattaacacagaaaattcttgagaataccatccccgtaaacttttttcatccatatctaatgtttccatcctactaggacaaagataaaaataaaagatacaggttatctgacattctcctcatctcttgacgttctgggagctgctatagcgtgattgaggacaagcaccgagcatgcgcgaccacacatgacgtgctccaatgactgaaatagcaacaaatggtgagcatggcatagaacacgacaagaaggttccatttttatggacatatagaagagatcagagaaaaattgacaggagcagcatggaggtgacatggcaagattggcaatacgttctaatgtcatgcggcagttgttgagcaccaaggaaatgcgacaagtggcagtggtgatctaagattcccactttgtccacacccttttacatcatgctacagaactccagtcgctggatccatgtcacagataaaggcagtacgatgttgccagccaccatgcttgaggacctgcccaatgcggaagtcatcgctgtcatggccaagatgctctgggtggacgccaacgccatcatgaaatctgacctcacatttgctcttggtgacagtggcttcacaggatgtggcagctgggagacgctaatggcatcatcctaccacgcaccatggggagaagaggtctgtggccatgcagcatgagaagaataggcacgtctatgtgatatgaattacagagaaaaaagggaagcacatgagaaaggaggaaaaggcataatgtgggcccacctagtagaaatataagaagaaaaaagaaagaatgggtcattaacaattaggggtgggcgttcggtcaggaccgacatttcggtccggttttttcggtctttataaaaaggaaaccgaagttgtctcaagaaacttgtggaccgacagttcggttaactgatacttcggtctcggtcttcagtctgaccgaccaaactgaagtatcctttgtggcactggattgcagacttgcatatagggacgagggcgagaaaaaaaattagtatgagatgctagtcgaagcaggtagtaaatcacaagcatacacacgcaactattgctcttaagcacaaaaacccagatctgacaaaaatggaattcaatcgttcaagaaaatgggattcaatcattcaaagattacgtgttagaaatctgaaaaaaaaaacaatcgaaggatagagagtataggagaaacaatcatcaacgagagagacaatcctctcgacagcaggccacggcgctactgacaatggcgctcaggctgcacacgcacagcaggcaggatatgagcaagacgacgacgatgacctcaccgctaccgcaccgacggagacccctcagcagcagccacagccatcatcttgtgccgtcctgccaccagatctcgcgctgcctctgtggatcagatgaagcgccgccgccaaagacgggagggagcaggcgccaagctgctaaccctagcactggcggcactgccgctctactcccctttcttgttttttttttttttagagatgttgcccaccagctgaacgtatatgtgctacgctaatgggcttgtgggccatatatacgtgagcaagagaaggtattgggccacttcggtcagtccggttacttcggtcggaaaggcctgatgaccgaatacaccgaactaagttcggtctttaaaatcgtacaaccgaactagtgaccgaagaccgtgatttcggttttttcgggttcgggttcggtcttttcgggtctggtcttcggtcctcggtttttatgcccacccctattaacaatcatgggaaaatgcactggtgatggtattctccagcatttgtggggttcgcgaatggtatttggcagcatgtcacattcactatggcattttccaactccaatttctatgcgatggtattgagcagatttgctctaaaagatttagttttatgtacaagcctagaagggaaaagaaaaagggaaaacagggtagcagactaaagcatatcattattcatacattttccaagaaaatattcagcacttttttagagaaatacttaaggataggaagcactaagaaaagagcccaaataagatatttatttagttccgacttatctgggggacaaaattcactaataataagtttgttgtcccagatgaaaagtttgttgttgcaagcaagttacttcgtgtcgatcatccgagccataaaacattggacaacttttacagtggttctattgaaagtagaactgatctagaccttctggcttttttcattaaacggaccatatttgtttatagtactgactcaataccagtggtacaaccaatgggggtataattgtccaatgaagatccttataaagctgtgagttaggttgtttctactggtagtattactggaagtagataaattccagtagagaccactatgaaagtgctctaaacattaatgtccacaatcatgacaaaataactatcatcccttgaggaaggctattgctgactacttgacattaggcaagcagcaagcaattgatgcttggaccaggcttcaaggatgagaagccttgcgcatcttatttaatgtatcacgactagatttcaggtgaagcttttcaatttgacttattggagatgcccagtaagccttacaaagagaaggaaccaataatgaaatcagtgattaccaggtatgctaaccaagatgccttcccactgatcaaacagagctccttcaaatttagcatccctgagctgcacgagaggattaaataaagccacctctgtatatgccatgtatgcaaacggatatagaagtttcacgggcatacagaaaaatagataagtcatatgatcaacaagactgattccacaaaattaaattccccatttctggttttctactaacaagtagaacaagatgaaccagccccactgtacagtatgcaaacgaactgccattttatcatgcccaatcctacatatagatcatattggctagctaaaagcgaatcaacaaaatactcttcaatagttccatttgtgctaatgcagtttcacatgactactttgctgattaaaaaggaaccccatgattaaactctaaagtccaattgctacaatatagcaaatcagcatgatttactgcagaaaataaataaattaaattcactcctgcagacaggcattcatccattcaagcaaaatgcagattatacacatggaaagcacaatgatatgcccattcagtcaaaggacatggtacgtgacgaatggagcaacagcaaggcacgatatacctcatgagaatgtcctctaggttcttggagatgactggcgccacctctgccggccgtcctggtctgacaagcggggaacagataggcggcatgtggaactccacagctgcagaacaccacggcaccacgccacaatagaaacgcagataaattagccaaacgcgcaaagcaaaagcactatgagaagataaatcaacggcaaacataccaatagatccttcgtcgggggcctcaccggagggcgacatcacctcgagcttgatcgacgcgagcatggcctgccgcaaacagatacgggaggcatttcgtcaaataggtggtgcacggacgcctaaatcaggaagagtggcggggagagggaggggtggagagcggcggcttggggggtcgtacggtgtcgccgaggcggacgagggcggagccgtgggcggaggacacggcggcgagggcgacggtggttgggcgggcctcggcggggcggcgcgcgtcggggcggacggattcgcggaggtggcgctcgaggaaggcgagggggaagaggcggcggtacgcctccacctccatctcgccggcgaggccgccggccgccgtggcttgggcctccgccgccatctcacgggtgggtgggaaaggagcttgggactggctttgtcgacaaagggggttttctttttggtttggggtgaacggtcccttgctagggtttaaggctcttccttttttgggcatcagttcgtccggtttgcattggggattttgataattttatgtaactagcaaaatgtcggtgcgttgtaacagtaaagataatatatgcatcgtattatgttatagatatagctttaaaaaaccatgatggttgtattagagggctagaaattcttacattaagaattagactttgttagttagattataacggtgtagattaatcgatatagttgtacatctttatctttacctattataaaagtttaagatgtttttgtcaaaaaaaatttcgtacgttgtccgactctatccacgcgcgcagttatttttcttcccttttctttttaccccgcatacgggtatatcgcggttcattgagatcgacttttttccgtgtgatttccttcccacgcgttggatctattacatgcaggccccaaatcgattgtatcctggcccatgtcccacatcccacgtcatccttcaattccatccttcagatgacgtggtgacctttttttcatctatccatatctctatctccatatctactgttataaaaattagaaatgtttcccctaaaaatttgatgcgtcatctgtgtttgaatcggttttcattttatgttttagttttaatttaatgtttatgtcaaatcctttccttttatcttatgtcaaagtgtccctcttatccgagacgtgcgtgaattaattgggcctgcacttttcacgtgtcccttgccgcacgcaatgccctcacgcccgtgattttctgcatgccagattaggcccgcaacgccctcgcgtgcgcgatttgcctttgccgcatgttcgattgagattgtgtcgccctcgcccgtatctgaagatgtttttgtcaaaactatggtacgtcgtccgtatctgattcccgtcacacgtaacattcattgcaaagtaataactcgtgagtgaactgcgaaagagagttcgtgtgatgtggataccaagcgaatgatactcacagaatccgtgtggatatcacatgtattgttgctcagatcatccaattctatttgtattataagacacgatttctaggatatgttagcatgatttcaagtcagtctccacacatgattgtacgtactaccagggatgtcgttacaataaactgtaataatcaattttactttcgaaaagaacatgccaactgaaataaaggatgatcaaagttgctgatttcgtccgctatcaattcatgcccaacttgagataaagctggacaacaaatcgagctcgtgtttgaaggccttattgtttggcttatgcttattcctataagccaaattttaaattttagaacttatttacacacaaatagtcttttatttgccaataagtgattttggtaagcacatgaatagatgaaacaatgggctgtgattatttttccaccgatacatatgtataaattaaattggctctacccgttgcaacgcacgggcatcttttctagtaaagtataattttatttaaattgtagaatgggatacaattatatttatgtaaacaaccattataccaattcaataatatgttgttccgtatagaaactatgtttcgtatagaaactaaaatttccatatttaaagccagcggataactaaatatgaagccagcaggtttccaaggttgttgatatttcttaatgatattactaaaaatataatttctagcaatgacacccgaaatattactcggtattctttacggttacagatataatctgcaagcgcgcggatacaccgctgtagcattttacccagaagtattttaaggtatcatatttatttaatcctaggaaaagatatgataatagagtactatgctagaaatttatatcactcgtacagatcaaagtctaatgcaggggttcatcaattcaaggatagatagattaacacacagaaggaactaaccagaatactctcactaaaataataatctaaactaagtggagaaagaataataacataatcatttttgtacttatagtatatagtcattttagtctgcacttgccattatacaattatgtagccaatatccccaaactatgccctcctggtatttcgagaaaccacccctaattgctgagtttcttacgacaatctgttatggccattcaactggtaatagatacggaagagtacccacaccaggaaaatctcttagccctatatacgcacatggaggaatactcgtggcatacatcaccatttaatgttatctaataatctaagcaccacgattacattactaaatattactctacatctttgcagatgacatagagaaatcatataaatgaatatcaaaccaataccattgcatatctccagtaagctagctacataattattacgagacaagtatgaactaaagtaggtactcaaataattatataaatgaagtaaaggaccaaaactatacaaagaagaatatttcattactgaattaaatcttacaagagagagaagagttactagagtcatactcaaaatctccagaagacttgaagaactaataaattattctaattctactccacaagcactagacacaaagtaaataaactagagaactcctgcttgatcctccttggtgtgtattgaaatggagagggagagatccttaaatagcctccatatgacggctgtggtggttggaaatgttctaaacaccccgcaaccgtcattggggagcaatctaggacgtccacatggaaggcaaggatcagaggcgccggtggtggttcggccgaaccctggtgtaggatcgagatgtcgactagaggggggtgaataggcgatttaaaattaaatgacacctaatcaaaactaacctaagttgctaggcttggtaagggataagtctaactaagcaactaagttatgttttgcaatcctagggtgaaagtggctcaaataaaagtaaatcacaattcctaagtctagtttagcaatcctagggtgatatgatctcaagtatgtctctaggaatgtaaattgcacaaatgtaaatgcaacaaataaatgagacaaggagacagtagatttttcactgaggttcggaaactcgccggtttcctactccccgttgaggcgagcccaactccaccgctcaaccacaaagccaccgcacgcccccttcgtcaaggggtgggcaaggcgggagccagcccacggagaggactacccaagcctcgatcactcggggtagttcttccttcactccgaaggtggtgaactccaaaccagtcaacaccggcgccagggcctcctccacaatcttcccagagaggtcaccgggaaactcctccacaagttgtctaggaggcggcaacctccaagagtaacaagcaatgacgcggctcggagaagatcaagtgccacactagctctacaatgaagcaatgcacttgactcttggctaaatcaaccctcaaccactacaatggatgaacattaagctcaaatgtgtgtgagagaggtgcaaggggtgtatgcaattgaattgggtgccaagagagaccccttgctgctggtgggggagtatttatactcccacccaccaaaactagccgttgggggcgaaatcccccaactcagtgctctgccggtctgacctgaggtgtatggctggtcagaccgtgctagtctacaacagctagaatacaacttctagttttctagccgttgtaggcctgtcattgggccccattgccctagccggtcagaccgacgttgagtggccggtcagactggcctcggctcggtctgaccgaatacggctccgtcggctctgtatcgtccaaaccagagcaacaccatcccagcctccaggcggccggtctggccgcacaagtgccgccggtcagactggccaatcatgccggtcagaccgccactaggtggccgatcaaaccagcctctgacctgtggtcagaccggccctggtcagggcgaacttagtgaaaaggtgtgtgttgtgaaatgtgagcacaagtctagatgcataatgacctaatgtgacaattaaaatcatctctttgctaggtcattacccctcttaatagtatggcaaagctataaataaacaagcacaattttgatcacccaacacctcgatcaatttaaaatgaaaacactagtttaccgtcttctcttccttttgctttgcgccgtcaattttaatccatcgatagacatccatgcgcacacataatgcgaacctaacttaaaatatatagctcaaaagaacagttagtccacaatttgtgtttatcattaattaccaaaattaacatcgggggcttagatgcttcacctgggttggcccatcttttctcccgtacctcgcttgatggatcctaagctcagtggcatggtggttgggcccaattgcaggtgttctagtgggtttgtgggcccattcatccataagtctgccacccgtcgagctatgattgattgaacgattattttccatcgtttctcctccatttatatgaaaatctcctgtatacaaatactttgacaagtacaagtaaaaatagattatgcttaaaccaatatgcatgcaagcattgctagttctcctttatttccatatgtattgatggtcgaaattggtatataacgaccgtcaacaaaggtccaatttgagagctgggccataggtttgtagcctgttgggctttggctttgaccatgttatgtgtggctgtgtgagcagctaggtgcagcaggctcacgtaaggagaattgactcctccgacgatcaacgcatggccgttcgttccacatggttatggactaggacttacggacacaagtgatcgtaagacgtaccaaagctcaagcacgaaaacagaacgatcgaatcggagacatggcaaagtggtgggttatacacggcatgtgtgaggatgtgaattagactggggcacgaacgacgtacgaaagtaccggtaaaaacatcttcaatttttataaagtaaagataagtccgctttgttttatttaccacctaatccgcgtgcctcccataacacgctatcgggactacgaattgttctatttggtaccactttctctacttttactgtattttcacctttttttattccattttatttatttttcacatgtttctggacttatttgcccttggccccacctgtcagatccagagaggatatcctcctctctttggatcgattgatccatccatccgccccattctttggagaaaacggacaatatgctactctatttgtggggtttcaatgaaatgccacccactaaaaagcaaaggataaaatgtcacttaataggttacctttagaatactttgccactttgagttttgagaccaaaatatccctagttgtttagaaagaggatatccacatatttgttgaagctctcgctgaaaataaagcatttgaaaacggacaatatgctcataatatactgtcgggactgtgaattgttcttatccttttcatcgcgttgaagctctcgctcgtccaaatgtctctgatagtcaagctacccattgttgtttcctctttctagtgtttgagcttcaccttgttctcgggacaagaagcttcgtcgtagccaaccaatgcgacgaacttgatggcaccagagacgtaggcgatggaacgattgtgcatttgcgctcaagaaatggcgaagtttgtgggggacatcacggcagtggggcaacggtacaaacactagcttggggccttccggcgacaagatgttgtcgcaaatctgaacttgtatgacttggttatgtataatatgggtcacattctcatatttggttaagtaatctagatggaattctcaaatttggttattcaacttgtttggcttcatgtatgaatacatattacggatacaagctgccaaaggttttcataggttttctttagttaattgacatatatgttatattatcaagaactaaacattttagttctcatttcaggtagctggcagtattgcaatatcctgtcaaaaattgatcattgcatttagatagttcccatttctttacaggtacatgctatcaaaaagttgcatttgagagcaacactgtacaacatatggttacactatacatgctaccagaaaattgcatacatcagcttgaaagggtatcatgtacacagggcaaatgagcaaaaatgaaatcaagcaattccttctgccaccatcttctcttccaattgattttgggagcaactagaagagagcatgcggcgtcatgctgcgcgaccgataaagtttcatacatagattgaacagccatttaaattttcaaagactgagaagagttgtatacaaaatgtgaacaaattggtgagaggaggttaattatcagtgtgcacagagagggccacatgtagtcgtcggtatacacagcgcgctcctcgaatgacattggctcgccgtggagcttcacccaggttgtgacatcgttcggccgttgtcgagcatgtaggtttcgtgtagtcccctgtggagaggaggagaccatggtgatatgacctgtggtgcatggtccaagcgacatgatgtggcagctcaaaaggttgcggtaagggtgaccatgtctcgccaatgccagccctggcctagtcaaccacctctaagctcggttccgtaagcaagcttgcaaattatgtctttgtggtaaatcttgctatcgagcttgatagcgttgtacttggcgaaccggtgaacactttccctgagctggtgtcagtgatgtcgctctcaacattgttggcgccgttggattttccggtgatgccgatgatcttcgaaccaaccttgatgaagtccatgccaataaggtgagcgatagggggtttggtgagctcttcaccaatgttgaagatgctatgtcaatgcagtgtgcacgacatagccgaagtggtcattgtggccatcttgcaagatcagctagaggcgtaaaaaggcttcttggtcctctaatgatggtagagccgctgatcctcatgcatcggtgttaccatctgccacaaaccagagtcgccaaagtttgttgtctagcattgaaccccaaacaacggtgggactctggctcagggaacatcaaggagatcaaaattcgtggtacatgggtgatagtgaacaccagcaatacccatagtcactatcgtcagagatgggtgacagtgaaagccagcaataaaatcgacgacctcggaagcttataattgtgtaggcgagctcggactcagagatgaacaatcatcgtcagacgctgcactcacgtggcaatcgacgcggacactgagaaaacatcttctcatacgacgtggtgaatgttggtcggagtactcctccatcgtcaacaccgacgacgaaggtgtgcacgatcctacaaaccaccgatgcaaatggagtgatagccccaagctctagggtaaagcttggaagataggcacattaaggtagacgcggtggaggaactcacctttgtgtgtaaggaaacacaagcaaacatatacgccaggagaggaaggaagaacaaacaaaattgtgacagcacacaaaggcggtaactcatcctcatctaagctagccactggactagccaatcaaagagaaacacagggagtagtaagttccaactaacaaacaaaccggcatctgcacgtgatggtaaagcagcgatgagcaacctgatgaaatggtaaataactcacccagatgtaaataaggaaaaagaaatgaagacgtgtcgcaccgtgagacaccaacagagaccaaaatctatctattgaaaaattgaaaagaaaccagcaactttgccactatcttctcttccaattgctgctttgcccttggggcctgctcctcgcctcctcttctcaaccaagggccactgcatgatgatgcgacggacgaggcgttgagatggggatagcgacgtcgggctgtgcgctcagtggctagggcagcaccaccgcagggcgcacagtggctggggtgatgctcggcggcgacagactaagattgtgaatttgggagagaacatttctttgatatgacatgtgggacaagggcaaaaatgttgacaatctaacaaggaaacaaaaaatggaattagaaaatcagaaatacataaaagaaaaggaaaaagtggtgtcaaataaaacaattcgcagtcctgattgtatattatagaaggcatgcaattaggtggtaaaaagatcaagacgcacgaattagatggtaaattatcaaaattcatgcttgcaaaagtgacagaagaaaaacttctaaatacggagtatatagaaacaatttgatactagtaatttgctcgtgctaacgctacggtaatatttagtaatacaaattaaataatcaaaggaatacaatatatgtttttgtcaaacaagcataaaatagaaggttcaaaattaaacatgagttattatatgtttgtaaaaaagtttcatgtttcgaaaacatatactccctttgttacacactgtaagacattttgacatccttgtcttgattcagtgatatgcatatcaatttggacaaatatattaaacatatatgtagatctctctatgaatctattcaaaatccaaaacgtcttattaccgtgaaacagaggaaataattcctaatgcacaacttcacaatcagtgcgtagacataaaaatcgaaaccatccatcaactctaatgtttttttgaaacgtataacggcaaaagacttgcaggatatattagaagaaataaataaaggttacaaaaaatcgcagactctcatgtagtaggggcctgtgttacgatattacaaagattgtgagcccccctaaacagatctctagctcaagagagtctagagctaataagatggcctatattttcctttatagcaaaggcgacctgcaactcattttgtgagacatgttggaagattctacggtttcgctccaaccagacattccaccaggtagttagcacggctcctaggatttgttttctcatagcggttggcattacagaacttaggatatcccaccaatctgttgtgctttcatgagtcgtttgttgaggaaagaaagaactatagcccatctaacttgaggcgtggtgccaaactctgcttgtgaaaggacactatttagctaggtgatttgaatcttcaaaagcacttctacagagactgtatatccaatcacatggccaatgtctcttgagaaggttttcagttgttagtgttctttggtgcaggatcaaccagccaaaaaaacgatgctttggttcagaatgcgttgtccaaagagttgagaaatttgtatgtgttatctccccttgaaattgcatttgatatgcactctttgccgagtattctctatttgcagtccacttccaggagatgtcgtctgttctttgttcatctaaaatgacaccctgtattttgctccctagctgaacccgttcctcaatctccgaaacagatgtaatcgggttaagcatggcaatccaatggttgtcttgcagttccacctggagattatttccctttcttttggcaagcttgaaaatagagggcgcaatgtgttgaggtgctcttccatcgagccaatggtctgtccaaaacctgattttgttcccatttcctatcgagatctatgttgccgcctgaaaaagggcatggtcgattttttcgcagggtgtctccatgttaacccacggcttagtttcatctttccatccaaaccatagccagcgaagcctgagtgctctcgagaatttttctaggtttagaataccaagcccctccaaatactttggtttgcaaaccgagttccaatttagcaggctacaacccacggaaacacttccggatcttcccctttccacaaaatatgccgtctaaagcagtcaattcttttgtaaagccatttgttagaaggaatgacaaatatgtggtaaattggcatagctgagagagtttatttcaccaagaccttgcggcctgtagctgtgaagaaacatcctttccaccctggaatatgaccccccccccaccttatcaattagtggttgtaagtctaatttcctaattttcttgaagtgcagggggagactgaggtatttgcaggggaaagatttcaggcttcctgtgaaagaagggagaaggccttcaacatcaataccagagcatgatattgggaagatttcagttttggtgagatttgtgtgcagtccacttatttgagcaaagagggaaaggatcttcttcagtgcttgaaggtcattttgtgatggtgccatgaagagagcaacatcatccgcatataaggagcatcggaatcttgcctgtctttgaggaagattagtgattacaaaggactcttcctccttctttatgatctgttgcaaaggttccatcacgagaataaacaacgttggtgatagaggatcaccttgcctgagcccacacgcgtgattgatgtgttcccctgggattccattaagcaacactctggaagatgaggttcccagaaggttggagatccagtttccccatttttgaccgaaccccagattttgcagggtttcgagaaggccttcgatatgtccaccttgatgaagagagtgccttttttctttcgatgaagcagcctaatcacattttgcatgtagaggaaattgtcatgaatagcccttttttttatgaaagcactttggttttggaagaccaaatcatttagcttgggttatgatagaatttgttatctcatttacttttctgtcatcttgcaaaagacctttgtctccgaaaaacttagcattctctactcaatgtctcgatatctatgatgaacatgtgcgtttaaacatcaatgataaggacggaacaaaagaggacctgtgtgtgtgccagcaatatttgtcgacttcaacaacacacacacagatatggttaccaatgaaaaaaaaatgaaaataatgcaattcatgtatcaaatatgaagcattatctcattaccagatggttacctattgagaagttaatatatataaaaaaaatcaatatagtaccaacactgagtagtatgttgagaacatcatcatatatttttgaaacagaaatcaatctaccatgtttgaaacaatgtaattgtatcccacaagtatatggcacactacataattgctctgtaccatatgctatgtcagtcaatactttccttgtagcctatgctatgtcagtcaatactttccttgtagcctaaaagcaagagtgtatcaaaagaatgtattaataccatgtgaggaacaccattgagctttaacattttaagaggccccatcacaaaggtcagaccgttgagaatccaacccattgctagccaagatgcagttgatgttatcagatccttcttatcatttggttgaaacagatgactgcttgtgttgaagtgtgagcctgacttccccaaactccttgcaagctgcaggcatgaccccaaacaaggaatttagtgcgacattacaaaataacatttgtttttagtgccaactaggccatgagtgtagcagcaagattgcctacattgttttcctaaatgaatctggttgttgaattgattcatgacgcaaacaattcccagaaaatcttcccaatcaggacctcggctttgagaaaaaaaacagtgagtgaatgaatattgaaaaaaaccattatgggttgctctcattgaattttgcctttgtgaacaaccatggatgtatatatcctatacaccatagaaaacaaatcggatcacttgcaccaccattggttaagaccaatgccatcactgttgcttcctccatcattcaggacaaatggtgttggaattaatgaatgggccttagcccactcgaagattaattctttggaaaatcacaaaagctcacctcatgggatgacatgcatgtggagtttagtaccaccttgcttattctaggagaggggggcctccttaaaagggaggatgccctcctagccacttaaagcatgtgtggtggagagaagaggggggaacacacgcgcgcgctcgctctcctcgcctcgcctggcagttcggttacgcgcagtggagatcgtgcgcgcgccctgatcaagcgacccttctcaatataaaccgacccgtcgtcttcacgcaatatacgcgaaatcaatctagggtttgccttcctactctgtgctgcaccgtcgctcgtagattactccatcccgctcgccggcgtgcaccggcgatcgcgagagcaggtctccggaacctctgcctttgacgtcctgcaccgggagaaggcggcaataaggtttttgggaagtgctttgcgcgactgctccctgttcatccgcgacggctcgtcttcctcttcgctcgcgtgctgcgtgccttcgtagacgcctgcgaaaagtttcgatcaagcagccagtctttccgccacctcggtacgtgttcaatatgttgcgcatatttgatctgttcatgttatactgtgtagtttacaagtgtagatataatgatgcgttcatgctaattttcatctgtaatgtcatgatttatttatggaatagattaaatcattatatgcctataatctcaacaatccaaaaacttattataggcactgtgattttactatggctggttttgccgatgcactgaggccggataaatttaccggtgtgcattttaagagatggcagatcagggtcactctgtggctgacagctatgaaatgcttctgggtgagtactggcaaacctgaaggagttcttactgctgaacagcagaagcaattcgaggaagccactactctctgtgtaggatgcattcttagcgttcttggcgatcgtctggtcgaggtgtatatgcatatgaccgacgcaaaggagttgtgggatgcactgaatactaaattcggtgctactgatgctagcaatgatctgtatatcatggagcagtttcatgactacaagatggctgacaaccgttctgtagtcgaacaggctcatgagatacaaaccatggctaaggaacttgaactccttaagtgtgttttacccgacaaatttgtggccaggtgcattattgcgaaactacctccatcttggagaagtttcggtactgcactcaaacacaagagacaggaatactccgttgaggggttgatagcgtctcttgatgttgaggagaaagctcgggaaaaagatgccgcgtctaagggcgatggtgggcagtccagtgccaatgttgtgcacaaggcccagaacaagagcaaggggaaatacaaagctcagcagaccaccaacttcaagaagcagaagaagaacaacaacaatcctaatcaggatgagaggacttgctttgtgtgtggccaacttggtcatctggctaggaagtgtccacagcgcaaggggatgaaggcacctacagggcagacttctaagtctgctaatgtgaccattagcaacactggagatggaagcgggtatggtaatttacctgctattttttcagttaatcagtctactaattggtgggttgatactaggtccaatgtacatgtttgtgctgacatctcattattttcttcttatcaggtcgcacggggttccaccgtcctaatggggaatgggtcacatgtttctgttcatggtgttggcacggtagatctgaagtttacttcgggaaagatcgtgcagctgaagaacgtgcagcatgtcccttctatcgacaggaatcttgttagtggctcccgtctgactagagctggatttaagttggtttttgagtctaataaagtagtcgtgtccaaacatggatattttattggtaaaggttatgagtgcggaggcctgttccgcttttccctttctgatttctgcaataagtctgtgaaccatatttgtggcagtgtggatgatgaggctaatgtttggcactcacgtttatgtcatattaattttggcttgatgtctcggctttccagcatgtgtttaattcctaagttttccattgtcaaaggttctaagtgccatagttgtgtgcaatcgaagcaacctcgcaagcctcacaaggttgccgaggaaagaaacttggcaccactagaactcttacattcagatctttgtgaaatgaatggggtgttgacaaagggtggaaaacgatatttcatgactttgattgatgatgctactagattttgctatgtgtacttgttgaaaacgaaagacgaagctctagactattttaaaatttataaggcagaagttgaaaatcaacttgacagaaagataaaaagacttatgtctgatcgtagtggagagtttttctcaaacgagtttgacttattctgtgaggaacaggacatcatacatgagaggacgcccccctattctcccgagtctaatgggattgctaaaaggaagaaccgcacactgactgacttggtgaatgccatgttggacactgcgggactacctaaggcatggtggggggaggcattgttgacctcaaattatgtgttaaacagagttcctaacagaaataaggacaaaacaccatatgagatatggatcgggagaaaaccatcactttcttacttgcgcacatgggggtgcttggcgcaagtcaatgtaccaataacgaataagcacaaacttggacctaagactgtagactgtgtctttctgggatatgcttatcacaacattgcctatagatttttaatagttaaatctgaggtacctaacatgcatgttggtacaattatggagtctcgtgatgctaccttctttgagagctttttcccaatgaagaatacacatagtagttcgagccaaccatatgaaataattcccagttcaatcacaccaccagaacaaattgaacatacacatga

SEQ ID NO: 10061 - DNA, 14644 bp, Oryza sativa
taagatggtatcaaaattggaggaaagaattcaaaatctagaggaaggttcttgtatggatgctcttgtccttccacttcacggttctttgccacctgaacaacaggtaattcattaatcttccattctagtgtattgttatatttgtttcttgcatatatgacatcccatgaatgcttgtatatgacattttggacatgtatgtggtctccaatatgcgcctttgaatactttgtttgattatgctcatgaaaatttcgtggagcttttatattactacctccgttcttttttggtgacttttgggacatgacatagtcataaaattcattattgatagcgatatgaaagtattcttcatgacgggcctattaatttcattttcacctataaatcttttaggtattcttcatgacaggcctattaatgtcattcacctataaatcttatagcgattaggaggtgtttgcatttgtttatgagtcaagattccaaggtttgactgcacacgttctaaaacatcatctgtttgagaatagacggagtgtgaaatactattattaacaaatttgataatgtcaacttcacctgaaatatgttttttatatactgatgtttgaatttaaggaaatttgagtgtatgttttagattataatacaaatttgaacagagaatatattttaatctttcagttacttaatcaatttaatttttcgtatatgagcttatctagtgatccatagctactgaacctaataaacacacctggccatgtttcttctccatttctctaattgatcaatgaagcttggcattgcaatgtacagttcctacactattgcagctaagtgaaatttcttagcaggcaaaagtcttctgaacaagccttacaattacttatctagtagtagattatattaaagcaaaatttgtaagattttgtgatgtcactgaaaaaaattgccaactaggaatatttcaatgtttatttttccttttttgttgtgtgtattgcttgctgttgatcgactttcttgggggactagagtatcttttttattctgtgcttgctgcattgctgcaacaggataaccttggatgatatttaaccaaccccctaacaatatatggctatgatagcaaaatttaactacctggggatcacgttctaacaaatggatgcactgatggatgcgaattataataggctcaactgagagttgaaaagcaaggtcgatcccgatttgttgccaaagctgctgttttggtctaatctttttgggtttaagcacacttattagtatttatattcattaattgtccttcattccatttgttggtaaatgtttgatgctctatagtatcattgctgatgtattcccttgtcacaataggtccgggtatttgctccagcacctccaaattgtcgacgcttcattgttgcaacaaatgtagctgaaacatctcttactgtggatggtgttgtgtaagcagcaaactgcaaacatagtcagttaaagtgcacatatactttcagtttccatcttcagccttttttatttatttagtgatagattattgtgtttatgatgtatttagctgattttgtggaaaagtatatgcaaataaatactttttttagagttatgcaaggaaatggctagaatttttgttatgaactactagtaacatgctattaaatttatgagagttacatcaactgatctgctagtatcagtttttgaagtgtatttttgtaaaaaaaaatggtaggagcaaatggctataatatcattaaattcacatgaatgcttatattcttaaacttaaaaggaaaaaaatatatggtttatatgttgaattcacaaactaattatctatttgattttatataaaagaaatatgcataacttggagataccttgtacatgtctaggaggaaaaagcttgaatatagctttgccactcgctctttaatgtacgtacgaagttgtgatttgagtatgatctttcatcctgagaaattagtgttacgattaaaataatgtgctgatgaacatttgtgatttcattagctgttttgttaataaataagaaactgctgaactgatattgcgttatcaaaatttgcaatctttctattaccctgctgaacttggaatggctgcaattttgttcttggagacgtgttttttcctttttcttttgggtttgtatgcaaatcactaaaatatttttttatgcactaggtttgtgattgattgtggttatgtaaagcaacgccagtataacccatcgtctggaatgtattcacttgacgtagttcagattagcaggtaaatactatgttgcacacactgtggttatctgtctactgtcttcatctgttcaactagatcatgatcctgttcagagatatctagttatgatccataatatttaccatactacttcttgaataacaagagtgcaggctgaccagcgagctgggcgagctggaagaactcggcctgggaagtgctataggttatacccaatttccatttatcaaaaggagtttctcgaggctacaatcccagaaatccagcgttcttctcttgccggaagtgttttgtatctaaaatcgttagatctacctgatatcaacatactgaagtttgatttccttgacccaccatctcgtaagataaaactccagaattctctattcttaattatagctcttcaatcttcatccatctttaatgcttttttgttgttagaaatcactttatctattggattagctccaaaaggcaaacatagacaacggccattggcaaaggaaaacgagaagaacaccctaatctacagaaactagatatatactcccttcgtatataaatatatgatcccattgactttattcgttcaattttggaaagttttaccatcaatagctctcaaaatatttattttgaaaacataaaaaatcatatcggtaggtttttctttacaagtacttttacaatattataatttgttagatattatcgttatattctaatagacaagtagtggtcaaagttgcacaccaaagattgaataaagtcaattgccatatatttgaatacaaatgtagtgctattcacaacataagtagctgttggtaaaatcttggttctgcatggtttaacttaagttattacatttattgttctaggtccagcctccacccaaatactttcatggtggctggacgagcctatttcaaaaggcatatgacctactccttccgtcccattttaagtgcaatcatgaggtttcgtgcccaactttgattgtccgtttatttgaaatttttttataattaatattttcattgttataagatgataaaacatgaatagtactttatgtgtgacttatgtttataattttttttccaaaaaactttcaataagacagacgatcaaagttggacatagaaaatcatggctacacttaaaatgggacagagagagtactaaccttacgctccatttggcactgtggtggattatgataatatcttttgatgcacctgttttaggagttgatgcccgctaactcctaaagcccaacatgcaagtgtgccacatgatcaccctctagcatttattatctagaatattttaaatcacatgcaagtgtaccacatcatcatccatagcagttattatctagagtattttaaatgtcatgcaaacatgacatatcatttacaattttgttgtatttttagaactcaatatgcaagcaatgtcaaatcattatttccacatcatttttacattatttaaacatatacatataccatttatacaatgtacaatatgcattcatccacatatcccgcagcaaagcgcggggatatcaactagtagcttactattcctgtttggtatcaggagatcctcagtgaaactgcatccacttctttgcctgtacaaattgtcttgtgaaataaaaactagtattgtctatctcttacctttgatgcacaatgacctgcaggtgaatcattagaagatgctttgaggcaattatacctcatcgatgcaattgatgaaaatgggcaaataacagatgtaggacgaattatggcaggtattctcagcttgcttgtcccatttcaattgaaatgaaatcaggtggttatttgagtttgtcttcactcttgaacaatgtatgcaattaaagtttgatcaaatcacgagcatatctggtttctttttcttttatttgaacttcacatggtctaattttatttgttgcataccaatataatattgttgtatctttagttcaatatgtgcatgtgcgtttttgatgactctgttagcacatccagcacatgaagtaactgttgatgtgtggagcggcagcatgaacagggatgatcattttctgtgtttgtcatcttctttttgttaaccttttggctttattttaagaagtttatactcttaaatatgtaacggtctaacctctaatgttctatataaggaggccatacctggcaatgttttgatatttcaattcagaaatgtctgatatatacaactgttaagaggtctaatgtttttgtgcaaagcttcaggcagtttatgttgacattgttgttttattggtatttctaacaggaatacttacctagtagcctccggtcagattactgcgttttggggatttttcttttttttttacccctccagtgtttgccgcgtgttaaactgttttctttcctagctgtgactggctcttttttctcttaatgacgtagctggtgtccagttttgtttgttgacgtttctacaggggtttcgtatacgtgccggtctttgggtttttacaatttttgtagttgacttgcttacctggttatttctgctctgcgtgttttttccttggtgtgttcggctgctgcttgtgcacggcttgtgtttgcatgcgtcctgcacgtggtgccatgcgcttgtgtgtgtagcctcgtgggtgtgcccatgctgtcttacgtggctgctcccaacccttttgtttctactcctatttcttattttctttttccctttcatatatttagccttgatcgtcccaaagtttttcatgcttgctgtatgttacgtttccttaatcaacgttgtgttgtcatcttcggttgctaggtcgcgttgtgctgctgttcggtgccgttcttgttttgatcttcaagctggcaatggtctgtttattgtttcttgttttacttttataatttgtacagttttttttccttatactacaaccgtgtgtttttcctcccgttgactcaaatcctttttgtgttcacacttcacagtgtgttctccgatagaattgctatcgttctcttaattttgctttgcacttatgcgggtatgccactggttgcttggcgctacatatagtttgtgctggatgattctgatgattctattgttgcctcttcattgagcatgaaggtagcagcaggaatccgtccacatataccccatgccaggtagcctgaaatgtctacagggctagaaatctcaataattctcatctcatccatgagctgaaggaatttaaaagattatgagtttgggtttttttgtaccatccttgagaaatatgttgaagtaccaaaaatttttatgtaaaattagtatctcgaggtatcaaaattttacactacaaaatatagtatctcgagttttgtcttttccactggtttccaaccagaagcagccttcaggagtgtatagtgcacttttttcggtttcaaggtagtgccatggtttcttacacttatctaagtgcaattccaggtcaaggaaaactccattcctaatctgttatctgatcaactgataaagcaatgaaccagatggatttgttctcgcaagatgcttgttgggcatagactagtttactaagctagaaaacgtactatatctatgcttgctttaatgctttgaagtggaacaacaggctaatatggaaccacatgagagcgaacggaaagcatatttggattttaggggtttttacaacaaagagtgaattttttagttaatcacggcacatatgcatgtttacaagtttctataagcaatattatatgatagttgatattaacctgtgctgtgatcatcatgtgtggatgtgcgatcatcaagtttctataagttgatattttatcttacattagccatgtgtggattgtcatcatgtgtataaaatatttttagtattcttttaggccaaataaaactgaagtgaaacgagtaattgcctgagcgcggcgtgtcgccgcgtgggcacgtctagttttttaatgtctggtgagtttttgtgtagtaagatttgttccctgtgcaatggccatagttttcctcttgttttgtcttgagtatgagccgtttacatgtctatataatgtttggaatttgaatatctccacaatgttatagaacctgtcttgggaacaagctgttgcttttgtaatgatctggaaatttccacagttttgtactatctgcttctaattttctagatatatgatatttattgggaaaattttgtatttgcaactagtaacttgtctaatactccctctgtttcatattgtaagatattttgggtttgtcataagtcaaacttctcaagtttgaccaagtttatagaaaaaaagtaataacatctacaacaccaaattagtttcattactatttgtatactatatttgttttgtgttgaaaatattgctattcatttttctgtaaaacttggttaaacttatagaagaatagaagattgacttaggacaaacccataatgacttataatggaaggaagaagtatcaagttgtcaactatatattcgaaaaccattcttttcacatgccagtgttccatcaggtcacattcttacatgactggtatatgagaaaactgttgtgagatttttacttgtaattcataacttcttaaatcctgcaatatgttgctaggcttgataaccaattgtttacctatgtcatctgagcccattagttcccatataaaagcagtggtcaatatctccaggtccagcagcattgcgcacatgaacagtacccgcgtggttactgttcaaacgtatgaagctcacgtgattgctttaatttagattaatgagttatttattaccatgatcttagatataagtttcttaagaggcaatataaggatggggctgtatttctgttcattaagcaagagataaacaagtgtctttagtctcgccatcttcttgcctgcccttgtggtacacagcctccatggtgccaatgtgccacttgggtcaactatgcctaaggcccttatcttagtaatgcccattacatgctattgtattttatgattgtacgcgacatgatttgctagactaaatatggtgcttgtagtagatataggagtatgacgtgggtgtgggtcactctgtttgtaccttgttgactgactctggttcaacaaaaccaattttacttttgttgaactagagtgggtcaacgggtacccacagagtaatttgtacccatctaaaagtagctatattattcctacccctttactagaaatgttgcaattgcttatctgtactggagtacataacagaacctagtgggtactgggtagcgatgatgctgaaattgtgagtgtgtgataaattatgatggcttcatgatcgactcttattcacatcccgatgaattctgtttgttggatatgatttgtgtgtatgccactgatagataaattatttgtgatggacacaatgtgcaagggtgatgccaaatttttgtggcagccaacgcacccccttctgcctaaaaagacttggtgccaataacccttggctccagttacctgatgttgacccatggccacgtcgggatccagcgtcgcacagctgcaccagggttgatggtgctggaatgttgtttagaaaagaaccagtacgtcaaaattctagtgtcaagtaacttatggacttatgcaagatatgttgtcccgtgatatgtgtgcagagctccctcttgagccttctctttcaaggactttgattgaagcaaacgaattgggatgtctatctcaggcattgactgttgctgcagttctgtcagctgaaatcacattccggtcaactagaaggtgggcattttgttttgtaattcatctaagctactgtaacacattgaattttatggtgaacttattgcacccttacagcaaagacatggagggaaagaggaaaaggcaagagcttcctgatggttctggttggggcgaccatatacagttgcttcagatatttgaaagttgggatcgaacaggctatgatccaagatggtgctcagatcatgagttgcaggtgaatgaaaataacattttgattctaatatgatacagtgaaaggaataaaattattaagtactagtgttgcaaaaataaatgcaactgtgttggaccttcctgcatagaacaagccgaatcacaaagcatgatataatacctgaattttattttaaataggtcatcgaagcatgtcatgttaaatgggaacatatcctatgtacacaagtttctgatacacactctgtgcacagcaattaacaaatgtcttcgaaaattctagaaaaaattggacatgcaatcctaatagtactccctccatttggaattgataagtgcaaaagcaaaacattcagaattgatcagtgcataagagcaggtacaatagcaggctattagccggctataaacatattttaatgagataaatgatgagagagaagagcagcgggctacagatttgtagccagctgcagcacggactccaagacacaatgtgtgtatgacaggtgggaccatatattaatagtatagtaagcaactattgtatgaattggctattagattggctatagatgaattggagctagtagtgagctatactattgaacttgctctaaggatgtggtagctgttcagttttgcatgtaaatttattgttttcccatgcaaggattgggtggctctttgatttacatgctagccaatcagttttgcatgcagatttattgctttggcatgcaaggattgcctggctcttcggttctcattcaagccaatcaattgagcaaaaataggatgcttcattgaataaaaattggctgctcgtcttctcattttgcatgcaagtgttccttagtctggagcccaggtgaaataggttgatcaaattcgaatggagggagtattacacatatgtgtaaagtctcatctgaaaattcattatattttagccgtagcaaaaaaagaaaaaactgtcaggtataagagtatactatcagaattttgtcttttatgttacgtctaaaaataattaattcaaacatgagatttcacacataggtgtaatacaattgagagtacaagtctacttttttctagaatttttggagatatttgttagttggtgtgcatgaagtgtgcaccggaagcttgtgtgcatatgatacgttcccatcttaaattgccttttagcatttatagttttcatgctagcaatgcaaactttgaaacatataacaaggataacattgtgtgatcatcatatctatatgcctgcatatactgtttgtcatgatacttacagactttataccccctagatagttttctagacattagattacaatgtagatcacagaactatcttttgcaggtgagaggcatgaaattcagcaaagatgtgagaaaccaattaagtcagattattcaaaaaattgcaaaaggtcggtgatcagtaattctagtttctgttttattgtgtacccaccctttcaaaaacctactacctgtttgcttcttcctttcctgggacacctctgttgttgagctgttttttcctcttttgtcaattcgttgttctactttttgaattttaacttctaggaactaccacaaagatattgttacatatgccctccatgaagatgtacgtcctacctctagaacctcagtaatatccatgcagtgctcgactacagatgcaatataacctgaactcatcttgctcgtattgcaaccaaaatatgtaatagatccagagcccagcgcattacgtattccaatgttcactcaactactatgtttaagtttggcccgtatatcaaaaactactaaacctacctctttttttgtaaatttaggttcaacagatgtgcaagcaaagaaagagcggaagagtgaccctgattatagaaaattaaggagagctctatgtgttggatatggtaaccagctcgctgagaggatgctgcatcacaatggttatcatacggttggatacagggcacaactagtgcaggtattgacttctgcaatctatcagattagttttgctatagtgtcaagcataaatggcaagggtaaattgagatgattctggcgaatgaaacattagccagcttaaccaaaccaaaaggtagcagttttttgtgccaaactttttactagatgtagaagccaatgaaactttcagttgctacttgaactgtttagatatgctgaatatgctttgctgagagtatgcagtttgttctcgggtaattgtcgacaaagtattttagatatgctggatattagctgcaaataatagttgtctcatgcaacaggaacgcatgaatctcacagtgactggtttaagctgtttttgtagaattttgtcattttggttttgactacattctttagtttacaaacttaattactgttgaccctttacagtttgttatatattctttttgcaggtgcatccattttccgtactggaaggtgatgaatacgggaaactgccggtatatgttgtctaccatgagttaataaatactactcgtcctttcatgagaaatgttagtgccgtggatcagtcttgggttaaacctatattgaagaagcttgaaagattggacatgaacaaattaaggtatgaaatatatgggttaaaataattactatttctaacatggcaatttatgctactacagtaataatctcaattatattacagtggtggttccagcggatcgaaagatccagaacctctagaggataaacaagtaagctccccaaagaaagcaatggatgttaaacaatctgacgtggacagtaaaatacaggcagctcgcgagcgctacctggctcgaaaaggcaagaaatgacagtatgtgcttaaccaagctattctttggagggtaggtcccatacgtaatgagaggaacagggagtgataacatgacaatcttcagtatcatatttccctacctcttattacttaccatagcagaagtactgtaggtacaagcagagacatttatgtgagtctaaatttcatcatatccatccatttgtcaagcttgagaactttgtaaccgtttaaaggcctgtttggctggtgtcttggtgccatatgcctgaggattttgcatgccagagagccacccgagatgatgaattttgcctagtcaggcagcatgtctcttttgattgtttggtttcgcacagctgtctgaggaaaaattgggttaggctttagatgattactgctaatcaaatgttgatcggaagataatcttgctaccattgcaatcatgcatcgccccttcaaacaaaatccatccactgccaactttccgtaaacaaataatttgcatactaaaatctatccaaataagctcttgaatctattcagcgaagtggaagctgcagagatgactggcggttcacatgatggctacagtgcagcggcggcgctggctgcaacagcgttggcagcttcgcgcaacggcctttgcggcggcaagatcctgtgaccgagggtaccaatcaagggccacatcttttaccctacaacatatatgttgatgatatatgttgatgctaaaatgtgaatcttaaaatttaattttcgagttaattttgagggttttttttatcgtagtttcattttcaacattggcgttcaagtcattaagaacacatgtaaaagttttaagagtaaatttcacaaaactacaggtattttgcataatttatcaaaaaaactacatatttaagatttaagagcttgtttcataaaactacagatttagtgtctcaatttatcacaaaactacagatttatacaaactatcacaaaactatatatttaagaatatgtttcgcaaaactataaatttagtgcatttgtttatcatagaactatacatttagtgtcttcatttatcacaaaactacaggtttcacaaaactataagtttagtactaaacctgtagttttgtgataaatgaagatattaaatttgtagttctgtgaaacaagttcttaaatctgtagttttgtgatatattgtgcaaagtacatatagttttatgataaatgaaggcattaaatctgtagttttgtgaaacaagtttttagtcctacgctgagaaaagataggggaaagagataaggagttagaggaaggaaagagataaggatagaggaaaaagagatagtggagagataaagatgagaaagtctaagtctatggtggttcgatatatttaagacgtgggagggagatagttggtgatatcaaccgggattaaagatctattttctcggtgctctaacgttgtctaacacaaatagaaccgggactaaagatgatttttagtccgggattaagggcctgtttggtacagctccaactcctaaatataactctaggagttgagtctggagtggagttgtggagctgcctaaacccagctccacaactctagtacattttgtgagagttttatccaactccactcctagttttggtggatctgaaactgtttggctgagctcctggagctggagatagagctgtgccaaataggccctaaagatcatgaagtccccgtgcacttttaaactgagactaaaaatggtttttagttccggtttttagttgaaccgggactattgtggctttttggcaaccgatcaaaaatggtttctccagtatctagatgtgttatattacacattaatgttactgtaatcatactaaacttctgcacgaggtttcatctactaatataaaaaatatttcgcccgaaaactaccaatggataaagaaagtcactatcggtcccctgtgatcgctcccgcctcttcccgtgtgtcactctcatcatctcgtgcgtgctactagaaaccggcgtgctccccattagtgaagaatgagaaggatagggaaggggatttcatttgcaagttagtgaggggaactgttggggtgtacttaaaacaaccaaaattttgagattagaagccatgctgagcatctgttggcgatgctcttagagcaccatccaaaaatccagtaccaaaactattcatttactttcatctaaccaaacctggatttttatgatcatttttttttacataaaatggcatataggtgttgatgcgaaaaacacgaggcctgagagatctgcttaactccagtgcaggtccaaaaatcttgccattaggttcgtgagcgtgccagttgatttgattctgcaattaacaagaaataaagtgtttggagagaaaaaataaattttcgtccctccgcacagggaaataaaataaaataagatgcgcgggcgtgcagtgtactaagtacacaaataaaatagacgaaggaaaatgcatttattataattctcaaagaattaaaaaatacaaaatccttggtcaaatgctctctatggcctgtaggcaaggtggatctgaattggcgattgtgttctcctgtttcccagggtctcggaagacacctggttaattactctcgcgagttaaactcgtgagaaacctctgattaagctgtgctggtcgtcgttggtctttgcttcacattctcccactagaacggataccctcatctcaatcgggcggtaagccccatctcaatcgggcacagcgtccgtcacaggctagaagtcactgatgtgaagagttatctcaatcgggcaaacggccgtcacgaatgaatatatctcaatcggttcctaagtaaagcccatcactgatagctttgacccagacgaccagtcaaactatagcccgtcacagatgacctatctctatcgggccacaactagcgcccgtcacagatgactactaacctttatcgggcctaaactagagcccgtcacagatgatactcatcttaatcgggcctaaactataacccgtcatagatgactgatgacctcaatcgggcctaaactagagcccgtcacagatgactgctgacctcaatcgggcctaaactagatcccgtcacagatgactagtgacctcaatcgggcctaagctagagcccgtcacagatgacctcatctcaatcgggcatttagttgtggcccatcacagatgactataatccacaaaaaaaataaattttgttttttggctagcctcaggcctttgctagccatgtccgctgcaaaaatgacagaaacaaacacagatatccaata

SEQ ID NO: 10062 - DNA, 10196 bp, Oryza sativa
caacgatgtagtcttccgccagcccgtctgccgtatcatcaaccgagtacgcgggggtaagttctcatcggctagatccttctttttcgcaatagattggttttcctcttccttatcttattttcccctttctctgttcttttggatttgtagcatctctccaacctggttgcaattccaagcctatcccatgaaaaccattactttctcggcccaatcggcaaccttgatcctactgagttcatcattggccagaccaatagaattcctttcagattagccaacccaaatctaggtcactggaaaaatacttttaaatcttggccatctcttgagaaaacttcacctgagaagagctggattacatggtacaagcgcatgtcgactagcaagaaagttcactgggacgaaatcggaatcggccaagcgcttgaccttaccatagccaattcagctaaagatgaacctttaatggccgccgccaccacctatttctggtctaacaccatcaacgctttcttgttcaactaagggccgatgactccaactttaatcgacatcaccatgattaccagattagatataacttcatcggctaaccctatgagtctgaacaccaagaatcagtatgactttaggaccaagagcataggcggctggtccggttatgtagcagcatatatgggccaaggatctgtcactccccaagagcatgtagcttttctgcttatgtggctggagaaattcctcttctgtggatcaagctgcggcctgcaactaactggcagtttgtagccgaggccttggaatcaaagagacaattccccttaggcaaaatcctcctcggctatttgtaccaaatgttgaacaatgcatcagctaagatagccgtcggctcagtagttggagcaggtggaccatggtggctactacaaacttggctaaacctgacggccatgaaattcgtcaatcggccatctatgacagaagccgaattcccaagactagagccaatcatagaagacgatggggaggaacgcaccaaccgtagatgcacatcctatggagaatatgcttccacaccagccgacgcaggggcaaagctatcagctgaactgcttaaggactagttctgtaacttttatgagggctttcagaaagatgctcgaatttggttccctacgaagactcagcacttctagagcatccatcggactttagatttgaagacatcaaccatgaaagataccaaaagtccagagaagtcttctcggctgcaatcagcccatgcatccttcctgttggcattcatcaagggaggaatattcaagtctcttatgagttctatcatccgatgagtgctgccagacaacttgggatgggtcaactaccaatcggtctgttctttgccgataaaattcaatgccgaggggaaatttcatcgaccctaatgatggataggctgctcaatcttcacggacctcctttgggcagtattgaaaacatagagttggcaacctttaggagcagatcatttgacaaatggtggggcgaatggaagctgcatctgttccatcaatcggcttctatgtacatgacagatctcttcccgaacattgtccctcaggtatatcttggctttaatctcgcttgaataagtgttagctgattcacaacttgactaattttcttttctattttgcagacaacagaatcttcccctccacaccaaagcaatagtggcagagacatcgaatatgtcccaggtctaattccaaatggaggtgggccatctacccccgtcatcggctatcatgcccccaagacttcaactcttctccaagggcttattagagaaccagccgataccggcaaaaagagaaaaaccagagcatcggctgtagacacatcggctctagccccaaagaagaaagctaagtcaaagaagaccaagccaaccgatgacttgcctgccctagatccatccattgaacaagctctggatgaagaagagattggagaagatgttgatcaagctgcagccgaagtgagcgatacagagaaaacaccatcggcttcgcccaagcagacccctccaactccttctgccccagctcatttctcgagggtaaatatctttccctggttcccttttataaccattttatcctcagccgattacttattaatcttgcctttgcagaaaaagagaattgctatgaagaagaaatcggcagcaacaactctcaaaccggctccaccagtaagatgttcttaattttttcaccagttgatctcagccgatcttgtctaatacttgtctcttttcagcctcctcctcctccttcttcccctgtacagcaatcatccagtgaccaaactccatcggctatagggagtcaccatgttgaggaagaagaacaaccagccgctcctgctatcccagtaagtttccctttgatacaagaacttagatcggctatgtctatttagctcctaactctcttgaaattgttcttgcaggtcttagccgatctattctcttttgacatcaaggacaactttgatgagacagaagaggacaccacaagcaaagccatagcccccttatccaatgatgtgaagaaaactcttgaagatatctctcatcggctagaggcatcttctttagacagcttggtggtcgactgtggatcaattagggctcggctacacgaagttcaaactctgattcctgaagaactagccgatgtccttactccagctgcttatcttgaacagcatcaattcaaactggagaaagccaagcagagattagtcgaacgccgagaacgcaaagagattgaaactacctgtcacgcccagaaattcccgaatagaattccaagcagaatatgcattaaaatccccatccaggaccggccagggtatacaaacgacaatgttgacattcagatccacgtcttacaaacatcataaaagtcttacataaatgcagcggaaaaacgaaagataacaggagctacgccttgacttgatctatagcgggaacaccactccacaggcatcctcgacggcacggacgaagcctactcctcggagaaaccaccatttgacacatactcgtactctggggttggggaaaatagagcaagactgagtactacccactgtactcagcaagccatactggaataggggtatgatgtagggaattatcaaaggagagctagagtggttcatttgcataaagcgagcatttaaaaacagaagttgaaagaattaaacagttgtaataattaatcaatattattcatccactgtccaatgctataccacgttgcgacaggcctaaccatccacctatactatccaatttcattagactaaactagggtgagactaatcgcggtgaatctggttgaccgcccataaccgcgggcacggctatttaaatagttttactctgatcagaggtgtacaacagtacccacaagacacagccccacgacacattttcgtgcaccgacatgccaccacgacataccggaaagaggtcgtgacaggacccttcgcataaccccctctaaccaagcacaccacacctcaggtttcacccccactcctcgcaaggcagcgggcagtcccctctcgtgcctaggtgaatccggaagcgacagaggccgtcgcaggggccaccccggttcatcacacccacccttgcctagatgcgtcagctagaggaaagctacactacaagcccagccgctgcccacgctggcttgcggtaagcacgataaattcttccatgttttctgcgaaccggtccttaattgccatgggtgcgactagcaaaaccatgcacccacagcccaccatgtgattcattttaattaaccaacaccgaagcggtgtcactaatccaacaataccattagaaccaacagtctaaacattaataggattttccccattatgtactagttgaactaagcatggctaagcaatccctagtccaaagtctattcatgttataacccaagctaacaaagcaacatggtaccaaaatagcatggctgtaacaataggtaaacatcccatagtaacattataaaatgatgcagtatttgaagaaaaacaatagagcatttgcaatataggatcaacatgttcaagtgacaagcatgacttgccttgctctgctgctggaggaacctcggcgactatttcgaagtacaccggagcgttggaagaaccggaatctaagcgacaaacaaagcaaacaatacaaacaggctataagactactgaaacagagaacaaaaccatttttaatggattctacacatttttattgattcactgagacttgaatgggcttaaacagagcacggatgaattagttatgaattttagaagattcattgtatttattactataacaaaaagtccttaaatcatttattgcgcaataaatcccagggctgacgtcatcaagggggggcggcgccgacgggcggggcccgcatgtcagcggctcaatgggagagaggggcgccagcaagtggggcccccgggtcagcgacccaaggctgccggtccaccgtggaccgggaccacgcgggtggtccaccgctggtccatgggaccgacggcctagatcgccccggggccgatcggacgggcggcggcgacccggctcagctcggctcaaggccggccgaccggccacggcgatggcgacggcgcgcgcgcgcacgcgttgccagcgatggcaaccggcggcggaggcggcgacgcaaaggcgacgcgaaggcggcgacgctaagcctaggaaggagagggaggggaatagaggggagaggacgcctcaccaagggtggccggcgcggaggaagacgacggcgaacggcgacgacgaccacgggcaaacggcggcgacgggcggacgaggtctggaatgccctaaggaaggaaaagagagaggttagagggagggagacgaaccacggcgatcggaaaccatggccgaaggcggcggacatggcggctctcaccatcgcacggtgggaacggcgctccggcagcgaacctcgacgaaggaggggtggacggggtggcccttgaccatgcgaacccaacgacggcgacggcgcggtgcggcggcgagcctagcggcggctagaggcggccggagtggcgggagcgccgaaggcgggtggttgcatggcgcgggagtgatggggagcacgagggagttcggtgaaatggggaaaaagagagagggggtggcggcggagcttaaatagggagagagggggccggacgtggccgggagaggcaggaatccgccggccaacgcgggggagtgggagaggagagagaggcgggattcaaaaatcgaatcctggccatctcgggcgcgggcgcgggcgggagaaaagaggggaggcgggcgcggaaggtgcggcgcatgcgcgggcgggagggcgacgtggacggcgtggcccgggagacgcggacgtgggcgcggcggcggtttcggcggtggttgcgggcgcggcggcgcggcgcgaggtgggagacgggtccgataggtgggccccacctgtcggcgacccgggtgagaggaggcgggcggccagcccgcgcggcctagctgggccttggccttcggccggcccagcaggaggggaggaaggaaggagaatgggccggccgcccattcaaagaaaaagagaaaggaaaagaaatgaaaaagaaaaagacttttcccagggatttaaatattgcttatgctcaattttaattggttaaaactatttctagggctctgaaaattccactaaaaatcctgttagcgaatttcgacatgtagaactcaagaaaaattccacatgccaattccgattattatttgcattaatttattaaggtttactcttgctttacacatgtattttcttgagaccatttataacttcaatttaggcttgggaaagaacttcgaggtgtgacactaccatccaggccaatcagcaactcgtgcatgaagagaagtccaaacttgatcaactatctgaaggcccgatcatgtctaatattgatcggcttgaagctcggaagattgagctcttggcacaactccaagaatgcaatgccgaactggatctggaacacaagaagctagccgatctcccatagtttgtcgaagaacagaaggcaaggctgaaatcggctatcaagaatgtcgcagatatgaccaagtctctaaaagtcatctctggaaccgatgctcaagatgctcaatccattgaagaagtagaacaaattaggcaaagagctatatcggctatccagtgttacttgtctctgtgatatcttgtgtaatagatcttaggaaattttgtaatcggctaagaaactctggctctttatctaactcatcttgataatctttatgccgattcaatataactccacattttgctcaaaaatttgcaacttttcatatatgtgcccccctaattttacaaagatgaaggcattgctaaaattataagttgaactaagggcgatataacaatatcggccattgcacatcggcagaccacaaccgattacaatatgaaaacaactaagggcgatataacaatatcggccatttcaaggtgatgtaaatacatcggctatcatgtatcggcaacaccggccgatcatgcattaacccaaacacttgggtaatatttcttcaactattttccatttagcgctcgtccataaacttctccatcgagtccttgcaacatgtaagctcccttagatacaaccttatagatttggaacggtccttcccaatttggtgaccacttgccgaattcgttatcccgagtcccaatcggcaaaatcaacttccacataagttcaccttccgaaaaagtcttgggcaccactttcttgttgtaatgccaagcaactcgttccttatccttggtaacctttgcaagggctctcaatctagactgaaccaagtcttccctatcatcggccatgagattataatattcatcggctgtcaaatcactttgcaactctgttcttcttgagccgattctaacttcccatggtaaaacagcctcatgtccataaacaagcttataaggagggacttggatcgatccatgacaagccatccgataagaccaaaatgctttggccaatcgagtatgccactgccgaggaaaatcagaaatctttctcttaatcaatttgatcaaactcttgttagatgcctcggcttgcccattagcttgtgcataatatggtgaagaattcaacagtttgatacccatgctatcggcaaattgaacaaactcatcgaatacgaagattgaatcttgatcggttgtaatggtttgaggaataccaaatcgatagattatatgctcttgaacaaattgtatagcatccccagaatcaaccttcttcaaaggaatcgcttctacccacttggtaaaataatcagttgccaccaatataaacttatgccctttgcttgatgatggattaatcatgccgatcatatcaattccccaacctctaaatggccacggtttaatgataggattaatagccgatgctggtgccctctgaatcgctccaaaattttgacaatcttgacatccttgtaatatttgaaacaatcctccagcattgtctgccaaaaataccctgcacatcgaagcaaccacttcatcttatgagccgattgatgagtgccacaaattccttcatgaatctcaccgattgcaaccttggcctgatcggcacttaaacacttaagcaacaccccatcaatcgtctgataatagagctcatcatccaataaagtatacttcaacgctttatatcgcaatttccgggaagccgattgagatggattctgtaaatattgatgcacatcatatctccaatcatcagctgttaacgctgcaacctcaattttgatgtctttgattatcggtttatatcccgacgccccttgggtcaaatcattagcttcaatattctgctctcgagatacatgcttcaaagtcaccagccaaaactctttcatcagctctcggcacttctcattataaaccattaatgtatcatttttgcactcatactctcctgccaattgactgatcactagcaaagaatcccccataatctcaatagcatcggcttcaacttccttgagtaattgcaaccctttgagaactgcctcatgctcagcttggttgttagttgcataaggtttaatagtataggcaaactcaaaacatgccccccgaggagaaattataactaagccgataccacaaccatgagtgcatactgatccatcaaagaacaaagtccacggcacaacctcaaccgagccgattgaatcatcacaatgatcaacaataaaatcggctatagcctgccccttggttgccttcggtgactcataccgaagatcaaattttgttaaggaaaatatccactttccaacccttccattcaaaattagagctgataacatgtacttaacgacattagctttgcatatgacagtgcattcgttggacaatagataatgccttaaccttgtacaaggaaaatataagcacaagcacaacttctccacactgcatccaagagccgacgacttagatagaatacaactctttctttccctgcaagctcctgaatcaagactgagccaatcgacttctcaccggccgatagatataatctaaaaggtatcctcttttgtggaggaatcaaaactggaggagagctaagatattccttaatactatccaaagccttctgttgctctaccctcaagtatacttttgatcggctttcaatcttaacaatggcgtaaaaggctctaatcttccagacaaattaaaaataaatcttctaacgaaatttatcttgccgatcatttcctgtaactctgtcttattctctggaggctgaattttcttgattgcattaacactcctttgagttatctcaatccccctctcgtgaacaataaatcccaaaaactagccaaccgatacaccgaaagcacactttgtcgggttcatcttcaggccatatttcctagtccttacaaaaaccttcctcaaatcggctatgtggtcctctatctctttagacttaacaaccacatcatcaatgtatatacttcaaccaaacagccgatcaaatcatggtatatataattcatggcccgttgatatttagctccagcacttttcaagccaaaagtcattacaacccactcaaacaagccgattgcaccaagacatctaaaagctgtcttgatatcttctttggccataaaaatctgattgtatcctgcatttccatccataaaactcaaaatcttgtgccctgaagcagcatcaaccagctgatcggctactcaatttcttccaaatcatcaaccgacatgaaaccctgtccttgcttgtcatcgagatcatctactatgtccttggtgtaaacgtttgaaccctccacgacgcccttaaaataataacttgggctctccatctttaattggctgtatatcataatcggacacttttagaagatctccatcccaaacttttccagataagcaatcgagaccatccatctcccaaagagctaaatcggcactggcaacattaactgacctgtcggctggcacgatttcaatcttgtcgccttgccattgaatcaagcattgatgcatgattgaaggaatacaacaattggcatgaatccaatctcttccaagcaacaagctgtaggaacccttcccatcgatgacaaaaaacgttgtagggagtcttactgccgactgtcagttccacattgaaaattccttttggtttctgatggattgccaccaaaatctttgagcaccatgtttgtcttgattagatcctcagcatttctgcccagcttcctaaatgtagcataaggcatcaaattcactgcagccccaccatcgaccatcatcttagacatcggcttcccattgacatagccgtttacatacaatggcttaagatgccgattatctgtcccttccggcttctcaaagactgcttgttccggtgataaaatcaacttagccgattcttcctccacttcatcaa

SEQ ID NO: 10063 - DNA, 16365 bp, Oryza sativa
atttttcccgcatgaatataaatcatatgtcagcagacatactcctctgacactaatatgtgtatttcgttaaaaaaatcatggtattgttaaggcggtaaggcgtaaggcgaggacccacacaccttacaccttaggcagtaaggcataaggcgaggcaacgccttatacagatagaaaaataggaaatgaaagactttttcgtaatatctagagtccaaggattaaaatggaagatgaaaataggaaatgaaggacttctttgtaatatctagagtccaaggactaaaatggaagatggtgacagatatttatctatccatccccatccccgtccccatccccatcctcaatcccatcggcgccacctactcgcctccgctccactgccaccgacggcaagacctctccgcagccgtcgcgtccatcccctctggtcctccctcttcccctgccgccaccgctcctcatcatcaggtggtgctgggcatcgaggaaggtggatctggctttgccagtggtcggggacgacagcgacaaccacataggtcagctattttcattcctcccccttcccctgctgccgctccttctccaggattggcttatccccttgattttgccctttctctagtttttcccgtaaagcggaggcagcgccttaccgccttaggggcgccttaacaaccatgatggtatcccaagatatggctttaaaaaaagtagttttttaaaatgatgttttataatgttagtaaaaccagtgcggagtgtacttaacataaataagagccatcagatacagacacatcccaaattcgccagagctttaaagaggttattcataggtgtagcaggtccagcacttatttcatcttttttttttacattatttgtccatccaacttgaccatagcaggacgaatactgtaagagagattcaagggaaactggcctagttaccctcttgccactataatgctagcccattcatgggcacatatcaaaaccatccatgacatttgttacatagcttatctgttatgacaatgattgatgtattccagtagtgaaataacacatagtgacttaatagagatgcaccaacaatattcacatgtcattgtcaaggtttaaaatatagccacataaagaaaatgataattacctatagcggttctcagagaagattctatataattcgttggatgttctgtgctgtaaaacttctccacagggaataaggttccagggatattcaacacaggacatccagagaagaactttgacactttcaaaccatcaagagtagcagaagtgatcagaactttcaaatctgaagctcgatccttaattaatcgtttcattaaacctagaagaatatcactgtaaacaaacaaatatcagaacgcgactaaagctttcaacaaatagcaacaaaatccagcggtcgtgtggccgatgccaaacaagaaaaagttagtactgactatcgatcactttaaaaatacaattgctagcttacaattgaagcatctgagaaccaattataataaatatgggcaaaatatggagaacgaaaaccacagtaaagttgcatcctacagttagtaaatagttactaggcatttgcgatccgaggccctcccattcaaagttgtccaggtaaacatctaatatagagaactatcgattatatcaaagtcaattttgagaacacatactagatgtctacattacttgtgagtgaaaatatcgtataggtactaattcctagcagtagagaaagaacgcatcagaagaaaaggcaaagctaagttgatttatataaaataggtacaggaagaccaaatataaccaatacatttatgttgactcccagtttcatggcacacagaatggcttcccagcactgttttgttcactgttccaaaaaccggacacataagcaacaaaagttcaacaggcatgcaatcaatcttgggtaaatctatgtagtgtataagcaacaaaagtttagcatattactataactaaatgtagtgtatgacccattcccggtaattatcttattttgttttcaaatcacaagttttcaattcaaacaacaagaaatgggtgtggaataactgaagagtaagcagcaaacttgataaagtgctaaactttaattcaaactcttatagatcagttgaacatataaaacgcatacgtgtttaaactgcgctcgtgagcttcatccagaataattactgaatactgcttcaactcagggtctgaaaggctttcgcgcagaagaacaccatctgtcaggtacctgcatatccgaaaatagaatgagttcgcatattgttcaagaagaaattcaagtcacataaacaccctctgaggcttactttatgcaggttttctctgaagttctatcttcaaatcggatggcataaccaacttcatcaccaaggggaacactgagctcctgtgctactctcctgcaaatattcagattgccagcattcataatggcatcctaaaaaacattttccacacttgaatataggcatagcacaagactacactggaaaactattcttctctgtacatgtataaatatgcatatgctgtaaacatagtgctgctcgccaggaagaaccacttcaaaatttcttaacaagcaggttcttaagttttctccccttaaaacacttctaaattaaaataaatggcttggctatccagaaagcagctgcagtttttacaaacgatgttctcgtatctccaccatcacgattctaaatttcaagatgaatctgcaattttcgtatcccttaagtgctaatggccaaaatccaacacatctgagagcttttcaggcataaccagacccacacgaacccagtaagaatgtaccctgagctaaaaggaaaccaacatttgaaaataacaacatgaatagaaagggggaagttgtactaaactcccaggtagcagataacaacgagcgcgcgcaggtgcgaccgtgccaccgtgggggaagacaagcgaagcacggagtcgggttacctggaaaccgagacggcggcgacgcgacggggctgggtgacggctatggcaccacggcgggtgtagccgcggcggtggagtatctgggagagctgggtgctcttccccgagccggtctcaccgatcaccaccaccactgggttcgcctccaccgcagccatgatctcgtcctcgtgctccgagatcggcagctccggcggcgacggctgcggcggcggcggcggcgatggcatggcggaggaggccgctgggatgtgttagggttttgatttgtttttgtttttcctcctctctctctctctctctctggtttttccggccgttggactgccgcccggtgatgaaaggaaaaagtccaccgaaggtccctcaacttgtcatccagttacaaaatcatccccgaaccacaccaggtattcgacgtacctcaactcacagagccgttcattttaggtccctcggaccccagttttttcctacgtgacggctgagtcagtatgagacccatatgtgcccacatgtcaggatgccacgtaagctcctctcccttcctttctctctcacttctcctctgcaggatcacggccggaaggggatgagtgcaggcggctggcggaggaggaggtcctgcgcggcgagtgcggcgtgcgtgtccgacggccaacaggggaggagggccagcgcgacgggcacggccggtgcccagcatgggaggaggccctggcccagcgtgtgcggcgggggcatctagcagccggcaggggaggagggtcgtgtgcggcgggcgtggctggcggccagcaggggggagtgcagtggaaaggagggccggcgcgacgggcggcgaggaaggagcggggctaggctgacgatgggcggggagaggagcggaggtggagacggacgcggcggcggcgccaccggcgacagcctcttcctcgccctcgccttgcgtcgtctcgctctccgctctgctcgacgggaggcgactccagcggtcgcccgcgcgtcctcctaaacttggcggtgttggccctcgttggcagcagcgacgctagctggcgaagactagcggggaaagaagcagcggccgtcggagaggagcttgacgttggcagtggcagccatcggctagacccagtgggcgccgtcctctgccaggaacgcgtagcggcgagaccggacgtcgagcccggcgggcttgtcggagaggtcgagctcgacgcccatggcgtgggcctgctccccgtttccgtcgaagaggaggagcacctcatcacggcggcatcatctgcgactttgcagactcaccggcctccccgcttcgccccgtcggcctccttcccacctgccggttgcggtggcggtggcggtgggggcggcgtggggggaggccctcctggtccggtgctcccgcgccgtcgcttcctctcatcttcttctccaaggccactataaatacacaatacacctcgccatgaacactcccaggcccagcacacagcaaagcagcagtagcagtgcaagctcgagctagctacaagtacaagctagcagcctagcaaagctcgatctatagcaatggcggcgaaggcggtgcttgttctagcggtgagcctcctcaccatggccgtggcggccagcaccgggtcgtcgtcgtgcccacgcgacgcgctgaagctgcgtgtgtgcgccaacgtgctcagcctctgttgttccctgctgctcgctgctcaacgaccttcccccgcgtcacagccgccgcccgctgcctcctcctctcctgcctcgccctggcggcctcctccctagctgctggccagctcgcctagagaagagaagagaagagaagagaagagtgagagagagagaggaggaggaggaagggagagtggagaggaggggagagagaggatgatgatgtggcatactgacacgtgggggcccacgtgggtcccacgctgactcagacgccacgttggataaatctagggtcaaaaccaccgaaggacctaaagtgaccggttttgattagttgtgggacgccggatatcttgttttatggttcagggatgattttgtaactcgatgacaagttgagggaccttctgtgtactttttctgtgatgaaatgaagtttcggcctcctgggctcgtaggcttctcaagcacaaatgttaacaatatggcccattcgtttcccttaattggatccatgccattgtaaatatgccatattggaaaaatgccactactattcatgaaatcgggtatgtcggagatatgggcccgggggtatgtggagtagaggagaattattttccttccggccacgtgactccgcaggttggccccactcgcgcgccacgcgagtcgtagaagcgcgggaggggggggcctcggggcatgacgtcaccccctcgggctctcccgcggcttcgccccgaggccctcgctcggctgccgcgcggcagagagagagagagagcaagaagggagcgcaggctgaatagccataaatgtgcgacgccccaactgtccctcaccgcatttaatgcggtcaggacagacgtgcggcgcgcctagctaacccctgtccatcgggtatgaccggtttgtgaccggcccgtctccgtcccatccgatggataaggcaatcatgtcctcatgtcgcccttgtccccggcggagtgggggtgggtatgacccgtcacatccggacgctactcgaggaagggctgttgcatgtcatcgttcatttataagggaatgacagggctgacccccgtgtcaggggggacggcgccgagttccgcgcaagaatcggttattggttagcttccgagagaaggcacggtttgaaacccaaaaaggtggagtggggtttccccccccccccatggaggggaagtagaggtggcacatgtggtatccccttaagctataaaaggaggaccctgcccacctaggaaagaaaaggaggggggagagggccaaaaaaagaaaaagaaaacccgaactccagaagagaggaagcaagtgcgctctctcaaggaaaaaaaacccttgtaaaactcatccataatcccaaacacaggagtagggtgttacgctcaatagcggcccgaacctgtataatccgactgcgtgcattcactcctgagagtcgtagggacgagcaagcgactaacgagagacgagcctccggccgaactcacgaaaggagggtctcacgactccccgctattgagggtcttccctcgacagggtagataccactgaaatcttctaaaattagaaccatgacactccatcacgttttccgtcatttttgtcacattttctgtcacggtgccttcatctccttgtcgtcttcatctccaagcagcgtcgaaggaggacgagggcacgacggcgatggggaagggacaagagggcaggagagctcctcggcgagggcggcggcgagcaggacacgcaccccgccgctcgatggtactgctgctcactcgccgctcgtcgtcttcgcctctgggctttagcctacgccaaaggaggaggagggcacgacggcgatggggaaggggcgggacgggtggagagcacctcggcgagggcggctgagagcgggacgcgcaccacgccgctcgcctgtcctgccgctcgtcatcttcgtcttcgtctccaacctgcgccggaggaggaggagagcacaacggcaatggggaaggggtaggacgggacgcgcatcccaccgccgctcgccggtaccgctgctcgttgtcttcgtcttcgtctccaacctgtgccgagggaggaagggggcacgatggcgatggggaaggggcgggacgggtggagagctcctcggcgagggcggcggcaagcgggacgtgcatcccgccactcgctcaccgctcgtcgtcttcgtctgggctctagcctgcaccggaggaggaggtgggtgcaacggcaatggggaaggggcgggagggcatgagagctcctcggcgagtgggacacgcatcccgccactcgctcaccgtttgtcgtcttcgtctgggctccagcctgcgccagagaagaaagtgggcgcgacggcgatgaggaaggggcaggagggcatgagagctcctcggcaagggcagcggcgagcagaacgcccatcccgcagcttgctggtcccacctctcgctcgccgctcgtcgtctttgtcttcgtctccagcctgtgccggaggagacagagggaacgatgcgatggggaaggggcggagcaggaggagagctcgtcggtgagggcggcggcaagcgggatgcgcatcccgccgcttgctggtcccaccgctcgccagtacggccgctcgctcgccacgcatcttgctcgtcttcgtctctctagcgtacgccggagaaggagggcacgacagcggatggggaagggatgtggatcttacgaggatgacagaaaagtgaacggcgaagaaatgattataattttacaaaatttcagtagcaccaagtggatatcacgaattgtagtggcgtttttctgatttgacacatttgtagtggcatggattcaattaacccttgtttttctacactgattgactcaacacccaacagcttgcattaactcaaaaaggaagttccttctttatccagagtcctagtactagagcactaaattgcacactaagcgacaaacctgcaccgatgagaatataactctcttaaataaactaattaaagaacataaagaaactcgaacacttactttgacaaaagaaccatctgtcgaggtacaagcgagagaagatggctgacaattccgactttcttcgaaactccgttgcaagaatgttaacactccggcactccttcgtgaaattcttggaggaactttgatattttggagaattccttctagagcttcccttcactctctactaagccaacatactaaatattaaactacaagtgagctatactctagttgagctcaagttgtgtgtgttgaaggtgcatgagctcctccttttatagcctctatatgacggttgtaacagttatccaggccgagaatcgggcataaccatcattggaaagccatttgggacctagacatggaaggctaggatgagatgcgccagaggtggttcagctgaaccaggggttcgggtgacccctgggctccacctcctagtcttctctgttgactaggagactgattggtgggcccttatcgcggttaggatggtttggccccactttaagtcggtttcatttgtcaggtgggccctctaatcctggtactcgtgcatgattggttggagggtcattttcatcgcatgactagtgtattttctcattaaatgacctgcatacatatatttactaaaactattggaagtgattagtagtaaactactacgattaagttttgataatatatttgatatcttttatgcatgaattaatacctaaagtttgcacttaacgaccgttaacagccaaatggactgtagatttgaaacacatttatctcttttattataaaaatatagaataatagcatccatccatattttgccttttatagaagaaaacgtaaaatctataacgagaggcctcttgatctggtcttacgcagtgatacctggcgcggccatccgatttagtcgagaagcatcagagtttagaatttgagagaagcatcagaatgttaggcatccatgtcttttttcccttcttataaaattttctctcaaattacttatccggtctacaatccgattacaccattgtgttcgttgcaattaaatctttacaacaagatctaacatgattatattatgatgaaaacttacaaattacttttataattgttgatgtaaaaacacgaggcctgggaggatctgcttaactccagtgcaggtccaaaacttgcctttgggtgtgtgagcgtgccagttgatttgatcctacaatcaacaggaaactaagacaaagaaaatcgcggttaaatccataaacgatagccgatcggctaagtgccgatgagatatcatttatccttgagccgacgtcatatttgcatcgatcggcagtcattaagaaataaaaagaactaaatctactcgatcggctgcagatattaacaatatataatccttagatcgatatatacttaaatcaagtgattgggatagatcggtcgtcatgccgagacagtataaatcacttagatcgaaatatatactaataatgagattatatgtgttcatagcatagccgatcagatagatctagcatgtatcggctaatactccgatactactctatattaggatattaaagcgagtagaatatatcaaacaaaaagcctaatatacttaaatgcaacgagatcttaacataaagggcaaatttaacatgtcaaagaagcatgtaggataaatgtagttaaatcagataagatcggctgaaaccccaatactaccctaatcagcaaccaaagacaggctagagattaagattctaatcacgactcataagatcaaactcaactgatgaagctataagtatgaaaagaaggacaatatctagacaatcaagtcgtcggatatgtcatagagtggtagatatcctatataatctaagtcaacatcggtatttaacctaatcggctgccttctagtaacaattgttagccgattgtaggttagatagcgatattgccggagattatataagatatatgataactcgtcgaattacataaacaagattagagtatcatgaagatggaagcactaatctcgagaacgcaagccaccataacaagttttacctcttgttgaagatcgaaaccgatgcagctcaacctaaaagtaagaactcgtcgaaacaaaacgaaaataaaagggtggcgatgcgccgagattgtattgaacgtgtgttagtttgattacatggggctttgatctatttatacccgagaattacaaaatatgttcatatcggacacgactcttatctctaacaaactctaagataccataagtctttgcagtagacttttacctaaacatatctctaaggaaattacataaaatatactaactaatagatacaattgccttctcaggactctatccatgcgtggcaatcgtcatgaagcacgtcaacctaaaccgacaacatatgttgtgtcatattgtcggattcggctcaatcggctaaccccgtccgactcgaactctgctgatcttagtcgtagccgattcggacttcagccgatcttcactctgtttccgggacaatctctatctcgattcctccttcacatctgatccttggattaccaaattgggtcgttaacaataatatatctaaattacttttggatatcactaaattacttcttagacatacaaaagtaaatttaataaagtttaaatgtaatttacatatattatagaagtaacttcagacaaaacgaaagtaactttgtcataacattaggggtaattccattgtagggataaaaacataactctatctagaaactaaattaatcagcacaaattacggaattgactgaaaacaataataggtagtcacctcgtagcattatgaatgtataggaagtaatttaatcaaatctaaaagtactatacacacacacacacacacatatatatatatatatatgtatatatatgtgtgtgtgtgtgtgtgtatagccaataagagagcgccagtatgcatgcttatggatggacccagagagcagcttaatagagagaagtagaagtaagggcgctaagctgaaggaaaaggctgaatgctcctaagaaacacctgacctcaggtgcttttttctcttgccttctggatggttctaaagtagtgaacagcttccgaccattatgaccttttattgaatttttgattttgtggttcgataggaccagggagaggaccctgatcaccttgccaacgaattcaaggccttagaaaaatcatcctacaatggaccatagggactgagaacgaagaagacatcaaaatcaggttaggggggctttcacttcgacacgtcttcgttcgtgatcacttagagccccttttccatcaataggtactcccaaggcgtcgaccacacggcctaacatggcctttcccacaggaagcagtgcagttgccttctttctttgttcacctacattttcttgttctttattgaattggatttgactgaggacatcgttgtctaagcgtgcttactttgcgcaccggcacagctgaatgagaatccgctggctcagattgagtggctcactttcttgagaagggctttctattcgaggatttccaagagcagattgaaatctgtgttatggtttcagggtttgtcaaccaagtgcaggagggcgggtctcgctgccggatcaatgcgcaggacacacgatctacaaagctagaatttccaatagtgagaccagcttgacaagctacctttcctcttgatctgaggtgcgaagagaaacatctcttttttatgacttccacttctcgatcccggcccggaaaagtgaccgacccgaatgaaaaataagacctttgtgaccgtgacagatgctagggggaataaaaagactggggcctccgcaggtgggattgaagaaagggatttagccttttcaaaaaagaagctctgtcgctctcctagttgctaaagaatccggagctctctacgcattcagtagaagaagagtactccccttcataatgcttccttcttcaagtctttcgctagtgaagttgggggtagcattttacttttgttaagtcatggactggtttcttcagccctttttctatgtgttaaaaaaaggtgggggtcaaggtgtataatacgagctccactttcaggcaatgagctagcttaaccctgattgcttaaggtttaatacagttggataagggtgccagtgaagaaatcaagagaatatgctttgtgtggtcacaggaacaatcggcggtcgtagcatgaaaaaaagagtaccttcattttacagcatatagaggtattagggaaaacaacccggtggggtaaagtcgtcaagtggactatggttccaaccaagattattattcacgcacctacgatccctttcttaaagaaaagaattattacttgctaatcttcccctctaacgcgggccgggccgggcttaggcgactggggaagctgaggagagatggggaaacccaactgctgccggtcgggacggacaggaaaggggcggggttatcggagtgatcggggtgatggtgatagttgatccgtaactggtgatgaaccgcaaaggtttttggttagttgaccctgttaaccgtaaagaaaaggagacgaatattggttgccggatgctattcacatgttaaagcacaaaaggtacctcaaagtttatagttctaagctgaagaaatagcctgagtcaacttatcttctttacaacctccaaacaaacgatttaggaaatggaaattggaacatgaacgagaacatactttcgaattgtggtaggggcgaacccatccgggcgggtggaagccgtaagtatcctatttttggaatggaatttcagtaaagtcttttttttctgctttatccttctctcaatcaaagaaacaccaatttcttattccccccctttttcctcaaaatttctaactggtaaagctcctcagaaattgcttttaggaaagatgcgtgttcggccgcataagccagataagaggcgaaccgtcaggtccttagtagcgttgacaaagaagaagagctgttgaaaaaaaagaaagctcgaatgaaactatccatggaatcgtgcgccgtgtgaaacatacagatggttgaggagacgaatcatgaaggaggattgtgcgactccacagaagagtacgcgcgctagaaaaggcagccagcttaaaaacgctaagagtattcatgctctaggttggtctcccgcgtaggactcgaaacgacaagaataaaccaagttatgagcttttggttgagtcgagggtgtattattacccgtttcactgacatctgccttcccttctctggagcagtactgaagtttaggactacccagtaggatgcacctaagcaatggttaggagagagaatcaatgtttagtagtaggcccagttcaccaggttctaccactgttcggcccaatcatagtcaaaatctgagtttgcgaacaaccatctaaccgtcagtctgaactcccagtccatcagtaagagaaagcttccgtttccatcattcagcagtggaatgtctatcgatcaaattattggacccgtgctggatgccacttttcccccgggcaagttaccttccaggggagttcccttgctcctgctgcgtacaattagccagttctctaattctacttgagtgaggaagaccttttgtggctagacctctattttccatatagtcagctgacttgcccgcagcggatccggaaggacccgcttcactaggcccgggccctggtggtgactatggaaggattccgtggtagtctctgactccctccaactcaatcaagcaaaatgatcagcagtctcatttatgctatgcctcacaggaagaaacccgggaccagggcatgtcgtgaaagacgcacacggggcgggcgtgcttcatggaagagtttggggtccaaagccacaccttctttctcccataggaacagaggtcaggagatgccggcagggcgctgcttttaatttgactgatggctcaaagtcaggataacgagcgcggagcccgcttggcaggcggcaggagctgcgggcaagtgcttgcttccggcgtcggcttgtagtctctgcagtcggcacactcacgcgcccgccactaccctttgatagatagcaagcagctcctataacttgatcgacaggacccaaccaactaaactattgattgtggcaaagcttggagaggttgaccttccttggtaaaagagcttcattagtacctttaataatagcaatggcagcggctttggatctaggaaaatgagggggggcatcatccgcatcaagggctctctcatctcctatttgtttgagccattcattatggtggtggtgccggggaggcagctgtaggaggtgagaagggccctgactccgtcccaaacagtgtactactatcggccctaatccaagccaaagcaccggataactcttactgaaggatagacgaagagaaccggttgggttgacacctggtgatgttagaaagaagacaagtgcttataaggaaccccaaggtgagcttatagctcttgaatcttatctcaacgaaaaaagtgctctctgaaccgaacatgaaagttgttttccatcagacggctattcacgtaactccactctcggcttggatagtcctccccatagtacagatgttttcccttctatcttgttgctccacctcctcctgtatctactattggttgactgaaaataaaccaaaagcaagggtggttgcactagctagccactctcttcgtagagaaaataaaagcagctgctggataaaaaatagtgttttttcgaatctagagctgtttggcgttccaatccagttccaacaatgcacttctcggctccgaggtgtggccgggtgagcagtctacggaacgtttcactgcctggcctcccgggtttctgagtgctctcactacgtttgatgatgaaatctagacttttcgcacatcttcagataaagcccaagtaggacaaagaaatgcaagtaaagacgcattttctacgggatcccgaaatcaccagccaccccgacctaattcatgatgagcccaccaacttcctggcgaattgtgcataagcatagcatttctggtcgaaccaccgaaccacacatctttttttggtgggagggtaccataataataaatagagtcaatggtgacagagccgtgggaagagcctcttcttttttgctgcgggggcttccattcaccagcgcagacaccgcaaccgagaaaagaatgcatgttcggcatttttggtcttcacattgctccgagaagcttcttttagttagccaagcgggtcatgtggataggtcaagagatgcgtaaacgtgcccaacaaggggtcgggagtgctactagggacgatcagagttctggggccagaggaaggggaacaaaaggtagaatatgcgggttatcgtagaatagaagcgagtcgcttccggcgttggcttgtagtctctgtagtcgggtcacacgacaggtgcacgatcgactttgtacactccatccttcggcccttcgcctataggtggcttggcgggcaagctaccttaaccctgctttcacgtggcgaatcggtatgtgatcactttacggtaggccaaattggcgtattaccaaaccacgcccccattaacacagcccgaacccccctccgagaaccgtatatgagaatttcatctcgtacggctctgacacaaataatcgaccttcctggtacagtgagactagtggatctgatggcacatgcgctacgagtggagtcatatgagcctcattcctgagttctcgcttcgccccttctcccacttggcaggcttggtatcatgtcgattgctcaaccgtacttttgctatcttacgtagagctgaattaggttttttcggtagtagaaatggggtagtgcattgaccttactcagtttattagtgcgcttgcttgcagagagtcacctctgtcccttcatctttatgaaaggaatcaaggcccagcccggctcgcgaacagtaatgaaatgtctctgaatctggtatccaaacgttgtaccattttgggcactccttgattatggcataaatctcaaccggtggtagcagacagaggggcgctcccgcttaggcattaggcacgagaaaggacatcgttctcggccgtcccttagtttacttgttcttttcttagcactttatcgaagatactataaatattcagggatatttactgtatcataaatatgatctatcaaaggaggaaaatccaagcgaaaaaaccatgttccaataacgtcaccaatatgagcatatcagtgattaccagctcctaagattcgatcggtccaaaaggcacatttgcacctaatcaactgaagcagatgcaggatccgaagtattcgactccggtccggctcagacgaaccgagggatca

SEQ ID NO: 10064 - DNA, 18457 bp, Oryza sativa
agcacagcattaagagtgctttcgattaaaacggcaacatcctaacagatgtacctaccaaaacaatatgcccggtgaaagaattctcaagcccacgcaatggttatccaatatctcggggaaaaaaattctcaagccccaataaaggttatttgtgtttcctcttttgtcttgtaaataacattttgattcactttcataaaattatacgatgatcagaaaaaggcagtcaattttgtcttgtaggaatgtacgtaaacgatgatcagaaaaaggcagtcaatttacacacttctccaatccgtttgcaccagacagctgcaagcattctgcagcatcttctgatgaaagccccttgtgaaatgtattcagctcctcaaaaacatctataaggggaagattcacctgttattatatgccctcacaaagcacagcattaagagtgctttcgatgaaaacggcaacatcctaacagatgtacctaccaaaacaatatgcccggtgaaagaattctcaagcccacgcaatggttatccaatatctcggggaaaaaaattctcaagccccaataaaggttatttgtgtttcttcttttgtcttgtaaataacattttgattcactttcataaaattatactgtggacaaatgtctgatagttttcctaaaaaaaggttatccgcgttagtccaaggtttgggttctatgaccggcggactggatccaccagcaacctatggactagcaggtggtgtccgtcttggcgccgaggggactgtggtggtgattaacaaagagtggggctcgggcgaggcacaattttcgtctgcggaggcatgtggacaacgacaacaccgtaaatcaccaattgaaaatattaaaacttaataatcagataggttacctcatgactatatgtttcagaaccagccaaagtctacagcatgccaaagtatacaaaagtctatgccttgcatatgttatggtctctggtcacctgaaatgtagatattaccagaagattattaccggttgtagaccatgcaaaagtctaagatgcaattgaaaggtcaatcctgagagaaaatgtagaaaattattagggcaccgcatcattctgaatttaagtcttccaaacacatataatttgtgatgaactgaagcagcacatttcctctaaaagtcatagaagtgtggataaatcgacatcaaactctagtcgacagaaggttttttttgtctacaccggaagatgatagtcaaagtgtcaggaaaagctccattatgaagtaatattatagcctaatctcaaacaatcaaagcagttttgtagtttttttttgttcgatatgctttaaaaactattcagatcaaatgaaatcaatttgtttcgtaatgcactcaacacaataaacacaaataatcagctgattatagttggaactgcaattgttttcctcaacaaaattagtgtgcactctcattaggaactaaagtacaatcagtagtgctgctaaataggacagcaggagaccaaaatttggtgctgctaactggaaagcgaattacatatacatggagctagcagtactcacgattcaattcctcaattaccccattgcatgccttgccatcactacaagaaatatgatcttctgtgacgaattcctcgtgacatcggagctcttcgtcattagcacattccattttatgacgattagtatgagatgaggatggcttagtgacgaaaaaaatgtgttcgtcattaacaccaactagaaatcgtcataaagtatttcaatgggacattgtgacgaatattaatttgtcatagatatatataatgcatttcttgaaaaaaatatactccctctatcccataatataaggcgcggtaaaagctggcacggtctccaaaactaatatttagcttataatttctcatatactataagatttatagcaacaaaactataatcatatgaaagtaaatttaaatatcaatctaatgatataatttttaacaaataaaatattttatattatactaagtgttggccaaatgtttaaaagttgaatcttgaaatatgtgcacaccttacattatgggatggatggagtattaaaagttaacgcaatttaatcaagtgaattaatgaggaaactaaaattttcctttaaaaatcatggacggaaatattttttgtaatattttacgtggtctaaattattattttaaatttttcgtgaattttcagagctcaataactaattttaataccacaaaacttatttaacctattaaaataaatagaaaacaaattaaaattcctctctatgtacttgggcctttttcagcccaagtattactctatccctccctcagcccgcagcctatctctccctcttcctccctcttcgggccgccggcccagcctttttgctacccctcgccgaaaagtccattttacctccctcctctaaattcaaataacttttcaggtagcaaagatttcaaatgaaaaaattgtcaataataattgtataacttatcaagatctacaacttttttttggtcatttttctatatgactttgtttcaataatttgaatttgaatttcaaattatgacaacttcaaacatcactttcaaatactaaatgatttcaattgaaaaagtcatcaacaacaaagttgtataactcatcaatatctataagttttatttttgtcattttgctatatgactttgtttcgataatttgaatttgaatttcaaattatgacaactttaaacaacattttcaaatactaaacaacctcaactgaaaaagtcatcaacaacaaagttgtataactcattaataactataacttttattttggtcatttattcatccgataaagtgatagtaacattgttcacaaaatttacacacctctcttataatttatgaaaccatatggaagatttgtaaaatttatgaacaatgttaaaaaatactttatcagatgaacaaatgaccaaaataagaattgtagatctagatggattatacaactttgttgttgatgacttttttcagttgaagtcgttcactaataaaattttctatttgaagttctcaaactttgaatttcaaatttcaaattgtttaaatagagttagattgaggaattaccaaaatagaaattttggttcttgatgagttctacaactttaatttaggtgacttttccatttgaaatcatttattaaccccaatttttgttcgaagttgtcaaattctaaaaattcaaaatttgaattgttcaaatgaacttatttgtaaaaaagaccaatacaatagttgtagatctcgatgagttctaaaattttgttgtttgtgatttttgcatttgaaacataaaaagcagcctaaaattaaatttgatgttgttcataaattaaaattaaaaataccataagatcattcatgtttaggcccaaatggcccaactatttctgaccgtccatctccgatctaatagttctcatcgccatccctaaccttagccccatataaaaccctcctctccacccctcccccctctctctctctccaccctcagccgccacactaccatccattctcctctactctcctctcctctcctctcctctcctctccggcttactccccccctcaccgcttaccgcgccgcctccgtctctgccgctgccaggctcgggagcggcggatctgccgccgacagcgccggcatccgtctccgcctcttcacggcggcgtctgagccggggcaggtatccctcccattccctcacctcccctctcacctctcctctctcggcgcggattccggccggagcagctgccggagggcggtggcggcggcggctccaggcggttcctgcgcggaaggtggaggcggcggcggtggcggctcccctccctcctcccagatccggtggaggcggcggcggctcccctcccgcccgtgtacctcccgcgccagcccgccgcgcccctgctcctcgcgctcgacatcggctcgcgggttttcctcgctctctcacgcgcgaagtagttcggtcgtggtggagggatggactcgtgggttttttttctttttgttcgcagggactctgataaagctggtgtacacggcgagctgcggtggcggaggcgcggagctgcggtttgccaagttcgagaggcggaggctgcaggagtgttttgacttcgtcagggcgcagggtctcgtcccccctcaccgcttccccagtgtagcatcaccaccatggcgacgcagcggaggcacgcggctgtggcatggacacctactaccgccgccacctctccgggcagcagccgggagtacatgaaggccaaatgcagcatgtaatgcgctgatttaaacacgtacgaaaaggctaattctgcacaatatctttccttttcttatatggtacatgaattattcattatcccaaaatatttgtaaatgctatgtgcagattataaaagctgttctgtaggaggaaaatcattcttgaagattgagtatcatgaattcctacatctagacagtctcgatgttatataaagaactgtataatttggtaagtactgatacaatgaatgtcagtgattcccatgtagcagataactgcaataacccttcaatcaaatctgggatgaaacgtgtagttgggaattattgccatgttgattagtcctatttctgatggtgtcgaaccaagcagtacaactgtagaagtagtagctttgcttacagagttggatatgctaagcattacaaatgcataggtggctagaatattagttcatttcatggaaagtaattgtacatgtagagcttacaattgtatcctgatctgaatgattattggtgtgtctgcaattgtacatgtagagcttccaattgttaaaatttagaccatcatgtcatagaattgcttaaggtgacataaattcagtaggaccctcattcttgatgattttgggttgtcatgcatcaaaggaaccttcaggaagtttcaaaaagtcccacataattgggttattactaaatggagctgctattgcttctctctttgaagttatcatgctaattaaggcaagggcacttatgagatgtatgtgtttgtgtaatacatgaaattgtacctcttcagttctgtagttacgcagccaatggcgcagcgagcttgtttttttatgatgaaatggctagcttcggtagctgatttagagttttgcagcagcaaaataaaacgtgatagctgaaggaaaatcttggatttatggtagtattcatgcacatcaactggcattagacaatctcacattttgcttgcttaatttacacataatcaaagcttaattctatatataacatcaggattttgttgtgcctaagtaacacctcttttgctatggatagatgaatcggaagcaacaaggaagcatatgcccttttgtcgtttgattggccgcaacactcaggtcagcctcaataaggtttttgtctattctcttaatgttaccttgctaattcaagatcttttgattcgtgtgatttggatatgactttgcttaggtcaatgtgtgaacggctatttggcatttggctggatttggtggtcagtgacttgtactagtgatgtattatatctggtcagtgaacctgtgatgtaattgaacatgctttggatagtgatttgtggatgtaattagctgacttgtcatgtaactgatttacggataacctgtgatcttttttttttctgaatttatgatagcctgttttgtgattatgtattaaatgtgagctgaattttgttaattgggctataagatgtcagatttagattttaattgggctaattctgtttgatatatgggctttttgagtgtgcatggctgtcacaccctgaagttcttctctcaagcctaaattgaatttataaatggtcctaagaaaataccggtgtaaaagcaagagtgaaaccctaaaggaacaagagtgaaaccctaaaggaattaatgtaaataataatcggaattagcatgtggaatttttcttgagttttacatgtcgaaatacgctaacaagatttttagtgaaatttcagagctctaagaaataattttaaccaattaaaaatgagcacaagcaatttttaattccctggaaattcttttcctcctttttctttcttttttcccttcctttttctttttgggatgggccgccggcccattctctccttccctcctttttcccgctgggccggccgacagaaccggtcgcccgacttcctctcccggggtcgccgacaggtggggcccacctgtcgggtcctcccccaacctctagccgccgccaccgcgctccgcaaccgccgccgcgcccacgctcccgcctcctccgggccacgtcggccacgcccgcgcgtgcgcccgcgtctcccgcgcccactccctctctctcccgcccgcgcccgcgctcgagacgacgggattcgattttcgaatcccgcctctctctcctctcccacttcccccacgtcggccggccattcccgcctctcccggccacatccgagctccctttcccctatttaagcatccccactctcccctctctctttttccccattttgccaagcttccccgtgccctctatcgccctagcgccgtcgccctcctctccgccgccgccatcgccgctccggtcgccgctagccgccgtgctgagccgcgccgttgcgttcgccgttgtgcgggccgtcccgtccacccctcctccgtcggaatccactaccggaatccactccatgccgtgcgccggtgagcaccgccatggccgccgcctttggccggcgtcctcgccctctcccattttcctctctccctttaatccctctcatcttgttcgctaggtggttccagagctcgtcccgccatcgccgtcgccctccgtcgctcgccgtcgccgatcgtcgccggtgaggcccctcctcccctttctccctctctcccgcgccgcttagccgccgcgccgccgcctaaccgcttagccaccgctatcgccacccgcgtcgccgcgacgccgtcgtcttccgccgcgggccggtcgccgctgtgtgcgcgccgcgccgccgcgcgccatggccgccgggccggcttgagccgtgcccgcgcgcgccggccgcgagccgcatccgccgtccgatctaccgggcggtagatcggggccgtccgttcggccgcccgcgtggctgccgcgtcggcgccacgtcagcgccacgtggtgcgccgccccttacccggtccgtggactccgtccaccgtgaaccgccctccccgagtcactgccatgtggggcccgcatgtcggcgccacccctctctctctcccgggatttatttattgcgcaataattcaattaacgatttttctgtttatagtaaaaacgcagtgaatcttcgaaaattcatatctaattcatccgagctccgtttaagcccattcaagtctcagtaaatcaagaaaaatgtgtagaatccatcaaaaatggttttgttctctatttcaatagtcttatagcctgtttttattgtttgctttgtatgtcgcttagattccggctctcccgacgctccggtgtactttgaaatagtcgccgaggttcctccagcagcagagcaaggcaagtcatgcttgtcacttgaacatgttgatcctatattgcaaatggtctattgttttccttcaaatactgcattgttttgcaataatactatgtaatgtttacctactgttatagccatgctattcttgtaccatgctcctttgttagcttgggatgtgacatgactagatgttggaccagggattgcttagccatgcttagttcaactagcacacaatgggggaaatcatattaatgtatagactgtaggttctagtgttaatgttggattagtgccaccgtcctggtgttgcttaattaaaataaatcatatggtgggctgtgggtgcatggttttgctggtcgcgcccatggcatttaaggaccggttcgcgggatgccgtggaagaacttatcgtacttaccacaatccagcgtgggcaacggctgggcttgtagtgtagctttcctctagctgacgcatccaggcaagggtgggcgtgatggagtttggatgggccctgcgacggcctatgcggcttccggattcacctaggcacgagaggggactgcccgctgccttgcgaggagtgggggtgaaacctgaggtgtggtgtgcttggttagagggggttatgcgaagggtcctgtcacggcctctattcgttatgtcatggtggcatgtcggcgcacggaaacgtgtcgtggggctgtgtcttgtggatacagttgtacacctctgatcagagtaaaactattcgaatagtcgtgcccgcggttctaggcggtcaaccagattcaccgtgattagtctcaccctagtctagtataatggaattgaatagtctaggtggatggttgggcctgttgcaacgtggtgtagcgttggacagtggatggttaatattgattaattactacaactgtttttctgctttcaactactgtttataaatgctcgctttatgcaaaagaacctctatagctatcctttgataattccctacatcatacccctactccggtatgacttgctgagtacggtgattgtactcagtcttgctctattttccccaaaccccagagtttgagtatgcgtcagatagttgtttctccgaggagtaggctccgtccgtgccgtcgaggatgcctgtggagtggtgttcccgctgcagtccaagtcgaggcttagctccaattgccttttaattttccgctgcatttatgtaagacttttataatgtttgtaagacatggatctgtatgtcaactttatcgtttgtgtatcccggccggtcctggatggggattctaatgcacattctgcttggaattctattcgggaatttctgggcgtgacaagttggtatcagagccgaccttgaccgtaggacaagccaaatggaaaaacctaagagccctctgaatccttttcattgcatatattctttgcaattggatttgttccaggaaaattaggatctattcttgtggttcaagggaaaaatcttggtcgctagtttaagtgagatttgtcaaatcaagtcagtctagggttttagtaaaattatttgagatttatttgacagtcagtcgggatttgatgggaagaatgcattaggtcctaactcaggaatatgggttgctaggtatttatgctcttattgttattattagtaagtatataatttctcattatttgatcgctatgtaagtctgtcttatttattcgctctcatgcaaaatgatctatgcataaaattccgctcttactcgcttattttatttgagtcctttacagctttatttaaattggatttgagcatgcattgatcctacccctttgtcttctctagatggccgaccacccacccaaccaccgcggagaaggcgtggacgactttgtggcagagttggctcacatgaccctagtggtgggctaccccaacacgccagagtactcgactgttccgccgctcagtggcgagtttcctcaccgtgttcgtctggaggttcatggctatgtgggcacctgcctcgctaacatggtggttgaagcatctggaggcaccgcagatcacgcctgtcaagaggcagcatatcggatgatggccagacttcgtgggcgccacaactacatcttctgcaacacggcgtactatttccaccctcgccgagcaagtggtgacgatgtcaacacctttcgcctgacagccggtgagaacgacaccaccttcagtcacatgtgcgccgtgatgaggggaatggacaggatgcactcggatctgcacaagatgtccaaggccttgaatgatgggaagctcgtgaggatcatagctttgaaggatgagatagcacgcctgaagaaggagaacgctcagttgaagggcctcccagcgctaggaggagtccggatccgcaccacgccccgcaagtcgacgactacacccgtgcgcattcagcttgcgcccaggaaccgacctccgcccgcagctcccgcagctcctccagttccgcccacagctcccgcagttccagcagttcccgtagctccagctccagtcccggctcccgtccctgtgtcagctcccgcgtccgctctctccttcgctccagcatcagtcgccaggggtccagccggtggcaatggaggttggttgcctgctactcccagtggcagctgcgaccacagcagcagcagttccagtggcacagagccgggcagcggcgagacatatctgcaagactccaggagccgctcagagggacctggtgacgagcaggaggacgccttcgactccatcgaccgcaggagccgttccgagcattaggctcgctttcccttagtttaccgactgcttagtatttgtctattagtttgagtgtttaggtctgttcgcttgggggtcagtcgacggtcgatatcatgtgcctatgatatggctatcttaataaggatttgcttgctgttttaagtgttttaattcagatcagaacaattgcagtttaaattcctatataataaagcttagttcctgagcatctgtttttcttcttttccaccccctccgtctgctctccctccagatggtcaacaccaggaatggcagccgtgcagtaggtgagggcagcaacggcgaagaacgcaccgacggtgggcatcccaacagcgcctctggccacggtccaccaccactccccgagaacccgacgctcgcacaagtgatggcccatcagactcagatgatggcggccatgatgcagcagatgcagcagcagcaccagcagatgcaccagaggatgcagcagcaagccgagcagcagcagtttggtccccctccccctcagtccaagctaccagagtttctatgcgtcaggctacccactttctctagcaccaccaaccccatggaggtgaatgactggctccatgccataaagaagaagctaaaccttctgcaatgtaatgatcaggagaaggtcgcctttgccacacaccagctccagggccccgcgtcagcttggtgggacaatcacatggctacccgcccgccaggtacagaagtcacttgggcggagttctgtcgcagcttcaggaaggtgcaggtgccagacggggttgtggcacaggagaagagggaattccggatactccaccagggcaacaggacagtgactgagtatctccatgagttcaatcgtctagcgcgatattcaccggaggatgtccgcaccgacgccgagaagcaggagaagttcctagcaggcctggatgacgagctgaccaaccagttaatctctagagactatgccgactttgagaagctggttgacaaggcaatctgtcaggaggatcagcgcaacaaaatggacaggaagagaaaggcagcgcagttccggtccaaccaaggaagccaccagcgcccgcgcttcactcccggacagcagggtggacctaccaccatgatcgtccgccagcatcgccctttcaactcgagcagcttccaccagggcgccagtggcagccagaatcaccagggaagtcagcccaaccgcagtgcagctccgcgcctgccaatggcaccagcatagtcagctccatcagcccaagccaagaaggagactggagcaaagccaaggtcctgtttcaactgtggcgagcatggtcactttgctgacaagtgccctaagctaaggcgtgccgggccaaggtttgcccaagctcgtgccaaccacgcgtccgcagaagaggcgcaagcagcaccagaggtcgtactgggtacgtttcctattaactcaatccctacaaccgtacttttcgattctggtgcaacgcattcgttcatttcaaagaagtttgttgggatgcatgggttaagaaaagaagagattagtacactaatgagggttcataccccgggaaatagttcaacctcgatcagttatagcccttcagtgctaatagaaatacaccgatcacgatttctagccaacctcatccttcttgaatccaaagatctagatgtcatccttgggatggattggctgaccaagttcaagggagtcattgattgtgcgaatcgcacagtcaccttgaccaatgagaagggagaaactgtggtgtacaagtcactagtctcaccgaagcaaggaatctccttaaatcagattgaggtggaaaaccttgtggccaccgaggagaagagttcgcggaaattggaagatatccccatagtctgcgagtatccagaagtgttccccgaagacctcactaccatgccacccaagagagagattgaattccgggttgatttggcaccggggaccactccaatttacaagagatcgtacaggatggcagccaatgagctagcagaggtcaagaagcaggttgatgagcaactgcagaaagggtacattcgaccaagtacttcaccttggggtggtcggtcatttttgtgaagaagaaggacaggacgaagagaatgtgtgttgattatcgcgcactcaatgaggtcacaatcaagaacaaatatcctttaccgcggcttgatgatttgtttgatcagctgaaaggagctaaagtgttttctaagatagacctgcgatcaggctatcaccagttgagaattcgggaagaggatatccccaagacagccttcaccactcggtatgggttgtatgagtgcatggttatgtcttttggacttaccaacgcacctgcattcttcatgaacccgatgaacaaggtgttcatggaatttctggataagtttgttgtggtattcattgacgacatactcatctattcaaaatctgaagaagaatatgagcaacatctccgtctggtactcgagaagttgaaggagcaccaattatatgccaagttcagcaagtgtgacttctggttgtcggaagtcaagtttctgggtcacgtcattacagctcagggcgtggtagtcgatccatcgaatgtggagtcagttaccaagtggaccccacctaagaccgtgtcacagattcggagttttcttggacttgcgggttgttaccgtcggttcattgaaaatttctccaggattgccagacctatgacttagttgcttaagaaagacgagaaatttaaatagacggccgagtgtgacaagagttttgaggaactcaagaagagattagtgtctgctccagttctgattctgcccgaccaaacaaaggacttccaggtctactgtgatgcgtcccgccacgagcttggatgtgttctaatgcaagagggcagagtggtcgcttatgcctcgtggcagttgcgtccacatgaagggaactatccaacgcatgacctggaattggtagcggtggttcatgctttgaaaatctggaggcactatctgattggcaaccgctgcgaagtatacacggatcacaagagtctgaaatatatcttcacccaacctgatctaaatctccgacagcgaagatggttggaactaatcaaagattatgacatgagcattcactaccatccgggcaaagccaatgtggtggcatatgcattaagcaggaagagctactgcaatgccttatgcaccgaggacgtgtgtaaggaattgcagcaggagcttgaacggctcaacgtgggaatcgtagaacacgggttcgtagctgctctagaggcacggcctacgctcgtggatcaagtcagagcagctcaagtaaatgatccggagatagctgaactgaaaaaaaaatatgagggtcggaaaagcccgggacttccttgaggatgaacatggcacaatctggatgggagaaagattatgcgtgcctgatgacaaagagctgaaagatctgatactcaccgaggctcatcaggctcaatattccattcatctgggtagtaccaagatgtaccaagatctcaaagaaaaattttggtgggccaacatgaggagggaaatagctaaattcgtcacgctctgcgatgtctgtcagcgagttaaagcagaacaccagagacccgcaggattgttacaacctcttcagatcccggaatggaaatgggaagaaattaaaatggatttcataacaggtctgcccaggacatcatcgggccatgattcaatctgggtagtcgtggattgacttaccaaagttgcttatttcattccagtgcatacttcttatacgggcaaaaggttggcggagctctatctctcgagaatcatgtgtctgcatggagtagccaaaaagatagtatctgattgagggagccaattcacttcaaagttctggcagaaattgcaagaggaattgggaacccggctgaacttcaacacagcctaccacccgcagaccatcccgatggtcagaccgagcgggtcaatcaaatattggaggatatgttaagggcttgtgtgcttgattttggtggaacatggtacaaaagcttgccgtatgcggagttctcttacaacaacagctatcaggccagtctacaaatggcgccgttcgaagcgttgtatggccggaagtgccgcacacctctcttctgggatcaaacaggcgaacgtcaactgtttggaacagaagtgttaacggaagcagaagagaaagtcagaaccgtcagagagaggctgagaattgcccagtttcgacataagagctacgcggacaaccgccgaagggagctcacttttgaagcaggggattacgtgtaccttcgtgttactccgctccggggagtgcaccgtttccagacgaaaggcaagttagcaccacgcttcgtgggaccatacaaaatcttggaacgaagaggagaagttgcttatcagctagaacttccatccaacatgatcggcatccatgacgtgttccatgtgtcccagttaaagaagtgcttgagggtacccgaagaacaagccgattcggagcacatcgacattcaagaagatctgacttatgtggaaaagccggtttgtattcttgagaccagagaaagaagaaccagaaataaggttaccaggttgtacagggttcagtggagccaccactcagaagaagaggcaacttgggaaagggaagatgagttaaaggccgcccatccgcacctcttcgccagctcttccgaatctcggggtcgagattctgtttaaaggggggtaggtttgtcacactctgaagttcttctcccaagcctaaattgaatttataaatggtcccaagaaaataccggtgtaaaagcaagagtgaaaccctaaaggaattaatgtaaataataatcggaattggcatgtggaatttttcttgagttctacatgtcaaaatacgctaacaagatttttaatggaattttcagagctctagaaataattttaaccaattaaaaatgattacaagcaatatttaattccctggaaattcttttcctcctttttctttctttttcccttcctttttcctttcgggatgggccgccggcccattctctccttgccccctttttcccgttgggcccggccgaggcccagctgaaccggccgcccgactccctctctcccggggtcgccgacaggtggggcccacctgtcgggtcctcccccaacctccagccgccgccgccgcgcccacgctcccgcctccttcgggccacatcggccacgtcggccacgcccgcgcgtgcgcccgcgtctcccgcgcccactccctctctctcccgcccacgcccgcgctcgagacggccgggattcgattttcgaatcccgcctctctcccttctcccactacccccacgttggccggcgattcccgcctctcccagccacgtccgagctccctctcccctatttaagcatccccactctcccctctctctttttccccatttcgccaagcttccccttgccctctatcgccctagcgctgtcgccctcctctccaccgccgccgccgccgctccggtcgccactagctgccgctagccgccgtgccgagccgcgccgtcgacgccgtcgtgcgggccgtcccgtccacccctcctccgtcggaatccgccaccggaacccactccacgcttgcccgcccgcgtggctgtcgcgtcagcgccacgtcagcgccacgtggtgcgccaccccttccccggtcgccgccggtcaccgcctcgcgtcgccgctataagcgccatggccgccgggccggcttgagccgtgcccgcgcgcgccggccgcgagccgtatccgccgtccgcggtagatcgaggctgtccgttcggccgcccgcgtggctgccgcgtggccgccgcgtcggcgccacgtcagcgccacatggtgcaccgcgccttccccggtccgtggactcggtccaccgtgaaccgcccccccgagtcactgccatgtggggcccgcatgtcggcgccgcccctctctctctcccgggatttatttattgcgcaataattcaattaaggatttttctgtttatagtaaaaacacagtgaatcttctaaaattcatatctaattcatccgagctccgtttaagcccattcaagtctcagtaaatcaagaaaaatttgtagagtccatcaaaaatggttttgttctctatttcaatagtcttatagcctgtttttattgtttgctttgtatgtcgcttagattccggctctcccgacgctccggtgtactttgaaatagtcgccgaggttcctccagcagcagagcaaggcaagtcatgcttgtcacttgaacatgttgatcctatattgcaaatggtctattgttttccttcaaatactgcattgttttgcaataatactatggaatgtttacctactgttatagccatgctattcttgtaccatgctcctttgttagcttgggatgtgacatgactagatgttggaccagggattgcttagccatgcttagttcaactagcacacaatgggggaaatcatattaatgtatagactgtaggttctaatgttaatgttggattagtgccaccgtcctggtgttgcttaattaaaataaatcatatggtgggctgtgggtgcatggttttactggtcgcgcccatggcatttaaggaccggttcgcgggatgccgtggaagaacttatcgtacttaccacaatccagcgtgggcaacggctgggcttgtagtgtagctttcctctagctgacgcattcaggcaagggtgggcgtgatgaagtttggatgggccctgcgacggcctatgcggcttccggattcacctaggcacgagaggggactgcccgctgccttgcgaggagtgggggtgaaacctgaggtgtggtgtgcttggttagagggggttatgcgaagggtcctgtcacggcctctattcggtatgtcatggtggcatgtcggcgcacgaaaacgtgtcgtggggctgtgtcttgtggatacagttgtacacctctgatcagagtaaaactattcgaatagtcgtgcccgcggttctaggcggtcaaccagattcaccgtgattagtctcaccctagtctagtataatggaattgaatagtctaggtggatggttgggcctgttgcaacgtggtgtagcgttggacagtggatggttaatattgattaattactacaactgtttttctgctttcaactactgtttataaatgctcgctttatgcaaaagaacctctatagctatcctttgataattccctgcatcatacccctattccggtatgacttgctgagtacggtgattgtactcagtcttgctctattttccccaaaccccagagtttgagtatgcgtcagatggttgtttctccgaggagtagactccgtccgtgccgtcgaggatgcctgtggagtggtgttcccgctgcagtccaagtcgaggcttagctccaattgccttttaattttccgctgcatttatgtaagacttttataatatttgtaagacgtggatctgtatgtaaactttgtcgtttatgtacctcggccggtcctggatggggattctaatgcacattctgcttggaattctattcggaaatttctgggcgtgacaatggcctagattcaatttcattgcaatggttgggcctattggcccttttgaatatgtatggcccacttaatatggatggatatagtataattgggctgaatttattaaaatctaattggacttacaataggtctaccccataaacaagttgctcactatatggaccttaatagg

SEQ ID NO: 10065 - DNA, 3598 bp, Oryza sativa
cttctccatccaaccccacttgtttttcatttattgaggggcattaattaaagtatttttcttcttaaccttaacctctacatatcaatataaaaatacttatattttaaaagaaatatagtaatagataattctccttttttttctctcaaaaagacatgcaaggcagcaacaagcagccatatataaatgggaacaagtacacaattaagatgctcggaggaaattaaaccagagataaaccattataaaaaaggaagatatactcccccccttctctctctctatttcaataactgcaacgtcaattctcttccaacattaaccaatgctcccttcgttttatattatcaatcaaactttgagaaagtttgatgaactgatgaagtatataaaaaagcatagcaattggtttcatttcgtataacattgaacatatttttttatattcttatttatgttataaaaactattgctatattttttctataaatttgaaaagcaaggcagaaacaagcagccataaaagggaacaagcaaacaagatgcttgaaggaaattaaaccagagacaaaaacgcgttataaaaagggaagatatactctctctctctctctctcaataactgatgataattttcttgtttctattccctccattttatattataaatcgctttaatttttttttaaaatctaacttcgagaaagtgaaaaaatatagcaattggtttcattatgtctaacattaaacatattttgatatcttttatgttgaaaaaatattgctatgtttttttataaatttggtcaaacctaaagtggtttgacttagaaaaaagttaaaatgatttataacatgaaacagaggtagtattattttttatatactcaaaaccatattgttagattcattttgtatagaactttgtaatagggtagagtttcaaaagtatttgcaaatctgaaaatatcaaagttcaacacagccccatccttttcatatgttccctagaatttcatttgcctcgtataattttttttatttttctactatgtctactatattgattagaccacctactttaagttatttgtgaagtttattagaccacctattttaagttatttgtgattttttttaaaaaatatattaatttatcatgttaataaaataaacaatccgcgtcaataatatgaaaaaaaatgtctcaaacagcgtcaacgttatcggtctattctgatagatatagatatagatagagctagatatacatatgcatatagatagatagatatagatatgcatataagatatatatagatataacaatgtcatatatactgccatctgcaaggtcgtcaccctcggctctacaagactattgcaagagtccaacttttgcacgcatagctagtactaggatcatatagctactaagctacaaatggcgatagtaattttgcttaattaatctagtggccgtcctggactcctggtttgaaaaaagtctagatagctcacaaatgtacgcaagatacatgcatgttacctcactctcaaaaaaatatcattttttatccagctcatatacattaatacaaagagcaattttacggtcattgaggtaccaagaggtaccaaatttacaatagaaaaaatggtacctcatggtacctactcaagaatcgtagaattgctctaatacaaaactaacagactagaatacttttaccaacttttatcaaaatacaatacaataattgtttcaaagtcaaagtttttcttaagacaaacgaattgataaaagatgtggctatttgagattgaggatgttacaatactatggccctgtttctttcagtttgggattattataatctagattattaagtcagattactataagctagattgttataatttatataatttatagtagaataaccgttggttgtttctttcctagattattagagcctagattattgggttttgcaagtctaaagagggagtggggtggcatggtgggtaattttgcacccaataatctggaaaaagctcacctaaatgagcttatcaaattataataagctggactctagattataataagctacttcaataaggcttatttgtttctttcagcttacttcctatatatatatatatatatatatatatatatatatacttttgttattggcgctcacggccttggagattttgtgttgttggcggtaattaggtagatgggctctactaataagaaatcaacgaaggtgcatgcacctcccaaagaggaaacaaatatgaaccagtccagtacttgtactgttcttttttttttccaaaaagggaactgttttgtgttgcttgaatcagtcggctatatatttagctcttattaaatactatctctgtattttaatgtacgacgccgttgattttttatccaatgtttgaccattcgtcttattcaaaaaatttatgtaattatcatttaatttattatgacttgattcatcatcaaaatttatgtaaatattttcatatttgtacaaaaaatttggataaaatgaatggtcaaatgttgataaattctggtggtgggagattggtttgattaattctggtttgtcaagtctagctatgtttattatgtttatgatatcgttttttgagattcctaaaggggttcttcaaaaaattgattattatagatcccgtttcttttggcaaggggatgaacataaaaaaagtatagattgacaagatgagatattatttgtcaaccaaaaaatcagggtggacttggagttcataatttagaaatataaaaccaatgtcgtttaagtaaatggttatttaaattaataaatgagcaaggtgtgtggcaagatttactgaaacgaaaatatcttactggtaaatcaattactcgggttgagaggaaacaaggggattcccatttttggtcaggtctgatgaaggttaagaattcctttttaaatatgggttcctggattattaataatggtgaacaagtaagattctgggaggataagtgactagggaactattctttgaaggaaaagtacccctcgttgttttctatagttagaaggaaaaatgcctcaattgctaatgttatgggttctgttccgcttaatgtttcttttagaggagttttagttggtcaaaatctaattagatggcataatttatgtgcttccattgtgcatattaacttaacagacgaggatgaaatttttagatggaattttcattaaaatggccaattttctgttcgatctatgtacttagctttaattaataatggttacatagagaaaaataaaattatttggaaacttaaaatgcctcttaagattaagatttttatgtggtatctccttaaagggattgttttaactaaagataattcgactaaaaggaattggaatggtagttcgagatgttgcttttgtatgaaaaatgaatcaattcaccaactattctttgagtgccatttttctaaatttctatggagagctatacaattcttttttggactttatcctccacatagtatatc

SEQ ID NO: 10066 - DNA, 15701 bp, Oryza sativa
ggttttgggccgactttcgcgccaaagccaaaagagactttttaaaacatttttcaatttaaattatttcttaaatgcaattccatttattaaaaatacttccttagctcaaataaatcccagaaaaatctaggaattatagaattaagcaaagtatttgatgaaattttatctggccccattttatattggaatttattaattaaaactagatcttctcttcaagacttttaaaattatttctaaaaattccatttaaacaacaatttataaattttaaaattttcagggtgtgacagacatcatcaccagcacctctgcttcatcggccctgacatctccgctgttgctaatggatgattatgttttcgccgacttattatttcaccttcatggttgacctactatgcaaatgctgatgagcgtctttgtcattatcattggttgctacactgctattggctggatcaccaacatcgtcatcttcatcaacatactgtcaagcctcttcaacatagcccactctactactgtttgatgagcaatttcgtcatcatagtcgatcatctctgttgctactgacggttgcctttgtcgtcgtcgactattttctttattttcatgattggtggatttcgttattgcctttgatacgtgtctacatcttcaccgtcggcttgctttcgtcaccaccgactggtatcctcgccttcacggatggcttattatgtcgccactaatgggcatcttcatcttcttcatcggctgcctcatctgtcaccgactgattatttcgccaccatggctgctcaattttgtcgatgttgctggatgccttcatcttcactgttggctgacttgtctgctgccgattggtttcttcgcctccacggctgtgcaacttcattacctttgattggtgtcactgttttttactaccaatgacatcttccattacttttgatgagcaatttcgtcttcatgttggtcatttcatctccatgccgactgcgtcagctattgccaataagcaattttgactatgacagaaggacaagctatatgctcaggggctcatcaactcaagcgtgaggattatatctccaatttggacttgttccggatacattccacatggattcatagtcatgagtctattttctatgctcaaagactggaccaattattattccccgtaagggctatcaaccgaatacttgcgccagtcgggattcaattattatatttattttggagtatcccataagggataatcattcagatcagaagctattcatatgagctacgcttgatctatattacccggaagatttattactcgggagcatgttatatgcgtcatcctttaaagggtgtcgaaggcatatgttttggcctaggcctaatatgtctgcagcccatattttcaggtgtggcctgtcacgttcttttagggacttaggcacttttcgcttaggccaaagtgcgcgtgatcaagtgcccaataccttaaaatccttttataccgcagttactcgactttttaggagttggtacgatgcatcttaaaaggtgtcaaacagtaaagctttacatagctgccccgctgacttttttatatagtcaaggtgctgtttgggtttatcaagcaattgattggatataatatcattgctttttgccacgtaagtgtgcatttttattgaccaatattatggcttaggctgattatatattatggtcatttttctaggcggttggtaaatcctttatgagtttatttactcggattttacaccacatatgccatatatttccaggtgtggtgaaaccatgtgtcttctagggacttaagcacatctgttaaagcagtgtgcgcatggcgtatgcccaatactttggaaatttctttattcacaatatacgagcttttttatagctattttggtatatcactcggatcatgttatttggaggattcacaccgcatatactatatattgatatcaagtcacttggttgattacgattatcaaaaccacttggttggttggattatttattccttgactatatgcttggtttgttcaattaaccacattgtcgggggctacacctattaggtgcatctattcgatgcacctgactttatttttcagccctccacagtcttcagatttggtaaaagtactcgggagaccatgacaaagatgattgaagcactcggctttggagtaatctggttcgagagaagattatcttttcgactgcgaaggtctcaggggctactgtggatattatgggtaccccatacccacagggcatggttatccgactagttataggggataacttatatctatgtaatatgtaacagatcatgacttgggtgttacgtttccttgtatattacggaacggcctaaagtcctgatttaggaaaccgataccgtattggttaaggtttctatcttgtaatcctgccccccatcctatataaggtgggcaggaggccctctagggggcagatatgagacaacctgatcgtcagatcaatacacactcggcggattcaattccccaaacaggagtagggtattacctctcattgagagggcctgaacctgtctaaatcctttgtctctgcatccatccacttttaggtctcgtgcgctaccccgttttattattgccgaattcatgtttcgacagtaaccgaatcggataagccgcgcgtaacttactcggactccacgccgttttcacgcactggatttttcagaatgtttccaaaatttcccgcagcaaaacaaaattacaaaaggagccaattttgcggaccatttgacttgcgtgcgtgcgtgtgttccgcctcttctctccaccacacatgcttcaagtggctaggagggcatcctcccttttaaggaggtccccatccgctagaataagtaaggtggtactaaactccacatgcataccatcccatgaggtggacttttgtaattttccaaagaattaatcttcgaataggctttaacccatctattaattccaacacgttcaacatggcagtgcccgtgagcaggatggggctaggcgtggcggctgagaaagatcatcggtagtgcggcccaggaagcagaccctgctacgggtgagcttcctgtatggtaactgtcgatggcagcaggggccgtatatccaccgatgtaaagtgtgcacatgttcaaggcccccaaatctataactactagtactaattcgtaattatcctatccatgctaactataatagcaaagaaatgaaaacgtattacacgtatggaaagcccaacaagctatttgagcaatttagtattaatttgaaagctcaaacaacaggcaaaaaagaatgtatgttctcatgttgtctcgtttgatcaaactaacatccaacatgcaccacacatcgcatcgtctcgcttttttaagactcggttttcccacaccgtcgccgctaggacactacttcgatctttttttcaaaacaatcagcaccgctacttaaggatggttaatgggcacgtacagacggcacgaattaatgaacaagctcctagctgcctgacttctgtgtgtccacgactatacaccaccggccacggcagtgtgtacagtacacggttgtggctatctgtcgtaggtcaccacatcttttcaattcaggctcaatatatactcctttcgtaaaaaaaaaacgaatctagaactgaatgtgatatattccagtacaattaatctagacataccgacagagtatgtctagattcatagcactagaatgtgtcacatccagtactaggttgattttttatgggacggagggagtactttcacataggccttcaatttctaggtacggtcttagacacagcagtaaaatgttatgttctttacccagcagtaaggttgtgttttttaccttatttttctaactatctttctcgttttttacgtgtacatttttcaaacaatttaatggtatgtttttctaaagaattcctattcgaaagttacttaaaaaatatattcaaccattttttaaaaataaatagctaatatttaattaattatacgctaatgagttgtttcgttttacgtacgaaaggattagttccctacaccaacaaccgtaagcagccatggttgtcctggagttctgcagctgctgcggcaacgtcgatgcctccaaacagttcataatctagaactgttatgacagattaataactctattcttcaattgttctttacttcaaaatgagtggcaaaatataatttctctaactagtagtaggtcaggactcacgagttactagagattagcgatatagtataagataggtactcgtatgtttataaaaaatttatggcggtctttattaataataaggccatttttaactcaagacactatacgtagtttctataaacttcacatcatgtactagacactactcttccaatgcaaacaccactatttcatacttaaatttaatactacttatctcacataatgtcttggatgtctcatgcaagacatggtttccttctcttttcttatttatccacttgccacatcattttttatcctaggtggcagcttatttaatgctatagacaccatcataattattgagttgggaatgacctagcatcgatgatccatataaacacaagacagtattttgaccagcacaatgatgcgaatagagatctagtcgttgccgtcgtcagatctcgccgtcccagaggtcgtggagggacttgtacgggccgtccggcgagacgaagtagtttccatggcaggctcgccgctgcggcacgccggcgatcatcgccttgtcttggtcgctgagctcccagtcgaagatgtccatgttctgcttcatccggccctcgttgaagctcctcgccaccatgcacacgccttgctcgtacagccaccttaacgccacctgcatcacaaaccaagagataattaattaattgagttatatattgatgtttgtatatatatagtagttttacataaaactgtaggatataaacctttgttaattgaatactgtaattatgtatgtaattaacccaatcgatcgaatttttggtcttgcattttccttgtttgttaggacgaagggaatattactgttattgattgtgaattcagttatttggggagacaattaggcctggtttagttcctaaatttttttttcccaaaaacatcatatcatatttttgaaaacaaaaaataattacacaatttgtttggaaatcacgagacgaaccttttgagcctaattagtacatgattagtcaaagtgctacagtaacccatatgagctaatgacagcttaattaggctcaaaagactcgtctcgcggttttcatgcgagttatgaaattagttttttcattagtgtccaaaaattcctttcgacatcctgtcaaatatccgatgtgataaaaaaaattcgcgaactaaacatgccttaatagctgtatttttctagtgtgtaggaggaaattagaccagatggcatggcagctgtgttccagaggtgttaggtaaaattttcgcattagcaatgatggggactaacttgagatgagagataacaggagttttttttagaggggagagataacaggagtttagagggtaaggttcatttagttgatattaaatttagcatttgcttcagttactgcaactgaaactacaaccattacatttttttttctcaaagctcaggtaggatagaataaaacaacagtagataaaaaaaaaagacacaacgacaccaaccaaaaaaaataagcaacatattcaaagttttaagtctattgctaaattttcatccaaaatttttaaaaaactgcataacgattaactctaaattctggagcatatatgacttgttgtgtgtccacttcacacctatgaattattgagaattagtttctccaccaactcacactactaaaccccgcccccttttcgaggccaaacaggacttttcagcagagtctattttgattgttgtaaatttttcatttatcaaatttaattcttgtcgtggttattttctcctagcaccatggccattctatacttccataaaccatgaaaaaggtcaaactataataaaaatcattggagtacacaagtttatataacaacaattcaattattttaattgaaacagctaataccattctgaactgtagaagtcaaccagtctgaactttttctttcttagttttattttatcacctgagcaatcatcttgcctctcatggcggcaaccgtcacatctcattctagatttattttccatgtgacggagagaatagtttcaaagaataataattcagtattttaactggagcagctaatgtcaatagaattgtagaagtcaacgattttaattgatttttttcttagttttttttttttttacctgagcgatcgtcttgcatctcgcggcggcgacgtcgtgcagcacgccgctgttcatgacggcgtcggagccccagtgcgcgccgtgcgcgccgagcggcgagtaggcggagacgacgccgccctcgccacacacctcccgcaccttctcctgccgccacccgacgttcatctccacctggttcaccgccggcggcacggcggcgagcgcgagcagccgcgacatcttggcggcggagaagttgctgacgccgatggacctcgcgaggcccagccggtggcactcctccatgccgcgccacacgccctccatgtcgaacggcaccagccgcgggctcaggtcgtcccacgtcagctcgccggcggcgtctttcttgccgatgcgaacgggccagtggatgaggaagaggtcgacgtagtcgaggccgagccgggacagcgactcccggagcgcggcgaccacgcgcggcgggtgcgcgtcggccatggagagcttggtggtgacgaacagctcgccgcgggacgccacggcgccgcagcgcacggcctcggcgacggcggcgccgaccgcgccctcggtgccgtacaccgccgcggtgtcgaggtggcggtagccgaggcgcacggcgtgcgcgatggtccggccaggtcggccggcggggtcgacgagccggtgccgaagcccagcaccggcatcgcgtgccccgagttgagcgtgacgcacggcacggcggtcgccgccgccgccggcgtggcgccgccgtggtgcacgtcggaagcagccatcgatcgaacgggttcttgggattgggtttgtggtcgctgagagtggattcgttgtctattcggatgttaattataaagactctttctaaatcgtgctgagtagtactagtaagaattattagtcttgtaagcttgggagacaagaagcaaagggttagagtcatcacacgttaaaaaaaaagtcaagtccacgacacagacggctttctttttctttttcttttttttacctaagttgtagtgcaaccacaaaatttctaatcgaaatcggaactactacatcccaatttgttttccaacaaatcgagcattgtttccctgctcatcgaaaaaattttcaccactatatagaaacatgtttcatattattaaaaacggtgaaacacattcaaattatgaattgaaattttttttctaacgtacgaaatatagaatttcaaccattgaaacatttcgacacaaagaaacatcaagtacatcggttgaaacatcgaaaaagcaccgtacacacccatttggtattctcgtactccactcctgcatggtcccaacggtgagacatcagtgccaacctcctcaaacacgagacgagacgaaaggtttgaggcagtggtagagccaaaaatttctccagacacatggctcaattaatcaattctccctccgtactcgtaaagaaaatcgttttggacagcgacacgatcttcaaaacacaacattgacttcttgtttctataaaaatatttattaaaaataatatatatactttatgaaattatttttcaaggcaaatctattcatatattttttacatttttaaactcaacagattgagagttatttatgatttatatttataaggtttgacttaagtattgtccttaacgacttactttataagtatgaagagagtacagtataatttacatatgctttagccttaactgccctactcgtggttccacccctagtttaaggagagaagggtcatcgctgcctagccacacgagctcgacgctaaggccaccgcatatcaccgcctttaatcttgccccggaactggatgtactcgtactgaacatttggtgattacccaccaggacttcctgacaccggccaccacgccatcgaaggcttcagggtgtttggagtcacgacgtgtgcgagcgtggcgcctgacactgagcgttttcgatttctaatgtacttggataaaccgttgttttttttcatagtagtagtaatttttttcacaataaatatcaatatctcatttatgcacatcaagtccaaatattagtggttttaggatttttgagtgttttaatggtaaacattttgtgaagattcaatgtagtaaaggaatttatcggaaaaagactgaattaccctatgattttttgcgctcatccaagttaccccctgaataacaatacataacattttaaacccatcaactttgcaaagtggacaaattacccccccccaccccgcgacactctagggcggttttgctctttagtgacacacatgtgatagtcagtcagccaaaacaagtaaaagaaaattttattggacccacttgttcgcccaatccctcttcttctcccctcctctgcgccccttcctaaggcaagcaacactagggttttggggcaatgcacgctagcggagctagcagagttgactcttggcagcggagcaaagtggaaccaagatccaaagaggcgatgcttcgtggtggagctagcataggcgagtggtgttgagttcatggagctcaccgtcaatctcaccgctcttccacttcaagcttgaaaccacctgtatcgcctccgccgtgagttcaccattgcttccgtcgtatttgctagatctaagttgtgttgttgaggccataagggagcagtaggtttatgtgtttggtagcacaacgagggagcggaggaactctagcatcgaccgcgcggtggagttggtgctgccgaaatgacgctgtggggagagattgagagagaagaggagctggacaactggcgttcgacgacagcaaccaagcagcgtccgatgatgctctagcagtagatgaagaaagaggacatagcaactgatatgtagggtccactagcttgatatgtaagtatggaagcatgaggtggaggctgacatgtggggccagcgccacatgtgcgcctacgtaggaccaaaaccacattcaaatcgatttagagagtaatttatccggattacaaagtccacatttaaaagtgtttgtattgttatctaggggtaaatcggatgtgtgcaaaagttcaaaggtaattcggacttttttcaaaattcatttgtacgaattgaatcgaagttatttaaataattaaatagacatgactaaggatcggattgcttatcatttcaattctatggaacgctataatgtttcattggacagtcacatgttttagtacgatcgtgtcatagttacagcagaaaagtgaaacgccgaaaagtgaaacgccgcataaaaacaacaaaatactggtatgtttcactagataattgttccattggaatatttcattctgtgtgtttagtcattggaccaattgtctggaaatattgcattgactcctcaatgtttgcatgcaaatatcaatatatatttgtaaatatgacgaattgttctttcgttattagtcaaaagaaaatgagtgtgttcggctgccatttgtttagcagcggctgcagcaattcaaaattgctgcagcttacagcgactttgaactgccgcagccgcagcggctgcagcagccatacctgccgaacagagccatacctgccgccgaacagagccaatgttggagagaaggactatcatctgttcttaggaccatcgtatttttgtaagtatattcttgcatattcagggagtttgcacttacccctactctaggaatatttggcatcaccaaacatttcaagcatgcttatagcatgcacaggtaatacgagcacgcaagtattgtgatgtgaatgtggcgtgtttaggttttgtacgtacgtctagttgcctaaaagaccaaagagtttgaaaaggggaggtggtcttttgtcactctccttgtcgcttatgcatatatgctttatggaaccgtttattaattactaataactaaagtaaaatagtttaaattctaaaaaaattaatttatgggtataacttatccttactgatttataagcacatactgtaaaaaagactataattaaaaaaatcacaaaaacaccttgaaaattaagttttaataagatggcttataaacataagcgaaatgagactatacatgtcccactttgatttgtcagtaactacatttgattggatcatagatagattaacaggcatccacaaaaaaacagtaactgcaagccacagggctccatgagaaaatggaatataataataaataatgtacataatgtctcatgacattttgcatatttgcaatttcttttttgttatctccttttatctctatggatggcaatgtttgcatccattctcctttttttttttccactggactcttcccagtgaacataaccgacaaagaactactaggaagctagtaaaattgaaagaagaaaaaagaaagaacaaagaaaatttcagagttcagaccaccccaactttcagaaacaactcctccctttgttctaacaaccactactagagcttgcttttgtgagggttgaacataacaaaggctaaaacatgaaggaaaatgaagcagccagataaattcttattgtgatctgagaccaggctacctccatgatctctgcctaccctcttcctttcagatcaatcacaacgacactaatgttatctgaactctccctgccgagggcgaggcgcgcaaggagagcagcggcacggtagcagcgaggctcagattcttggcctaccgctgctgccggagcaccggcgctgctggaagcggcttcgccgctcctagctgcgcgacgcccactggtggggctcccgtcttcaaggcattgtcgagcgacatcgctggccgtctcgtttgagatcacatcccacatcccatcgctcgcgaggatgaggcattcgtcgtcgacggtcctcacggttatggtgatgtctggctcacatatgacttcaggctttaggtacttgtctcctgcgtgaacatatttagaataattgagagtaacatacatgatactgaattagtttacataaagaatctcataaagtaagtaatatacaggaaaggaaataaattttcaaacatttcaaatggtattgcattgaattctagtaaatgagaagattcatggtattacatagtattttcaggaatcctatttagtttcatgaaagaaaaaggagaagatgacacatataaacctaacgaactagtgaaatcgagaacattattatggctacggcatttcaagaactccatccaaatatttaagccacagatacctctgaagctacaatgaaaggatacacagggaccagcccttttgcaatgaaaagcttaagcatcaaaacaggggcaaacgtgagatgcagaaacataaaatattctataaccactcagtaactactagaatgtagggaaatttgtactgcctatatcaagggaaggtgatgtatcatgtataagcctataatgacaagttggacagataagtattttgaaagaacacatttcctttgaccttttgggccaagtaaactgcttccttctgctgcacataaattatattatcattatattaattaatctactatataaagtaggaatcttcattgattcaaaatacttaataagtgataagtagtgtggtgcttcctatatgtgaaatgggcaattcctacaaccaaaatggtgtgtctgtaatataatacaaccctctccaacttgaaacctgatatataaacatactaccactgaactctagtttaaaacagagcttgtgagatagacagataaaaactattttaagaaaaagtggtttatcagaaacaacatcagatctgcagagacaatattttctatgttatttgattataaacattcgatatgaagtacaattatatagttttgaaatcaaatagactgacaaggttctacaatggtgcaagttgagcttttctctattgtcaaaaggtccaaattattactacccaaggtatttcctttgtcaatcctgaaagctagattaaaaaaggtgtaacatcactattgggaacttaggatacaacagaggacaacgtcactagcctaatcaaacatatatgtcccacttatttatgaagatcatttcttttagtcagttggttaggttacaatcagagcaactaataaaaagagctagcactttcacagatggtgaatcagagatgaacgcgtgtcttttatgtctaatccatctttcttctttcagacatctgataatataactaaatgaaataacaccatacaggcactgccaaatgttaggcctaatggctaaagtgagatggactgggtacatatggtcattttcttgataagccagataatatggcacaaaccggtggggtcagtgatgtgactgtgtatcaactcaacaaactgccaagtaacatctactagaagctcattagaagctggaattgtaccttttatctttgtcatagttaattgtataaaccacaaaaaaaagttggtaccttcggacagatgcaaatatcctatgtaactaaagtgtaaaaaaccttaaattcatagggtaccatgctattgtcatattcataaccttcctgccacgaaacttgcatataatacttattttcctcatagtcttaaagcaggaacatccttatttgacctagattctgtcaccaggcagtttttgattggtcaaggggtggaaagatgcagagcaataggttcctttttatgtttggaagaacatgcagagcgacaaatgtaaccaccctttgtgatatagtattaccttccgatcttttgtttatttccatttcccccaacctcgttgggggcaacatgatagtttaagaacaactggacacgtcttagaaactgacttgccaatggagcttcagtggtttagcccaatgatcaagcaaaaccaaaaggctagtgaacaataaacaaatgatatccagagcaactaaactagaatggcaaggcattaccaaccatatataattggtctccctaactccagattatgtgcacaagtacaactcctgactacttctattagagcaagtttaatattatagccaactactagctccaatttatctatagccaatctaatagctcatttatacaatagttacataatacactattaatacctggtcccaccagtcatacacacactgcgtattggagtctgtgctatagctggctacaaatctgtaatctgctactcttctctctccttatttatcttcttaaaatatgtttgcagctggcttatagcctactattgtacctgctcttagcagacttcttttcgaaacatttactcattgagtacatgtttccgcgtgaaatcaaaacccacgccaagacgaacacgtgagcgacagaaattggttttattgtggctccaagttctatccaaagctagctagctacgcaaacattcagattgtgccacccactgctagctgtatcatgtggtcttaagtgaatcatgtgtgcagctagcagccaagacattgtagcccaggacacaggcaatttcagttcttctacagcagagtagcaaacacaacacacaaagatagtgcctgcagacagaatttagatcaatgatgatgacgatgacattacctaatgctcgcgacatggcgaggatgccacgcaccctcggcccgttgaggtacaccacccggccacccaccgcctcgatccgcgccttctcgtccggccggtccggctgcataattcaccgtcaattatagtaccatgtaatctaggttcgtcagcagcaagatcacacttatgattagcaagatacaagagcaagattaggttaatcacactaccacatccagcacgaatattgtcgcaccaaccactgcccccatctcctacccccctcatggacctaccacagccaaccacacccagccaattttccccttcttttttccccctttccacagaaaaggaagctctgaccagtgtgggtccacaatccatctcaggaagagcaaaaataaaaaagaaaaaaagaaaaaaaaagaggcaaagggacagcaacttcacagtacacaggagcagggacaggtggcagaggtggcggccaaccccctctcactgctcacgtgggccccaccagacagcagcaaagcagctggccccacactctgaccagtcttatccccccacgtgccccgcgcgagagcaacacgtgtccccctccaggaaagcgatggattaaggccctgtatagatgggactaaaactttcaagtccctatcacatcggatgtttgaaaattaattataaatattaaacgtagactattaataaaactcatccataatcttggactaatttgcgagacgaatctaatgagcctaattaatccatgattagcctatgtgatgctacagtaaacattctctaattatagattaattagtcttaaaaaatttgtctcgtgaattagcttttatttatgtaattagttttgtaagtagtctatatttaatactctaaattagtgtctaaagacaggaactaaagttaagtccctggatctaaacaccacctaaaacacttcggaatcccccccccctcccccgcccaacaccacgtgggccgcgcccctccgcagccacccccgaggttcccacaaattctccaaattgccactgccctttctactcgcattaatgagagggccaaaacaaaaacagaccataataagagaagaaaaaaagatactagtaattattttttttattattattttttaatacgaggtgataatcttttttgtgatgacgctagcggggtccacgtcggcgagcacggcaaggcgaggcgatccatgtctctccgacaagcgagagcgacctctctctttttctccggtcgccggcggccaaccacgcgtcgccggcgaggcagccgcggccgcgaaggttccggagaggcgacacctcggctggggcccaccccccgcaggagtcaacggtaaacggcagcgcgagacttggaatattttggcaggtacggtcaaagccgtggtgtgagggacacgtgtgcgtgtgaggagggtgccacgtaggaatggaagggctgattaccttgtggtcggaggagagggggaggg

SEQ ID NO: 10067 - DNA, 15034 bp, Oryza sativa
gtggcgagggggtgacacgtgtccggggactgcggggggcgcgtggtgcgcgcgccgtcgggcggtttggctgcgcgcctctcttccctggttttcgccctccccgagcccggtttggccggcccctgctgctgctacatcaccacccaactaccaaacaaaccaaaagagccccatcctttgacatattagagaaaagacgaaatgatatatttacaaatataaaataatttgtaaattaaaattttatatatgtatttttaatgttctaaataaagattggaaaataaactatgataaaaggtcctaaaatcaacttcaaatctaaagctaaaaatttaaatcctgactgataaacataaccgagaaggtgaggctgaaagcttttgactctggctgggattagaacttgcatcatttgtattgaataatgggaaacaaaggtcggtgataccaccaaaacaaaatgacgggagaaagaaaaaaaatctttttttttgcccctaattagcttctagaatccttctatatgtgggagcacgtgataaatttggatggtggccaggctatatttcttagtgtaactcatttttcaggtgcatttgtaggatttcatctcttacctatactaaaggtgttatccatctccagcacggtggttcctgaaggatggaggaggaaggggcagctaccggcgaggagatcaaccaaaagagggatcaaaactattttaaacacatctactaaagagtaaaaaaaatcaaagtaattttacctctataacatggtaggacgggtgagcaataatcttcccttctttcctctcttctcattgataacgagatcaccggaggtgttgatagtgagataggcattacaagtgcgatgccaaacaatgaagaggaaggaaccattcacaagtttgtggagtatagtatacgaaggaggtggaagaagagatcaccttataaacttgcctctatcattatgtcgcctcatctcacacgtctttgcatcgcatattaatgagaagatatggttaaatgtttttaaactaccacatgttatgcatgcacctagacgttgttcccaacctccacaacgctggatccaccatccccgacctcctcggcgatggatctacccctcccaagggcgccgccggtggatccgctcctcccatggcctctagccgtagatccggcatcaccgtccccaacctcctcggcagaggatctgcccctcccaagaccgttgccggtggatccgcccctctcatggtctctagcggtagacccggcatcaccatccttgacctcctcggtggcggatccgcccctcccgaggctgccgtcgatggatctgcccctcccatggcctctagcggtagatccggcatcaccgtgcccgacctcctcggcagcagatcggcccctcccatagcctctagtgctagatccgacatcaccgtccccgacctcctcggtggcagatccgcctctcccaaggcccccgccggtggatgccttcccatggcctctagcggtagatccggcatcaccgtccccgacctcctcggccgcggatccgcccctcccaaggccgccgccaatggatccgcacctcctattgcctctagcggcaaatccactactcccatggccgccaccgcccaagcctgccgctgttgcagcccaaagccagtcacctccacctcgaccacccgaagcggttgctgctatgtatggggagaggcaaagggaaggtggagtggcgaagtagaggaaaagccaccaggagagagggaggcgatgggagaatgggagaagtcggagtaagacattgtgtcttatagccgcgctccagcccttgccttttatatcttgtcggtattttctcaatcgatagccccgagagctgtaaagagacccataagcaaaaaaggtggtttttttcaaccgggctcttaagcggtccatatgtaaaaattggtttgtctataaaaaaccaattttcacttatgggtctttgggatcccttaattatccattttcacatgtgggtatctttagctagactgcatgtaaaactggagaggatgtgtttacaataatggttttgtagtagcgtggtttgcataattttcttgttttaatttccttgtactttttctcaatagattgaggcaatgatatgaagtgcaatattgtcgatgtatgaatatgtgtatatcatgcatgtatgaacaatatatagatgcatcatattgctttgtatatcttttctggccgggttgatacctacttaccaatactgcctgttcaagatcgatcagcggtgatactctctagtagtatcactgtacattgattgccctctcttcatgttactaattagaaaaccagcagtgacgccgtttatgaactctcctaacgggacggctggtggcagtgatcgttcggtcgttcaagaatgtttttccaatgtaatgtgctaatatagggttcttaattaatgtggacgcaattaacatcttaggccctgtttagatccatttggaatagcaaatagcaaatggcaaaagttttggtggtaaaagttttggtattgcaaaaatactagttggtgtttagatgcatcctaaacttttgccattctagcactaaagtgagagatagaaagaaagagggagtggtcccaaagcactttttggcacaatttgctactatagactagcaaatgccaaatgccaaattgccaagttttgttactagtgtttagatccaaaatagcaaaaagtgctttaaaacggcaacattggatgatctaaacagggccttagcatctcttggaatgcaactatgcaatcatatctttcgaggtaattaaatcaagaaattaacgcaccttttacacataagcactactctctttgttataaaatataacaatgtttagcatttaaaatttcacctaaaatatatttctttcaaccaatcacaatcttctaacattaaaattccctacctaccttctcttttttttataaggaaagagaaatatattactcaacaatatatattgtcgtcacaaataagttgtgagatgaagttacaaccagaaccagcccagaaaaccggagaataactcacattgagccttgttactgcctacctcctcttttaaaccaatcacaataaatcctcatttaattttattaacctttttaatatgtatctttaatcctaaaactttttatattacatgatcgcataaacttcaccacattcttatcatgcatttatgcaatcatgtatatgctttttggccttgctcttttcttcggctctgctaccgatttttagaatgcaattaattattgatcgctcttaagtgtatatttggtcgtagcaaattgaaatataggatggataatttgtctaacttttgctccgtctggatatttcaatttttatgctggcgcatcgatgtatcatgtactctgtactgtgcatgtctgtgtggtactcttgcttgggtgtcgcgagatatttgaattgttaaatttactccaccttcatttaataatattctctccgttccaaattatgattaagaacttatagtatttgaatacttttctaaaatataaaaatttataacactacaaacagtactattatttatctcatcaattattcctcattcaaatctcttctcatcttacccccacttctccatccaaccccacttatttttcatttattgaggggcattaattaaagtatttttcttcttaaccttaacctctacataacaatataaaaatacttatattttaaaagaaatatagtaatagataattctccttttttttctctcaaaaagacatgcaaggcagcaacaagcagccatatataaatgggaacaagtacacaattaagatgctcggaggaaattaaaccagagataaaaccattataaaaaaggaagatatactcccccccttctctctctctatttcaataactgcaacgtcaattctcttccaacattaaccaatgctcccttcgttttatattatcaatcaaactttgagaaagtttgatgaactgatgaagtatataaaaaagcatagcaattggtttcatttcgtataacattgaacatatttttttatattcttatttatgttataaaaactattgctatattttttctataaatttgaaaagcaaggcagaaacaagcagccataaaagggaacaagcaaacaagatgcttgaaggaaattaaaccagagacaaaaacgcgttataaaaagggaagatatactctctctctctctctctcaataactgatgataattttcttgtttctattccctccattttatattataaatcgctttaatttttttttaaaatctaacttcgagaaagtgaaaaaatatagcaattggtttcattatgtctaacattaaacatattttgatatcttttatgttgaaaaaatattgctatgtttttttataaatttggtcaaacctaaagtggtttgacttagaaaaaagttaaaatgatttataacatgaaacagaggtagtattattttttatatactcaaaaccatattgttagattcattttgtatagaactttgtaatagggtagagtttcaaaagtatttgcaaatctgaaaatatcaaagttcaacacagccccatccttttcatatgttccctagaatttcatttgcctcgtataattttttttatttttctactatgtctactatattgattagaccacctactttaagttatttgtgaagtttattagaccacctattttaagttatttgtgattttttttaaaaaatatattaatttatcatgttaataaaataaacaatccgcgtcaataatatgaaaaaaaatgtctcaaacagcgtcaacgttatcggtctattctgatagatatagatatagatagagctagatatacatatgcatatagatagatagatatagatatgcatataagatatatatagatataacaatgtcatatatactgccatctgcaaggtcgtcaccctcggctctacaagactattgcaagagtccaacttttgcacgcatagctagtactaggatcatatagctactaagctacaaatggcgatagtaattttgcttaattaatctagtggccgtcctggactcctggtttgaaaaaagtctagatagctcacaaatgtacgcaagatacatgcatgttacctcactctcaaaaaaatatcattttttatccagctcatatacattaatacaaagagcaattttacggtcattgaggtaccaagaggtaccaaatttacaatagaaaaaatggtacctcatggtacctactcaagaatcgtagaattgctctaatacaaaactaacagactagaatacttttaccaacttttatcaaaatacaatacaataattgtttcaaagtcaaagtttttcttaagacaaacgaattgataaaagatgtggctatttgagattgaggatgttacaatactatggccctgtttctttcagtttgggattattataatctagattattaagtcagattactataagctagattgttataatttatataatttatagtagaataaccgttggttgtttctttcctagattattagagcctagattattgggttttgcaagtctaaagagggagtggggtggcatggtgggtaattttgcacccaatattctgggaaaagctcacctaaatgagcttatcaaattataataagcgggactctagattataataagctacttcaataaggcttatttgtttctttcagcttacttcctatatatatatatatatatatatatatatatatatatatatatatatatatatatatatatatatatatacttttgttattggcgctcacggccttggagattttgtgttgttggcggtaattaggtagatgggctctactaataagaaatcaacgaaggtgcatgcacctcccaaagaggaaacaaatatgaaccagtccagtacttgtactgttcttttttttttccaaaaagggaactgttttgtgttgcttgaatcagtcggctatatatttagctcttattaaatactatctctgtattttaatgtacgacgccgttgattttttatccaatgtttgaccattcgtcttattcaaaaaatttatgtaattatcatttaatttattatgacttgattcatcatcaaaatttatgtaaatattttcatatttgtacaaaaattttgaataaaatgaatggtcaaatgttgataaattctgttggtgggagattggttttgattaattctgttttgtcaagtctagctatgtttattatgtttatgatatcgttttttgagattcctaaaggggttcttcaaaaaattgattattatagatcccgtttcttttggcaaggggatgaacataaaaaaagtatagattgacaagatgagatattatttgtcaaccaaaaaatcagggtggacttggagttcataatttagaaatataaaaccaatgtcgtttaagtaaatggttatttaaattaataaatgagcaaggtgtgtggcaagatttactgaaacgaaaatatcttactggtaaatcaattactcgggttgagaggaaacaaggggattcccatttttggtcaggtctgatgaaggttaagaattcctttttaaatatgggttcctggattattaataatggtgaacaagtaagattctgggaggataagtgactagggaactattctttgaaggaaaagtacccctcgttgttttctatagttagaaggaaaaatgcctcaattgctaatgttatgggttctgttccgcttaatgtttcttttagaggagttttagttggtcaaaatctaattagatggcataatttatgtgcttccattgtgcatattaacttaacagacgaggatgaaatttttagatggaattttcattaaaatggccaattttctgttcgatctatgtacttagctttaattaataatggttacatagagaaaaataaaattatttggaaacttaaaatgcctcttaagattaagatttttatgtggtatctccttaaagggattgttttaactaaagataatttgactagaaggaattggaatggtagtttgagatgttgcttttgtatgaaaaatgaatcaattcaccaactattctttgagtgccatttttctaaatttctttggagagctatacaattctcttttggactttatcctccacatagtatatctcatatgtttggaaattggcttgtgggtgttagtaaaaaaatcaaaaaacttattcttgttggagcttccgctatatgttgggctctttggcttagtagaaatgatatggtttttgataaaacaccatcaaaatcctatttgcaggtgcttttcagggcaacgtattggcttcggggttgggctcagttgcaaaggcatgatgaagatatcaagctaataaatgatgaatgtcgtaattaaacttgagacggcaattatgcatttatttgccaacttcaggtggaggttctctattagaattcagtagttaggggatctttttcttttgttggtgtctattagtttgcttagctttgtttctgctttcgtgaactttctgtgtgagttctgtaataattggctgtaactctttgagtaaaggccggaatgttacattccattatctaaaaaaaaacgttgataaaaaagtcaatggcgttatacattaaaatatggagggagtagttgcttagcagtaataagcaaccaagtgggataaaactgttgactaactcaaagaaagtagctgcatcgcggggttgacctgctttccctctctttgttactcagtagggcgtagtttctagcccaagctagaggtggggaaaatgaccacaactgaagaaccgagttctcaaaaaagaagaaagttctaaaaaaaataactgaagaaccgaaccaaacaaagaccaagactagattgaacaggactccaaattttggtcacaaaatcagtcataaactcctgctaattgagtttgataaggttattttggtcatatgtcccaattaaccgaaatgacaaaattttaaccgaaccctaatagaagcctaatatcccaagaagtatcaaaacccctaacatctaactaaaccccgtctttcccccacgctccactcaggtgatgacatgttatcattcaccctagctcccagctaccacctcccttgcctctcccctccatcctcctctttctaccgtccgcttgcattcttcctatcgtgccgtccaccatcagtgtcgtacaactgctaacactttacccctgctgaggacgtcctttgcctccagcctccttcttcggcatcaacgtcacccaccttctccggtgccgctcaccccatcacctactgtccaagcgtcgctgctccccaaccttatttgccttcctctttctctcattccaaggtcacttaaattcctaggtattgtagctcacaatttagaggtaaagatgggagcttgattttctttaggttggcggttggggatcgatatatctccacgtcatccatcacagatccatatttcagctatgtccataacttgaaccgacaaaaaccatatagctcgatcttcaccattttgcaatgcaattcgttctctatacttagggtgtgtttgaggagaaggggattgaggagattgggaagatacgtaaaacgaggtgagccattagctcatgattaattgaatattaactattttaaatttcaaaaatggattaatatgattttttaaaacaactttcctatagaaaatttttgcaaaaaacacaccgtttaatagtttgaaaagcgtgcgcgcggaaaactgagactcaatctcccctatctcccccgaaagaacgatgccttagatgactgaattttactcaaaagagagaaagaccgagaccgacacaggaaggctgaaacactggaattaattaagaagacaaaggtaatatatgttcttggttgcttattagttctgattctgatcgtattgattaatgtaatatgtcaaaaacattataattgggacttgggaactaaacaatatcaaattagaagccaatatatatcgaccactccactcaaattcgaagcaaacattctagccctataaactcaaattcttctctactacaaactttcaaaataagttagctatatgtatagtttcgtataaaagattaacttatttttggaacgggggataatctatagtggttttacgataactcgttcatgtataatttaaccgttgatagttttatttgaaccctaaaccgttaccacaatggtaatcccagggcccaggcaccctggcctaggttacggcctggggccgagcccaattagcaatagaaaccccttattttaaccctagaaatcttagcccataaaatatggcccgaggcctagctgaggagccgttagaaagatagagatagcgagaggaaagacaatgactgtggatcgagtgatttctctttgctggttccatcactcatgctccaagatcccttgcgcatcgctccccaccccgtctccctttctagcaatatggtcgtgcgctcttcgtcatagcgtcacctcaggctccaggctccagtgctcctctgtgctagcctgtaatgatcgggtgaggatgcttcgcttctcacctgctccccactctggtgaggacaccttccccatctttccgaggaggcggcatggcggcatcagccaaccaacaaggacatagctattagaaactcggagcttatcaaaatcctggatccaccagtttacaagattgatggcttgagtgaaagaggagataatcggcacatccgagttaaaaaagatttgaaaaagaggagctccaaaagcaaagaaacagaaagcacttgtgccagtagctagctgacccacgttccggcaacagaaaacatatggaccatagctgccacagtagtgccatagctgttggacggtactctacacttttgataggtactaacactacacaagtgtgtttactccgtccgacgtgtcaacgagaggtctctcaggctgggtgaaaagttatatgacacgttttaaagcattaaacgtagtctaataaaaaataaattatatatttcgcatgtaaactgtgagataaatttattaagcctaattaatctattattaacaaatgtttaatgtagcaccatattatcaaattatggcacaattaggtttaaaaaaatatctcgtaatttacacgtaatatgtgtaattaatttttttctatatttaatactttatatatgtatcaaatatttgatgtgataggtcggatgaaaagtttttgcgtgggaactgtttcgcctcactctctggcatctgctacggccggtggagcccacaggcggtgttcctccctagggccgtgcgccacgtatggtgtcggagctccaccatggaggcgccgtccatatgagtatatgaccctataggacacggcgccatacgcttttacacgtggcagatcacttttacacgtggagtataacgaatgtggaaatcatgtacagccttttcttttttatttagagctggatttttggataggatcttcgtgagaatgggaagggagaagattaagaagttgcgtctgatgagatgagccattaattaaatattgattattttatacttaaaatacgatttcgctagaaatctaccgtgtgactttttcccggtgattttacggatttgctgaccgcacgatggtggaggctgcatgcgtggtcagccggtcgggatgatcttgttcgtactgtgctcgtccctttgggcatgaggagtggagacgatcgccggacgggacgaccttctctgcacttgaatcttgtgcgtaagtctgaaccaagccaaagctaggatcccacactaattacaccaccatgtggccatgcctaacaaatctaccatcgctataaacctgttctattcaattctttttttaaaaaaaatttaacagatataattacaatacaattatagtgtaattatactgcaacttatatataattacactgtaacttatatgtaactaaattacagacatatataactaaaattacatttgtaaattcagttgatatgatatgtaaatgcactgtaattttgataaaaataaagtataagtaaatatgtatttgttattttttttaaaatataaaattacagtcctacataactaaaattacatttgtaaattcagttgatatgatatgtaagtgcactgtaatttttataaaaataaagtgtaagtaaatatgtatttgttattttctttaaaatataaaattacagttttatataacaaaaattatatttgtaaattcagttgatatgacatgtaagtatttagaatataacattacagtcctatataactaaaattacatatgtaaatttagttgatatgatatgtaagttcactataattttgataaaaatattgaataagtaaatttgtattagttattttattttgtagtccgttggatataaatctaagtgtaaaaaaaaaatctggtgatttcttattaaaaatcacccgacaaatgtgtaggcatagtaacttttttaatatatatttttaaaaaagtaccgttgattaggaagcgtacacgcaaaaaaaaaaacgagataaaccttctcccttttcatcctaaacgactatgcttaagtgttgtttcgttgtctttagaaacagaatcggtggcatctcgtcaaaaattgatgctcggtcggtcaggaatcaaccatacttatcaatttaactattttttaagtgtttacgggcaaaagaaacaagaaaaaaaatcaaaattttatatattgctataaatagtaacggtcagataccacttctatacctactttgaaaaatcagtaattttctgatcgtcacgtagccgctttcgtccgtcttgtgcattttcttcagtcgtgcgagaatcctatttgctcacgatcctcttttcgccccgcgcttcctgttaggatacgtataggctacgatagcataaatcaaaattttctgtcgcgtaaaccaggaaccatgcaagtattagatcatagatcgttaccactcgacgcgccgcgcagtggaagaagacgttgagaagtcgaaggaactctcgggaagtagcgcgcgtcgatgtagagaaagtagtcgatcgcatcggctcgaccttctcctcctcgtacgttctcctcgccgtactcccacgctgatcagcaccgcaaaccagcgacgcctctaccggtatccacacgtacagggacggaacgccacgcgcagatgtgctagcacccgcgcgcggctatggttttgctcggggagggaagtgacggctagggtttctcacgtgatgcaatacctccgccggtcacacccctcacgaatatataggatccatcacttgggcctccaaggcccgtaggaatcctattcggatccctatccaaattaaactcatattggatctccatccaatccccttattccggcccattaagcgtgcgaccctataggttcatatatactcggttgtaacccgaaaactccttttcggtccacgcgtcaacagcggcccctagcagaacgtattgacccaccgggcatacataaagatcatatcggctgaacctctagtatatacttgtatgaaccccttacctcacgatatcaattaagctcaaggctagatatgtgtcgtcctctaatagctcaatcattcactcgaacctgttgatagattatataatttgtgattgactcctcaatcacctttggcatggccatgcacttccatattctacaacatcgaggggcccagagatatctctccataggaggggcaaatcccatcttgattatttatatcccactacatgtttcatagcatacccgaaaactacttttataactacccaattacgaagtagcgtttagcaatcctaagaaagctactacatatgttgggaaccatgataatctcaggtctaaggattcagcaccaacactaaatgagatcactgatgacacaacacatatggcccttgcagtatctcatgttgggtctatctaacaacatgttcactaacatgtgtctacattattaatttggtatctctataccatgatctatgagacatgatcatcaattaatacatgtgctgatcatctaaacatatttgtttcacatatgatatttgatcagggatcctttagaaatagcaacacataacataacataaagagtctcatgaaagaatcacatattcattaaccaataatgagttatctatttcaaggaacaatgtcggataaatatgtaaacatagtatgtgatacaatcatctctatgattgcctctagggcatatcactaacagtctcccacttgcactagagtcaatcatgaatgtatcttacacccattgccctagtgtgtgcctcatgcttaggctgagggagtggctttgtcaatggatctgcaacattcaaatctgtatgtattttgcatatcttcacatctcctctacccactatctcgtgaatgaggtgataccgccgtaaaatgtgtttggacttttgatgcgatataggctccttggtttgcgcaatggcaccacaattatcgcaatagaggtccatagggcttgaagcactagtcatcacacctagttgagaaacgattttttttatccaaacagcctcctttgctgcttcagaagcggcaatctattcggcttctgttgtagaatcagccactgtatcttgcttcgaactcttccaactcacagcgcctccattcaggcagaacacaaatctagactacgatctaaaatcatctttatcggtttggaagcttgcgtcagtgtaaccatttacaacgagctcttcctgtcctccatagactaggaacatatccttagttcttctcaagtacttcaggatattctttacagctatccagtgactctcacctggatctgattggtatcggtttgttacactaagtgcatatgaaacatctagacgtgtacatagcatagcatacataatggatccgattgctgaggcatatggaatcacactcatcttgtttcgctcatcagtcgtttgaggatactgattcttaccaagattaatgccatatgacatcggtaggaaacctttcttagaatcttgcatgttgaacctcttcaacactttgtcaatgtatgtactctggcttaatccaactagcctctttgatctatctctatagatccttatgcccagaatatatgctgctccccataagtctttcattgaaaatctatttctcaccgatgtcttagcggattcaagcataggaatatcattcccaatcaataatatgtcatctacatataggattagaaacaccagtgcgctcccactaatctttttgtatacacaaggctcttctttgtttttgacaaagaccaccgctttgactacttcgtcaaaaggaatattccaactttgagatgcttgcttcaacccataaatggatttatgcaatttgcatatctttttagctgattgtggatcaacaaatcccttggattgtgtcatgtacacatcttcatcgagatttccattgaggaaagctgttttgacatccatttgccatatctcataatcgaaataggcagcaaccgctaaaacaatccgaatagattttagcatggcggctggcgagaaagtttcatcataatcaacaccttgaatttgtctgaaacctttcaccaccaatcgtgccttgtagatgtaaacatttccat

SEQ ID NO: 10068 - DNA, 53883 bp, Oryza sativa
  unsure (1)..(53883): unsure at all n locations
gatagctcagttagcccctcgaacgcgcgtagacgccgccccgagctccgccgccgctcggcatggccttgccgccgtcggcgccccctcccggaggccgcctctcgtcgccggacctccacggcgcctccccaccctatctgatcccagaaacgaaacccttgagccccggagatgctcccgccacctttaattgagtcctcgtcgcccctcggtgatttcccctttctctcgccgccggccgccactgtcgaattccaccgctgtcgaactccctctagcgaatccgagccgttggctcgctccttctcgatgccctcgtcactccggtgtgctccccgaagaccaaatccgtcgcgcttgctccggtgaacatggcctccgtccgccatccatctcggcctccccttcttcctcctcccgccggcctgcgtggctgccacgtaggcgccacgtcggcgccacctcggctttgaccgagccgagccggtcagccgcctcctccctcccccctcggacgcgcggtccatggtgcgccaaccggctgcgcgtgggcccgccgcatccctggtccatccggtgcacgcgcatgaaccgcgctcacccgaaaccctagcaccgccctcatgcgccgctcccacggtgagccgcgccaccgacaagcgggccccactcgggaccccacaaggtggactcggcccaccggccctttctctccctcacttaccccgcgcccccttgggccgcctctccgggccggccggcccattagttcggccgagccgtgcctctcctcttgggccgcacccaagccgcccgaggaagtctaaatcatatccctccttcaatttctttccaaaaagggtttaataaattattaaatcctttttcctttagacagaaattccttaatccttagaaaatccatatcttctcaaccgctcatccgattgactccgttaaacttccaataattccgtaaaaattgagatctatctaatggtactattatctagtctaaataggatctttattttgggtcttgtgtagatttttaattgtttgcgtatagttgcggttaccggattttcgtcgatcgcgggttttctcgaagattcgtgaagcttcgtgaagacctcgagcaaggcaaatcaccctttgaccaattgctcctataattggaaaatcattattaatttgtttgcaacttgcattattagcaacacacatttatagcatgcttggcctcggtttgcgtgccaaaccgacggacctacctagtagtcgcactaattcctgtaggctgtactaccctgaatccttgtcgctccacctttgtggtacttcggtatccgtgctctctgagcgcgtataccaactattccacatacaccgttgtttgtcgataatctgagaaatgggtttgagaagcctttaaaacccgacatgtggtgtcggcgtgtttgaaaataaaatgaattgtgaaaactcgcgatgcggatgctgtgcctgggtggcactgtcccgtattcgcatataaggaccgattcctttgggaaattcatcaagcataacaagtgcaaccacatggtggtatgggacaccctggctaagtaattagctgcttttgggaaatcttgtataccaatagaggcggaaagccgggatgtgggggtagaggcatcctgggagtccgaaacagaggaaggcacccgggagtcctaaaaggaaagccggagttggcccgatgttggtcagggagaccctctatgtggcatgaggtaacccagagttagctttggaaatgccttgtcgcgaatctcccttttccagccgtgtgtcatgaacacgggttaggtgatgggagcaagttcgtgttgtgtgggtaaagtgtacccctctgcagaggttaaccaactgttcgaacagccgtgcccacggtcatgggcggatgtgaggtggttcccgttgcgtagatttgtttgcctgtgctttgtgaaaagttgttgtggattgggaatcgtaaccagaatcagcctaagtggcagatggatgacctgagtggtcagaaacgaatctgtgtgattcgggatgtctgcgggcatcatagactaggcttcccgagtggaagcggattgttgtgctgctgggcagctggactctgggagtccacaaaaatgaaaaggctctgggagccgcctaatcaagtgaaatggctctgggagccgagaagtaatgatctgaccttggaggtcggtacattaccaattgagttgttgaaaagcatctcttaagccgaatcgagacgcaagtctcttttcaacccaaacctaaaaagaaataaatcacttagtgatttcaaaatgatttcaaacaaaagatttgcaaaacaaccttgcctctcttccaagcttgcattaaacacctaagttcccgtgacttgctgagtacgaaagtactcacccttgctctctctctctctctctatatatatatatatatatatatagttcctccgcccggatgctgaagatgaagaaaagtgaagattagggtttcgtcctggttcccagccgtcgcctgtggtgttgggtgttagaccgttggttccactgctgctgctgttgctggtgtttcctcgtctgtgtcttcggttgtattctcaggctgtcctgagctgcaacctaagttaaggtaaataagtcctctacttattttaaggatttgcaatgattcatatttgtcaccgtgggtaccagcactatgtcctgggactggtactatgatcgcggtttcgtaggaagcggttcgcgccgtttttcctacgacacgctcctgtcaggtgctgttgtacggcggtgccggattggggtgtgacacacgaggtgtggtgcgcttggttaggggggagttatgcgaagggtcttgtcacaatctctcgcatggtaacgtgttaggcatggcatggtgtcatacggtggattgtgtctcgtgggtacaattgtgcatctctggtcagagtaaaaactatttgaatagctgtgcccgcggttatgggcgatcgatcagcttcaccgtgatttgtcccactctattaattaaattgacttaatgaactggtgtagttcaagtggaatagttgggtttgttcaacatagttatagcattgataagtggagatttaatcttgagttaattaaacaattgttttaaactataaatgtttacaaccgtctttacgcaaatagccacaaacctcccattgtctccccttgcatgtctgtatcattggtgtggcttgctgagtacggtggttgtactcagccttactgttactcccccttttcagaagtgttatgcttctgagctgaagacagagttagaggaccaaggcttataccccagttgagttttgcctgtggagtggagctaaagccatgctaggatcacctttttccgctgttgttgctttctttttgtgtgaggactaattgcctattctataagtatgtacgctttatttatgtttggatctgtatattaatttgtcgttttgtgtaccttggctgattcctagacagggacttaatacacaaaatactctagaaatttcggctaaatttctgggagtgactgtgcatgcaaaatgagaaatccattagcacatgattaattgagtttaaataatttcaaacttaaaaatggatttatttcatactgtaatggtacttctacatacaaaattttcatatgaaatgtatcatctagtagtttgagtaccgtgccaacagaaatcgatgaaaaatatgtattttaatcagaaaaaagaacggggcttagagtggttttgacaaacaaacagattgtgttgccactccgataatttcgtgtagagtcgtattcggagacatttaattgtattttttctctcaaaaacggaaacaaatatggcatcaatgttattgggtagatatgaaaaaaagtaagaaaaccgtgtatagatgcctaccaaaagtaggaaatactttttttttcacctacaaaaataaaaacttaaaaaatgcttttcataggcaggtcctaaagagagccacccgtggaaatcgatttacagaaacattcgtaattcagcccgtgcaaaaaccagcgatttctataggcacatggttgtaggtggatcagaaaacgctcgtgtaaatgggttatcagccacctgtacaaatgttttatgtagtagtgcgttttactttttctttttcttagaattcctctaatttattagaggtgacacatggcagcagggtttgtaagaacatcaccaacagcatctcgatatcatttcctatctggtattttggagatttttggttaaaaattgcatccaatagattctcaaccaactctcccaatccttccagttaccaattgagttcgctcccaatctgtctaagggcggcgaggcggcagttagggttgcatgcgagcgtgatctcatgagagcgaggagtgaaaactgatttctgttggaagtatcctaatgggcccacctttttgtttttaggaaaccaattatagctaatgtgttggagggatgttcttggtgatgcatgctcatgtttagtggattttaagaatatggataatatggagattgctacctatcggacgtatgacattttgcaaaaaatcggacggtgtttcaccacatgtaaaaaaatgtttcaaatgtttcatcactcattgaataatgtttcactaaaaaatgttttagatgtttcattactcgatgagaaatgtttcaccacttggaaaaaaatgtttcaatcagataaaacaatgaaaaaacactggttgcaacattaagactctattatgcaacatcgaagaaaacacatcgtacatcatgtgcaacatccgatgaaacatggatgaaacacacaaataaaatagagtgcaacaaacatatacaatatattgcaatgcaacatgatcgttaagaatgatctcatggctctattcagagaatttcataaagggacattacccctttatagcctaaactttgggatcatcgtgctgctgccaaaaaaggctgatgcaaaacaaatttaacaatataggcctatttgcctactgagtgtaggctttaaaatttttacaaaagttggcaccaatagaattacagcggttgctcacaaagtcattcgcccaacccaaacggcgtttttgctagatagaaatatcatggaaggggtggtgattttgcataagactgtccaagagttacacacaaagaaaatggatggtatcatattcaaaattgacttcgaataggcttatgacaaagctaaatggtagttccttcagcagacattacgaatgaaagggttttcacaatcatggtgcaattggatttccaactgggttgaaggaggaactgtaaatgtcaaagtcaatgataatgtaggaaaaaaattccggacatgcaaaggcttgagacaaggggatccaatgtccccaattctttttaacatagtgactgatatgttagccattcttattaaaagagccaaagccgatgtccaaattagaggggtaattccacacttagtggatgatggtttgtccattctccaacatgccgacgatagaataatatttcttgaacatgattttgaacaagcaaaaaacatgaaggccattcttgttgaacatctctcggggctgaaaataaactttcataaaagtgaaattttctgctttgggggagctaaggaaatgaaggatcaatataaacaactgtttggttgtaattctggttcctttccattcagatacttaggaatccccatacactatcgaaaactcagaaattctgattggaaatgtgtggaggataggtttcaaagaaaactgagcacatggaagggcaaaaataactcctatggtgggatattggttcttcttaactcggttctttcgagccttcccatgtttatgctattcttttttgaaatacctcgaggtgtacttcgaagactggatttctaccgatcgagctttttctggagcagtgatagccagaaaaagaaatataggttaacaaaatgggattatatatgccggccaaaatatcaaggtggactgggtgtcctaaatcttgatatcatgaatagatgtttgttgagcaaatggctattcaagcttcttaatggtgatggcctatggcaaaatcttttacccaacaagtacttaaagggtaaacccctctcccatatgtcacacaaaccaggaacatctcaattttgggttggcctaatgaaagtaaaagatcaattttttcagtatggatcttttaaacctggtaatgggatagagataagattttgggaagacacatggttgggcttgcaacctctcaaatatcaatatccttctctgtacaatgtggttcgaaagagacattctactttggcagaggttacgagcacaacaccgttgaatgtttcattctgacgatcaattgtaggaccaaagttagttgagtggaatgatttgatttctcgactagctaatataaccctgtcaaatgaaaatgattgctttatttagtcgctacataaaaatggccatttttcggtcaaatccatgtataatgcgatcatcaattccaatgtaaggatctgtaagaggatcttatgggaggtgaaggtaccactaaaaatcaaagtatttatgtggtttcttgacaaaaaaaagtaatcttgatgaaagataacttcacgaagataaaatggaggggaaacaagcaatgttgattttgtaatacacaagagaccatccaacatcttttgtttgactgtcatgctgcacgttttgcttggcgatgtgtcttctttgcttcaatattccctgcccacaatgcaaaagatatttttggtaactggctaaggggagttcctagacccacaaaaaaaataattttatttggagctagtgctctatgttggtcaatttggcgttgccgtaatgatatagtttttaaccataaaaaaatgcctaacatcatgcaggttatcttcatatgttctaattggctccactcttggtgtatgatgctttcacagaaacaacaggatactatgcgcaatggtgctacacgcttggaattggtacgtagccaaggaacttttattctagtttggatagcgtagtacctacagaatttcgtgatagaatctacgtgattttaaaaaatattatttagtagatcatattatcggcaaaagttggggatttgtcccatctcgccttttttaagctcttttctgttcacttctggactttttggttgtgtgcctatggacagaagccggagatgtaacccatttccattatctaaaataattgcaatgcaacatcaaatcaaaataaagtgaaacagcttactacaatagagtgcaacaagctaaaacagtaggatgtaacatccctaaactccaactaaataaacccgtctccgtcttcatcaaaataaacccacctccatcttcttcatctccggtcgccggcgagtccacctccatcaccggcggcggctgttcttgctgtagcgccactacgcccaccgccggcggggatgggggagataggtgcagaggtggtttacctggcgaggccaatggagggcggcgttggagcagcaggagaggagcccatcggggtagaggaaggtgcacaagcagccgagcatgatgccaacggcgaccgccgccgcgatgcacgaccccaccaccgtcgtgtcgtgccgcccccacccctgtcggcgtggtcgctagcctcctcctccctcttcgcgtggtcgcgagaagcagtgctacggtgttgaggggagagaaagagagaagaatgatagagataaggttgatcggtggagagaaaatagtgtgatagtggttaagtgggacccactcggtggcacatctgattttttgcgccgtatcgaaattccgttgtaaagaattttcgggataatatccatgaaagtgacagagacgtaggcatgagtatatgacacttaatttgtctattcgttgcggaaactggacgagatggaagctgttggctcttcagagtacatccggataaaaatacttcctaaacatacattgttgagagttgcatgctttaatttgtagtagtacgtacgtacacgcaagttttattttaattcatagcataatgcccgtgcttcgctacgggtaaacaaaatttcatactaaggccctgtttagtgcccacgcaaaaattttacaccccgtcacatcgaacgtttgaacacctatataaagtattaaatataggttaaaaaataactaattgcacagattccaactactttgcaagatgaattttttaagcttaattgcttcatgatttgacaatatggtgatacagtaaatatttgctaatgacggattaattaggcttaataaatttgtctcgcagtttgttgacggattgtgcaattagtttttttattaatgaccgaacaccctatacgaaaccctatataatacccaatatgaaacgctaaaactttacgcccctagatctaaacatcctcttaaagtatatttcatgataaaaacaaatcacaataaaataattaataattatgtgcttatactacatttcttggtaaaacgaataacaaaataattaaatcctatgagtaacattcacaggcctcactaacgcaccaagatttttaatttccaaacaaccaagaatttttggatgaaaaaagtggcacgaacgagaccagagctacacgaacgtgacaccgtgttgtgtcgaccaccaccgtcgtcttcttctcctcctatggcatttgaaattgacaaaaatcaagaggagacacaagcggacgatggacgatggacgaaaatcaagccgagagaagttgcgcgctgcggacgacggatctctgtttttttttgtccgctgtatgtgattacgagcgcacagacacaaagggtgtagctctcggtcggattacggacgataaaattgtgacgattggaaaattactaattttttaattagttaagatttgaatacttcagagcagatgatttttgacaaaagaaaaacattatgatcaattatacgtcgccacgccagctgtcacgagtaactaacaaatgaaggtcgtactatatatgtactcacgcagattgacgctcctgggatcagtaatgcccatggtctttttctacatatgtcattttgacaatctagcaacacacaacaataatcgtcatttgatacatattccatgaatgattgatctcttttgcatttgttcgtccctttcgttttcaacttggtactcgtaatttcttttaaagaacaactacttgcaattcccaaacatggagtactacatttgtctagcttccatcaaagtatatatatatgaaacagcaaccttcaattaatttagctctcgttgatcgattgatcgatcagtttgcaggctgtgttggctgcatcaggtcagcaattaatctagctagtcatctacggctagataacccttgcagttctcgtctacacacttctctttgcgaggtacgtatgtgttctctttgtcttgttaaagttaatttcgtaaatataatatagattatttgataaaataatggaattaaattatagattttgaagaattgtgtcaagctggaacctttttttaattctcaataattttgtcatgaccttgatgctagaattcttacagcgctatggctttgcagtttcgtgacatatatgcatgttcattgctaaacctgtagattattcgtagataaatcttcttgattaaatatatatgtttacaataattttattaaactataataaatacattcctgatcaagaagcagaaactttgcagagccgttgttcatcatggcaggcgagcaaggttcagctatggccaacagaggaggccgggcaaatcggaaagaaggggaggacgagctacgaggctggctgatgttgctggcgacgctgacggcgtccatcacgtacgcggcggcgctgaaccctcccggcggcgtctggcaagccgacgacgccgccaaggacttcgtcgccggctacccggtcctcctcgacaagtcgccgtggcgctactacgtcttctactactgcaacgccacctccttcgcgtcgtccgtgtgcatcatcgtcctgctcgccaccaacttctacctgagccataccagtgtcatggtcttcaacgtgctcgtcgccctggacatggccagcttgggcgccgcgttcgtcgcgggctcgtcgagcagcaagcggtttacggctttcaacgcggggctgatggtatgcctcgtcgtgctgttcctcctgtggaaactgaagtttctcatgggtaatgatcaagcaggtcaaaatcctgctagtggaggtgtcgccaatttacaacatggcaacagtgcattataaatttataataatgtaaataaatttctctgatttaatcatgtcatggtagatgtataccggatataatgcctgctgcctggcactttgctatggaacctaatgatgaatttatacgttaaataatgttgaaatatggtatatggatatattttaaaatttaatattatggaaatgatgtcgaggatatatagcatgatgatatgattagtcagtacacgatgtgatatatttatattttgagctttagaagttcataattattattggatgatgttgcggtatatttacatattaactttaggatctaatatttactagcgggtttcaattttatacaagatatactacattaggaatgtttatcgtgtcattacaaaatatttcatttttattggctagaactagattatttaatattaaccgattggatgaaagataatattacaagatgctattgaaggaactagaaatgtaagtgccggttccaaagaagtttaatccatctcacaacatgccattttaaaaaggtaaatcctattccaatcatcctccaggtgaccaaaatttaaaaattctgtagctcatgtatcccagcaagttaggccgtctccaatggacagctcttatctagctcatagagtgttttaatcgatgaacaggaccgctagctcttcttcaagcgttagctcgcacgctcaccgaggcggtgccctctcacaggcacgctcgcccaggcaatggccggcactatgccgagcgcgtatgagctagcagccggctcataccgctggataaggccttagacaaactgagccaatgccacaagcaacagtggcgtacattcatgcacctactcctctatgggtagatctatttagagaagcttctagcatctatatattcttctacaattttcagctcccagatttttattcatgtactgagaatatatatagtttcagaatctatatttacgccaaacttttcatgtactgaatatgaagctgaaaaactaaacttttctagcttccgaatcttaagcactcttagacagtacttaagccagtgacgagcatgcgagtggtttggacggacaaacacatcgtgcccgctctgataatatacataccattgtactcggagacatattaaattttaaattggagtttttttcactcaaaaagggaaacgaatatggcatctctagtatcgggcatatatgaaaaacagtgagataaatatgtatactgcctaccaaatacgaaatattttcttttgagcataataaaattcaaaaattcaattttatggatgggaccttaagagagtcatctatgaaaataatttttaagggcagttggaaatttgcccgtgcaaaaccggtgatttctagatgcacacgcgtggtggcaggtgggtataaaaatgcccgttatcagccgcctacaaaaacgtatatttgtagtagtgtgttttgctttgttttccttaattttttctctaatttattagaaatgacacatgatggtttaaaagcgtttttagtatatttaatgaatttttaagaatataatagatatcccatgacagggacagagatgtaggctgagtataaaatgacgattatggttatatatcagattgacgctcttgggatcagtaatgtccatggtctttttctacatatatgtcattttgacgatccaataaacgcatataacaataatcgtcattttatacatattccatgattgattgatctcttcttttgttcgttcttttcattttcaactttgtactcgtaatttcttttaaccaacaacttgcaattcccaaacatggagtactgcatttgtcttccatctcaagttcgacatatatacgtacgtactaacgtacgcatgagagtatgtacgaaacatcgacctttaatttggctcgttgatcgatcgatcagtttgcaggctgtgtgtagctaagctagctagccatcgacagctagataacccttgaagttcacttctctttgggaggtttggtatgttctctttgtcttgttaaatttaattttatgaatagaaattctttgataaaatcatgaaattaaattataaattttgaagaaatgtgtcaggccagaacttttgaaattcttgattttgtcatgaaatcgatgctaaaacttttggctttcaacgctgcgctgatggtatgcctcgtcctgctgttcttgtggaaacgaaagtggctcatgatgggtcgagcagcggcgaacccaaatcctactagtggagatgtcgccaatttacaacacgacaacagtacattatagtgtaaataaatcgctgaattatatcacggttttacagatatgtatatgtatactagataatacctgcctggcgaactggtgataataggatgtaccaatgcttatttcctccatttagacactgcagaagttctgattgttggtacactttgtaccgtgtccttcccaaaatgcccttcatccactaagcttgggggaaaactgtggagtgtggacgcccctgttcctcattcatctctctacccctctcctgtcctcaaatggcttcgcccttcgggtcggagtcccgaaccccgtcgacgggctgtagcggcgacgacaaccaccaaatctggtcggtggtcctcccaacgacaggcagcagtgaagacgcggtggatctagaggctgccgttgtcgctctgcaatggcctcataaacatggtgcttggcttctatgacctgcgggattggcggctagcacagttgagctcctgagccagaaggtaggaggagcaggctggcgttttcaccatgtagcgctggcgcggcaagcaacgcggtggctgcgacggtgagggcacgcgtcgaggtggccatccgtcgtagatctcgggggaccccatcctgctagccgcactgggaaggtggcatcatcctccccgctacgctagcggcctagcgccagaacggtccagcccggactagaagcggttccagggcaagggtgcttcaactcctttggacgaaggaggcctcaggcgtgggaagtcctccaagatgcgccattcctctggcaagcgcgctcgtctctctcaggagtgtggtgtgtaggagactgaagacgatgggggcaatgttggaagcggcagaaaaagtacctaccccaacatctgcattgtgtactttttcctacagtaatatttcatttggtgggaggacgatgcatctcagtatcacacatcttagcacctattgacagtgcagattgtaggtgcaggcgaacccaagctcaaatctgtattttcctctctctctatatatatatatgtatatatatgtatgtatatttcctctctctatatatatatacagaatcattttcatatatctataactaatataaatattcatatttttccttttgtcacatctaatttcgtccgagttttgtccatacgcaatccgattaagttagcaatagcgatggaaaaaaattgcaaaaaaaaaaatggcggccgccgatgccaccaccgcccgcctccactccgtccaggccgccgcccctcccgcctcgccgagccgcagccgcctccatgccgccggatctggcggaggtgaggtccggccggccacctacacactgtccgacccaccgcctctatgtcgtccgtcaccaccaccgcggcacctcccctccccccgatctcgcggaggggaaggcgttgccggcccttcctccgctgccgcacagagagagagagggggagaagtggagacagtgagggtgggggagggcatcgcggtggggagagggccgctgccaccggatctacccatcggagggcgccaccgcggccactcgcggtggagaaggccgccgttgctgccgctagctgtgggagagggcaccgctgtggccgctcacgatgggggaggacgtcgccgtcgccgccactgctcgtgatgggggaggtagccgccaccccgcgtcggtcgcgagatcaccggccgccgctgaggatgatggggatcgcggtagggcggtagctgtcgccgtcgccgccgctgctcgcggtagggcaagtagccgccgccccgcttctgccgcgagatcgccaatcgccgccgccgctgctagcggtagaggagggcatcgccccggccgctcatgatgggggagggcaccgctgtcgccgccgctgctcgcggtagagaggtagccaccgctgtcgctgtcgctgctcacggtaggacaggtagccaccgcctcacctcggaccccagatcgccggtcgccgccgccactgccactcgcggtgggagagggaggagaatgagtttagggttagggtttcaacatggaatgttttatatatatctcgagtgatcctaaccgttcgattgaatccgacggctcttaatgcatctaagcagacttgggccacatgggccatgtgcacttaacaggccaagttgtggaagacattcggcccatccttatgggcctaattgagttttatctattctgagttgatttaaactatttctccattaacaaacttaatattttcctatgtttagtttttctttcttcatgttaaattatttatatctaaatggagtcaacaaaaaatttaattgtatatttgtcatgatatataatttaaatttggattaaaaataaataatagagtaaatttcattttggaccactttttattacccgtgttttgctttcgaccaccccttaattaacgcattcactttggatcagataatcttacctttgttgcattttggactaccctaactctcttctcaagcatatgaacaatttcgagtacgctggctccgattcatcagtgaactcccaccactttataccctacaatttatttgacatatgacaagtttgatgtagatagataaaatatttgagtgtgctccaaagtgacacaaaggtaagattttctggttcaaagtgaaaatattagttaaaggatggtccaaagcaaaacaccagtagtaaaaggtggcccaaagtaaaatttactctaaataatattaattatttcttgtatggactatagcctcttttggagaatattactctcttccaatattacttattttataattcataattttttagtccaaaatacaaaaagaaaactaaaatacacaaaaaaaaggtttgcagtacaggagttcggttagtttttctttcccttttcatccaggagtgttggtctgcccctcttttctttccgctatttttagcgctcccactaacacaattttatagatttctgtcgcacactatattgaacctaaaacaaaattcagctctcacaagtacaatgcatagaaaatcgagtataatctcacaattacattatatagattacaagaaaatataatttccggatgacgtgtattcagatgtgtcctttggtcaattccattcatttttcattaggattatgtactttcagaagcgtcatccacaacacacaaatataaagtaaattaattgtcaaaaacaaacatgatttgtttatcactctacatatagccgatgtaatatggtgttttggtaaatcattaatatcaaacttcagtcaccccgccaatacccagtgcaacgcacgggcattttgctagtgagtatatatatatatatatatattctacacccacctcccccaccctacttgggcccaaaacccccctcccacctcagtcaaagcgtcctcccgccggtcaaacccgcccaccactccttcccccacccaccactttgttgctctcgtcttacaggaatcgtgcagtaataggacggtcatcgtgcagtaacaagacaacattatcgcagtaacaacgtcaaaaagtagccatgatggatctagtttcgttaagcgtttttttatgaacttcatggtgcaaacggattggaaatacaagatatgatatgagagaaattgctctctaaagattgagatttacctcttttttagtcctcgtctcactagaacagcatattaacacgacggctaatatgcagtaacacgtctgcttttcgtagtaataacgttaaaaaatagttattatggttctagtttcgttaatcacttttttttacgaacgccatgatgcaaatgggttagaaaaataagacatgacatgtacgttagtactctctaaagattgagatttaaaatactctagatctaaaaaaacattactactatagggccactgttactatgcatgttctctgttattgcaaattttgtcatattgttactgcaaaaagtgcagtaacaacctataaagtttacagtaacaacctataaagtttacagtaacaacctataaagtttgcagtaacaacctatacatttttgcagtaacatatgatgttactacccttttgggataatattactgccgaatcatagtaacaaggtatgattgttacatgtacataactgatttgttcacaaatcatcatatggtaatttggttagaagtgctcgccatgaaccatgagatcatggattcaagtcttgaattcaccaatttatttttattttttctaaaaaagagagaagaaggagggagagaagaaaaaagaagaaaaggagagattagggggatgagagatcgagactttgggaggagggggaggagcgacgggagggagagaggaaggggcgcggcgggagggggaggagcgacgggagggagagaggaaggggcgcgggagggagggaggtgaggacggatggaaggtgggagggggtgtagaatagttataataagggatgggtgtataatagagctactttcatgtatgtagaaagtctaaaaaaataattgatattaaaaagttccattaataaaactataaataaaagctaacaaagaaaagaaatatgaaaaaaaaggaagtagaagaaaaaaaaaaagcttgattcgtatataggaggatcatgtgaaaagagaaaaagggaaaattaggaacaacataatacacgcgagtcctctaatcctcctcgcgtgtcctctaattcttctcgtctagatccatttgtgagattactagggagcgaatgttcgctcgctagcctttccaggaaagtggtgccaacctagaggctgcgcgttctaaccaaattcgtgaagccaaaaatgatggccccccaactattttggagcatttatacggtgaaaatactatcacgcggatgatcgcgcgctcgcacggcagcgaccatgtcgggtttgcttttttatggatcatatgtgattttttttttgttggtccatcatgttttcccattttggcaatatttcttgtgcgggcctgtttgatggttttttaatgggctagacgcatgtcgttctcttcgtgggttgggctcgttacagtgtaggctgaatatatggcccaatcaagtgcttgtgtttttttttatttgattcgaatattatgtataaccatttgacaaatttttctccaaaaatttgacagatgtaattacagtacaattgtagtgtaattacactataacttatatgtaattacactgtaactatagtgtaacttatatgtaactttcaaaaatctctccgtaacatgttatttcggtaaaatggaggtcgtgggaacaaattcttttcacatatgtgtgtgctatgatttgttttcttcctcaccaaaacaaatcgtgtaatagatctaacgattcaaaattatgtgaaacttacatataagttacactgtagttacatgcaagttacagtgtaattacatataagttacagtgtgattacactacaattgtactgtaattacatctgtcaaatttttggggaaaaatttgtcgacaaatgtataggtagtccctaaactttatacaatttatatgaaatacttttacatataaagttttcaaatatttctacgtataaagttttaaatgtttatgtgcataaagtttctattccaaatatttatgtgtgaatttcaataccgaatatttatatttataaatttgtatatcaaatattttatgtataaaatttgtatagtaaatatttatacatagaaagtttctatatatggaagtttttatatataaacttttttaggccaacatcgggcttctccattcgtacgtgggctaattgaaacatgtgggggcaatcagctacagtcgtttatatgacaaatcacaaagaggggaggaagaggagcaaaagtgcggccctctctcaagttgaggatggtcgccttcttccccaaccgtcgtgcccgccttcctttccaacagcccagccgttgtgcatgatgacgctctctctcgtggcctgatcttctggtgatatgataactctcgctttgatcaagtgcgacgtttgcgacgtggctaccaaccagaacaagtccaggacgccgtgcaatcgctacaccacaaatgatatcgtaccaactatgacgcgcggttgatgatccctgcaatgcaaacgagagaacattgcaagaacaagataagatgcagtctaaatattgcgaataggtgattaagcacaaaggaatagttacgattgaagtggtagatctaaccgacccggcaaatcaacacaccaactattgggggctctgaatcaatagtcgccgattaatcgagcgaggactagagacaaggtgaatggcacttggcaaaattcaactaaacaaaacccaattgtttttgaggatgtacaagttatttatagaggaaaataaagctagggttaagtgctaattcgtggaggtggagggggacagttccgagatgggcctagtctattacacggcccaaggcccaagtttggtttcagcaacatcactgccttgttttgaagattcccattgactcggaatgaatttggatatgggactggatgcgtttgaaaggtagcgagataagctttccacgaagtccaagatcacctaaatcggagttggcatgaaggcgctaggtccatttgaagttagtgctgtctccggaggccgaactggattccaaaacttattagactttaatatcttgtagatcctccattcatccgatgtattctttggcaatattttatatttctcatgcttggttgtatgcatatacttgatgatcacatcagtgctcgtcttccacctcacggtcagtggctcgcccacttccccgcctcccagccccgccctcgttcattggcctccccgcacctctgctggtttggcttccgccgattccgcctccgctggcatgccggctgcatctggggaagagggagaaggagaacgggagaacatagagaagagaaggaggaagtggggccactattttttaatcagtagtcccaggggcttcacgagtgaccagaaattctcccaaaacaagaaacctgatgatgtttgttcacacattgctaggatgttgtatttgtaatctatacaaagaaaaaataaatatcgaaaaatcttgatcaatcctggtccaatgaactgttgaaagcgctaggtggtccttgcatgcatggccgatgtggctccatcagtccatgtgcaattctccatcctgtcctgctttggccacactcctgtagaatatccaaccattggatcacttttttgtttttttatggaggttgtggcctgttggccccaaagctgacttggcagccgtgatgacaaatttcatgagcactgcatctcgatagctgacaaaatatgacttcatatatgtgtaaacatgaaatctattgtagtatatagaaatggaagtttgagatttgtccatgtcactatgagtaaaattgatatatcaatgtcgtttatggggaactggtactctaagaaccagtgttattgtggtgaccccaatgagtggaattctattctgtagtttgcagtcaaagtttatcaatcaaataagcactagcaaaacacttttgttaagtgcatgaacgaaaaatatgaatctggatcgtgactagagactcgtgagggcaaccgtgattatcccttatccgaaggaaggtgcatgattccgtttggcctaccaggggtggatatcaagctaactcggtttggctcattaatatcctacgagctaaaaactggctcggctcagcttggctcgtttgaggcctcaactttgtatttcccaccggagcctctaattttgagacggccctgggaaacactcgtagttgtggacggtgctggcggcaggtggcggcgttcgtgctcgctggggtgcagggcgctgggatgccaacaggaggcggctgcacggggcgttcgcaggcgagcggtgccgggggcaggagcgcggggatgccatcagatggcggcgctgggaatctgcggacggccgacactaggcacacgcgagcagcaaggctagtgctacacctagcgcctagagtgagtaggaggggatcagggagaggaattagggtttgatgcttggtagggccattttgggctcgtttttgttgggccttccccatgatggactgatatgtagatatgaagtgttaggtttgggtttctgagctcagctatgttggctcctttggtttgtgagcagctcacgagccggctcattatctctaataacgagctaaaacatcatctcaactcattaagaaatacaacaagccaaaccgagccaaccacgagttgagcgagttaactagttacgagcttttcgtccaccccctagacctacctactggcaatttctcactcttcaatgcatgcgtatcttctttctatccattggacaagcttttggaccttgctaacttggtttgatcgattggtaattggatctcttacagaggggatgtatccctcgttgtaaagctaatttgtcatgtatttgctatggatctctcccactcttgttctcttactaattcggatgtattagttagttactccctccatttcatattataagacactttgacttttttaagtcaaagttttccaagttcgatcgagttttcaagaaaatatagaaacatttacagcatcaaattaatttcattgaatctaacattacatatgttttgatgatatgtttattttgtattcaaaatgttgctatatatttctataaacttagtcaaacataaaaaatttaatagaaaaagttaaagcatcttataatatgacatgaagggagtgagttctttttattacatggaagacgtacacacttacaagcgcacctctttaattagacacatccttgagcaatagatgccactaaatttcacttaatcatatagccgacttcactactagttcattggtcctcactacggaaccggcatatcagcattgacgtattcagaagcctaaagagagaagcgttttccaaaacaattatcccaatttggcatttctttgaaaaagttttaagaggtggtgtttcacactatccccaacggccgaaacctaattatcctatccctaaaatagctcaactaatgtcaataagagaatgaaatttcttaattattctaaaaaaaacaaatatatgtcatatagattgtcattatatcctatatatatatgatcctacaagatttgtgtctcactaaccagttatctatagggttatggacaaaaattgacctctgttactgggctaccatgcttggtgcattttgatactacgtacctgcattttttatactgcatgtattttgatactaccacaaggccaaaaaacatactggttaatgaaatgatgtttgttcacaataggatattggaatatgttgtgtataccactggtttaaagttttgtcatatcctgtacaaagagaaggaccatggtccaggactcatggattgacagatcctgatccaatgaactgaagctctggtccttggcatgcatgtctgatgactccatcagtagtccatctgccaattcttcatctatccaaagtccaaaatgtacatagcacctggaccacccaacttgcctgttgcctccatttgatcagttaatatggttaactaatccatagttttataaagcagtttttctcttcgactaatgtacacatgtcactacaatgaaaacgattttacagacagctaaaagtgcttttcacatgtgggagagaaaatcgtctgaaacaaattaagggcctgttaaaataggtcatttccattagtgggtaaacgaccgtccgtaaagattattttcgtatgtggtattcttaaccctgccacctatagaaatcgattttcacacaggtctgttatatggtaactgattgtgtaaatgaattttttatgccaaataagcactaaaaaatatttggaatcttagaagccatctatacattgtaaaaattgatttctatacgtgaatgcccaagtcaatcgcctaaataaatgatgttacttcttaaaaggcggttgacttaattatcctctaatctgccattgaaaattgatttccagagccccccccccccctcccctcctcttcttttcctctgctatgtagcatgtctcattttcctctactatgtagtatgtgtttaattcaagcatatatattggcatggtttgcacaattgcacactgcatttaatcaaattcggtggttatctttctatagcaaagagttacagtatactgacatgcttggcttcaagcgcgctgttagtttggatatacggagtatattggatggagtgggggccctgctttggcgccaagctgacttggcagccgtgatgactgatttcaggagcactggatctagatatatactccttccgtcccataatataagggattttgagtttttacttgcactgtttgaccactcgtcttaattaaaaaaatttagaattattatttattttttttgacttactttattatctaaagtactttaagcataacttttcgttttttatatttgcataaattttttgaataagacgagtgatcaaacactacgagtaaaaactcaaaatcccttatattatgggacggagggagtagacaggctgcgaatatgcaggggaaagcagctgttgctccaatccaaatttcatcgaagaaagtgcatcattgaatcttgatttttttttgttcacctttgctcctttaatttccaactgccaaacgaaagtaataatataatgcaacttatttggagaaggggttgatattgacaatttttctttccttggtaaggaaaaactgaaacactcagtcggggatgtaatttcagccgatcgatctgtccatagtctatcttgcataacctatgcaaacacattgcgttcagcgttaggtccataatctacaaggtgtcgcagcttagccaattagctgttatctgcttcttcttcttcttcttttttttttgaaccaccctgctggcctgctgtagtgctgttgtctgtttgttgaagcatggagattgtagagggctggattaaatttggctgggcatgggtgagatgggcggctgcattgggcccatccatgaaagttagggcctcaactcataaattatataggccaactaagcaatgggatggaactactaataactactaatcccatggcagaacgtgagtatatgttaaacaacaaccaagctacacaggaaaattctcataaataaactacgatgaaataatatctttttttttagaaacaaagtacaaacgcaggtgctcacaacgtgcgcacactcaccctatgaacgcacacacgcacaccctacccctatgagcacctccggaagactggaccccctatgagcacctccggaagactgggccgacatatcttgagattgacgaagtcaccacaggcacctcgctgtcgacgggtacgtcgcctaccactgaaagaataattagccgtaaatgtgagcacccgtgtcaaatctaggatttgaacccgggtgggctggttccaccacaaggaacctaaccagttgagctatgctcacttcacgatgaaagaatatctaaaatcactctatttaaatttttttattttggctactcctaattagcacgttatgccatgcaagtgcaacagtcaaatcctatcttactataaagtcgacgtccaccaacttataaaggtccaacttataaaggtcaatatactaatatgttatatcatcacacactagtactctcatccttaaagactttaaggatttttttgtgggatgtgacatatcctagtataatgaatctggacatgcttctgtccagattcattgtattagaatgtgtcacatccaaccaaaatcccttatatttacggacgaagggcgtaattagagtatttcaagaaaaggctatatgacatactaactttttcttactaaattcttattaatactgatgtgtcacgttatgagtacatttagacttttgatgacttctaaagctcaacatgcaagtgtgtcacatcatcacacactagcaattattatctagagtattttaagaaaaggctatatcactagaacggtaaccaccatctcaatcgggtgtatcgaggagtgatcctctgtagcgggagatcgtgagaccccctttcgtgagttcggccgggggaaaaagctcgcctctagaaatcacgtatccgttcccaaggctcctagctagctcgcacaccaccaaattatacaggttcgggccgctatgaagcgtaataccctactcctgtgaatgggatttagactgagagttacaagggttcctaaactcgggagaacactcttcgttccctcctccacgagcttaggttttctaagagtcgtcctctttcttggtgggcaaggtcctccttttgtacctcaaggggataccacatgcaccgcctctacctactcttctttcgagtggggacccaccctatcttgaccggaactcgacccgtgccttcgcctggaagctaaaccacagcttgtccttgagtggggctcagcgccatccctcgcctgacacggggaacagccctgtcattccctcatttatgggtaaagacttgtggtggctgccgtccgaatgaccctccgatgggacgggtcatacctacctccactccgccggaagcagacgcgacgtgggagcacggttgtccgtccagtcagacgtgaccggtgtcaggccggtcagacgccggtcacagactggtcattcttgaccatcgcgcgtcactttagcacgccgcatgtctgccccactgcattaaatgtgacaggggcagttggggcgctgcgcgcattaaaggaggttcagcctgggccccctcctcgctcgctccccccgccaaatggcggctgggcgagggcctcggggcaaggcggtgcaagggcccgagggacatgacttggcaccccgaggccccgacccccctggccactcctgcggttcgcggaatgcgggggcaggatcaggctgtagggacacgtggtaagatgtgggaaggtagattcccctcatttcgcatacccccgggcccatatctccgacagtagcccccggcaccacatcggacattggcctcctgaggtcggtctgacgtggtgcctcactacttcccaagctggggttgtgggcccggcagggaatctaagcggatgccgccgagtggccaggttggcatatcaaccacaacagcggtttgaccgccacttaccgcgctgatgatgaggatgcttaaggcgcgaaaatcagggggtcggttagaccacacctcgactccctcgcacgccacgcatgcggaggtactggtgacggttcacccagattgtgcccgtgaccgtcgcacgcccaacgccgagtgtgccgctgacaggcgcgctaaatgcggggcgcggattccgtgggcgacgtgatgagtagttgcaggaaacgatgaggcaactgcaggcgcgagaattgtgggcgcaaccgtgagggcgtgaaacaaggaggcgagcgcgggcgaggcagggataaaaggatacggaggcggggactttgcctccttcctttcgccaactgctcacccgcacactcgctccctaagcccaaacattctcgccactccatgctactccgcacaccaagcccctcgtcgcttctccgccggtcatcatggctcaagatgctggcgacgcagtgcttccggcatcgcgcattacggtggataggcaccttagtctcccccgcaagatcatgccagaaggcgccgccgtgagggcgggggagtcgcggccgcggccacggtacctggagcgatccgtgcacctcctatcctttgctatggcgggattgatcccgccattcttcggattcttccacgaggttttggatttctacgaaatccatgccttgcatctcgcacccaacgtcgtgatgacgctggccatcttcgcgcatttatgcgagatgttcatcggggtgcggccgacgatgcggctgttccagtctttcttcgtcccgtagttgctgcaaggtgcggtggtggggagatgttacttccagccccggccaggcacggcggggcaatacatcgagagtcatctccgcaagaaattggaggactggaagaaggactggttctacaccgcactgccggaccactcgtgacttcggctccccgccggccctcccgaatgatccgccgcatggctggcggtttcggagctgggcgaggagtacgacacagtgcgggatcgccttaggggcctgcgaagcctgggcctcacgggggtaatggtctttggcgactacttccgccgccgcatcgcgcctctccaagatcgatcccgtggcgcgtgggagtacactagacccaacgaccccatgcgcacgcatgtgggcgagcgctgggattgaggcgaggaggatgcaaagatggtgattcggcgggtgctaggtctggacaccgttgagcaaacactgattccagacgggatccttcccctctgcagtgaccgcgaccgggagagtatcttggctgtgatgtcggccatcggcgccggcaggggtcggtcccgccggggcggcaccggtagtggcgctgtcggcgtgggtagcggcggcgcgaccgtaggcgggagtcggaccggcggccccggcgggggtggcagctctagggcacctggcccgagccgcggacccagggtcgactcggccagcgacccaaaagggaaacggaagatgtccgaatctcgaccgccctctcccccgcgcggagggggcgccgagcgcgtggcggaccgaccgccggcgggccacaagcgccccgccacgcctgaggttggacggaagaagaagcggctccggaagataggtcaaacagagccgtgtcgggggagcttcgttgaacccccgaagtggactttcaaccgccctccccacaggtacgactgccggcacccgcttcggtgctttttactcatctcggtcccttgttccttcctcttctttttctttgttaacgcgatcagggttcttctgtagcgagattccttcccatgggatctcggggtccgaccctttgcagggggcaaagtccgaacgaccgaagcggcccgggctttgccgatccagggccgcggggccttcacagcctcccggtggggcccacgggccgcacaccgggtccgaccctgggttcaccacagccgagactcgacccgccgcgagcgatagcggcggcgtctctcccgggggcgactccgaggcccggatccatgcagagcgccacccgggagcggggggcgagggaggtcgcggcccgaaagccgaggctggaggcggccctgagcccgaggccgaggccgaaactaggggtgggcctgagctcgaggccgaggccgaatctacccgagggcccgaagcggggagcgagaggagtagccgctcctccttgcacttggggcgccctcagggctggccgcgtagaaggcgagctgagagcggcccccagtctcgcaggggatccagcagcactccaccgtccgggaggggctcaacgcccaagttcaagccctggcggaagagcgagcggccctggaggcagagtgggcacagctccctgcggaccgcgcgcgggttgacgaggggcgccgcgccgtggactacatggtgaaggtgggacgcaaaatgcgccaagcccaactggctaaaatctaggcgtgcgaggagacgctggactccgtcatgcgggagacggaggaagagcggcaggcagcactgattgcctcaagcgtcctagatgaagcgctgggcgacatccgcttacagtacgaggtccatgccgaggacttgacgaagagggttaaggacgcccgtggtgtcctcgatgcggctgccgcccaagagcagcgcgagtccaccttggctgcccacgagagaatggcggcggaggcggagccctcccttcgccttcgtgaggaggccgcagccaagcgtgaccggaccactctcaccgcgaaagcttcggtggcccgtcacgcggaggagctacggctccgagaagaggcgtgccgggaacgggacgccgcactcgccgagcgcgaagccgaggtgaaccgccgtgaggtggcctcgtgccggctaggcgagcaactcgcgaaacgcgaggaggccgtcgctgggcgcgaggctcagcatctggagagtgctcgcgccgtgcacgcggcgatggcggcgagggcttctgagctggaggctcgggagaaggacctggcggcgggcgggcagcccggcggcgcggagttggtgagccagcttaccgcggctcatagcactcttgccgacctagagcgcctggtgcaagaccaggctagggagatcgcggccctccgccttaccaacgagatcggacccgggcagctctccaatgccgtcgatcggctggagcgcgcggggcgccgagtcagcatctccgtgcgtcgggatagtaagctcccgcccacacagccggcactcgtgctccggctggacgggctggtggcggatctggagaggctggaggaggaggtcggcgagaccatgaaatcgtcgtcggcttccttggcgcgggccgcggtggaactggtcctcgcgagccaccaagcccgcaacccggacttcgtcccatggcccggactcgaggatttccccccggggacctaggcaaaggctcgggagcaagtccgggaggcggccgacgcgatcgtctctaacttcgaggggtcggcccctcggttcaccttcgggcttgcctcggacgaggagagcgggagcggagatgatggtgacgacatcggcggcgaggactaggacgacgttgttagcggcgtcggccttgggggcctgggcactccgtgattatccccacttttaacttccttttgctgtgtgcctatagcggacacttcttgtctttaggccatcgtgccgtcttgtctgtaaatgaagcttccccttcgcactttctactccttcgctttctgcattaaatcctgcggcacagaaagaagaaaaaacaagagcaaaagtatacaattaacctccctgtgatcgaaatgtcgtttttaccccatccccnccaccccccccccccccccccgtcgggctcgttcttgcgaaaaggtaaatccgcactcggtccgtagtacctaagtggtgaggggcaagaccgtcgccccgagggagccgcccagcggcactggccagaccaaggctacgacgaccgggggtcggggacggccgtgtgtaggcccttccgagcccccggggttcggcacaacccggggcgcggcccgcgtttaggctccctttcggtggttttcaggtcacccaacgccacttagggttcggagtaagcacgaattgtcctttgaaccaggacaagccagaggaaagagtgagaaaaagggcgcgtaatggcctccactttaggtggaaaacatttattgcttggaaagggaaaaggatacaaagtaattgaaagtggtagcccccggccaagcccgcacaagccgaggagttgtgcgggggttggcccgagctcctggaaagcaaaaatcgcgacgctatggatagaagcgacggaggtgttcgatattctaggggttaggcaactcggtgccgtcctccgtggttagtcgaacagagcctagccggggaactgtgatcactttgtatggcccttcccacattggcgagagcttgcttagccccagacgcgactgcacgcggcgtaggacgaggtcgccaacttgcagtgaccgagcccggacgtggcgctgatggtggcgccgcaggctttgttggtagcgcgccgcacgtagggccgtgtgccttctccgctcttcaagatagtcgaggtcgtcgcggcgaagataatcctggttggcctcatcgtacagcgcgacgcgaggcgatcctagggaaagctccgaaggtaggaccgcctcggcgccgtacaccaggaaaaagggcgtttcccccgtggcgcgacttggagtggtccgattttcccacaacacggcgggcaactcctcgagccacgaatccccgtgtttcttcagggcggtgtacgtcttggtcttgaggcctttgaggatttcggcgttgcctcgctcgacttggctgttgctcttggggtgggcgggcgaggcaaagcacaatttgatgcccatgtcgtcataatagtcaccgaacagctcactagtgaactgggtgccgttatctgtaatgatacggttgggcactccgaatcgggacgtgatgcccctgatgaacttgagggcggaatgcttgtcgatcttgacgaccgggtatgcttcgggccacttggtcaacttgtcgatggcgacatacaggtgttgatacccgcctcgagccgctttcaatggtccgaggatgtctagcccctagaccgcgaaaggccaagagagtgggatgacctgcaaggcttgggccggctggtgggtttgcttggcgtggaactcgcacgccttgcaccgccggacccattcttgggcatcctgcagcgtagtcggccagtaaaaaccttgtcgaaaggctttaccaaccaaagtgcgtgaggccgaatgggccccgcactcaccctgatgggtgtcggctatgagctcgatgccttgctcccgagaaacacacttcaagagtatcccgttggcagcacaccggtagaggatcccttctacgagcacgtaccgtttggagatgcgcgcgagcttctcagcttctacgcgatcctcaggaagagtatttttgtcaagatacgcccggatgtccgtcatccaaacgacctgacgaggggggccagggtcgaccccctcgggccccgaggcacgcgggtcaccaagggtcggcgcagaaggcgtggtctcggggtccctcggggggttcggtcgcgccgacggctgcgcgagtctttcctcgaaggaccccgaggggagtggggctcgcgccgacgcgacacacgacaactcatcagcgattgtgttgtcgcgtcggggcacgtgccggagctcgagtccgttgaagtgacattccatgcgccgtacttagcggacatatgtgtccatttgtgcgtcggtgcagtggtattctttggatacttgattcacgaccagctgggagtcgcctaggaccaggagacggcggatgcccattccggccgctgccctcaaccccgcgaggagtccttcgtattccgccatgttgttcgtggctcggaagtcgagccgaacgacgtatttgaggatgtccccgcttggcgaagtcagcgtgactccggcacctgcaccttgaaggttgagggagccatcgaaatgcataacccagtgcccgccacgaatgtcggcgtttgggtcctctccatctccggggagggaaggaacgttggatagaacaaggtcgtcaactggggtccactccgcgacgaagtcagccaggacctggcttttgatcgtgtgctgtggttcgaagtgcaggtcaaactcagcaagctcgatggcccactttacaacccgaccagtaccctctcggttgtgcaagatttggtcgagagggtaggatgtcactacggacacccgatgcgcttggaaatagtggcacaatttccttgaggccattaagattgcataaagcatcttctgggcctgtgggtatcgggtcttcgcgtcacctttcggtggggccggtccgtgctgtcaggggcagatgatctggggcacccttgctcaggggcaccggtcattcttgaccatcgcgcgtcactttagcacgccgcacgtctgttccactgcattaaatgcgacagggggtagttggggtgctgcgtgcattaaaggaggttcagcgtgggctccctcctcgctcgctccaaccgccaaatggcggctgggcgagggcctcggggcaaggcggtgcaagggcccgaggggcatgacgtggcaccctgaggccccgacccccccggccgctcctgcggttcgcggaatgcgggggcaggaccaggctgtaaggacacgtggcaggatgggaaggtagattccccttattttgtatacccccaggcccatatctccgacagggtggcaacccccatctcaatcgggcacggtgtccgtcacagcctataagtcacagatgtgaaaaattatctcaatcgggcaaacggctgtcatcgatagctttgacccagacgaatagtcaaactatagcccgtcacggatgacctatctcaatcgagccacaactagcgcccgtcacagatgactactcatctcaattgggcattcactatagcccatcacagatgaccctcatctcaatcgggtgttggtatttcttaacaacattactagaaatataattcccagcaatggcgcaaaaatacttctggtatattatggttatagagttcatctgcaagtgcacgaatataccattgtagcatttcacccgagagtattccaagggtatcgtatttattttatcccgtgggaagatcatgtagagagaacttgactaataatttatatattacttgtaataatcatattctaaacaggggttaagataatccaagggtagagtgacacacaagcattagcttctcattctcaatatatattatctaagctaagtggaaagaaaagagaaagaaaatctattctacttctaatacacataatatacatatattctagttaactgatatactagctaataccctctctccaatgccctcctggtacttcgagaagccacccctgactgccgagttccttacgacatcccgtcatgaccatacaaccggggctaaatacggaggaataccctccccagggaattaacttaggattatatacaggcgcgaaggaatacccgtactgagctgtcaccatcagcggcccacctcttatccgcagcatataaccccaaataatgatatcccgtaatctagacaccacgtctaaactaccagatactactctaatatcatcgtcatgacatacagtaattgcataagcaaacattatacccgcaccaaagcatctcccagataagctagccgtatattcagtataacatgaacataatgtaaagatggcattcatattctcggaaagtatttcaataccataaatgtatatagaagggtattctaagaaaagtacaaagcttacaaaagaggaaaggaaagctactagagccatacccgaactcttccgaagacttccgaactcctgatttctactctattcctattccaccagctagatactactaaactaaacatgagagaaatgagagagctcttgcttgaggtgtgtgagtgaagtgaggatgagagctccttttatagcctcccaatgacggttgtgacggttggaatggtcggtaataccctccaacagtcattggggagccatctcagccgtccagaagaaccctggatcaaatggagctgcggggggttcggccgaaccatgggctgggccgacctggcccaatttcggcaggctgcctcctcttttgctctcatacgcagacttgtgcattttggcccaattcatcgtgtcaattctgagttcttggcccattcatacataagtctgattgccgacatcgttcgattgatttatcgtttgagttgatgtcgattctcctccactttatggttattctctgcaaaaggttagtatacctaatattagtggaatattattattctaacacatttatgcattgcaagcatcactagttctcctctattttggtaatattgacggtcgaaactaatcgataacgaccgtcacaaatgaccctcatctcaatcagacagtaagttaatggccgtcacagatgagtataatccaaaaataaataaattttattttttggctagcatcatgtaatgttccacctctctcaggctagaccagtcttttctgcacactttgtcttcactcatgtacactttgtcttaactcgtgcgcacctaggtcacccatcccgaaattgcttcaggccaagcacgcttaaccgaaattgcttcaggccaagcacgcttaacctcatagttctttggagatcggctttcggagaagaagttgtaacttgttagtatgagtattctattaatcctattaagccctgggccaggatgtcacaccttagcatccctcattcatatacattcattcacatacacaaccatcaacatatttaacaaaaccacattcacataacatccattttgatcacatatttcacattcattcacatatttcacatatttcaccagcaaaaccggggttaattcgatcaaatatatatttagcaagtattatcataaaagaggaggcaaatcagactttaggaaaaaatgaatttctaattaaattttatgatactaaatgaactcataagaaaaatctatcaaaaacaaagtagtagaactcattgagatataccaattttattttggtcatttctccatccgggtttgattgaagtatataaaatttaaattttaaaatataagaaatacaaataaattttcgggtagtaaataatttcaaacgaaaaggttatcaacaacaaagttatataactcatcaagatctataacttttattttgctcatttttctatataacatatttgaacagtttgaatttgaatttgaaaatatgacaacttcaaacaacattttcaaatactaaataatttcaactaaaaaagtcatcaacaaaaaagttgtataactaatcaagatctataacttttattttggtcgtttttctatataacttttttttaacagattgaatttgaatttgaaaatttgataacttcaaacaacattttcaaatactaaatgatttcaactaaaaaagtcatcaacaaaaaagttgtcaaactcatcaagatctataatttttatttttggcatttcttcatcagacaaagtgatagtaacattgttcacaaaattcacatatctctcatctggtttataaactataacagagatatgtaattttttttgaacaatgttactagcactttgtcagatgaacaaatggaaaaaataaaagttatagatcttgatgagttatacaactttgttgttgatgaattttttaattgaaatcatttagtatttgaaaatgttgtttgaagtgtcatattttcaaatttaaattcaaactgttcaaaaaatgttatatagaaaaatgaccaaaataaaagttatagatcttaatgagttatacaactttattgttgatgacttttttagttgaaatcatttagtatttgaaaatgttgttttgaacttgttatattttcaaattcaaattcaaactgttcaaaaagagttatatagaaaaatgaccaaaataaaagttgtaaatcttgataagttatacaagtttgttcttgacaatttttccatttgaaatcatttactactcgaaaaattattttgactaataaaatgaattattatactacagttaactattttgctacaggtcaactcacaaatataaacatttcatatgaaaaatggaaaaaaaactaagtcatctcaatcgggcattagtgtagttaacggatgagtcatctgtgacggacctagttattaccgattgatatatggtcgcacagacatgttagataggcataaaactcaggcccatcacagataacacctatcaatgacgggccatagtttaggaatgagtcatctgtgacgggcctagttattaccgattgatatatggaatattatctcaatcgggcctaaactacggcctgtcactgataggtgtcatccgtgacaggcctgaattttatgcccatctaacatgtttgtgcgaccatatcttaatcgggcactttttcagcctgattgagatgacttcctagtgacggcccgctaattccaggcatattagaggccgtcacagatggaaggttctgtactaatgtatgtactaactttttcttactaaattcttactaacactgatgtgtcatgctacgagtgcaactagattttttataacttctatctacctacctaaatcaaacaattgagatgattgttagtaaaagtttagtaagaaaaatttagtacatgtagcagtgctcggtattttaaatcacatgcatgtgtatcacatcatcatccactagaaattattatataaagtactttaaatatcatgcaaacatgacatatcatttagagtgcaactagattttttataatttctatctacctacctaaatcaaacaattgagatgattgttagtaaaagtttagtaagaaaaatttagtacatgtagcagtgctcggtattttaaatcacatgcatgtttatcacatcatcatccactaaaaattattatctaaagtactttaaatatcatgcaaacatgacatatcatttacaattttgttgtatttttagacctcaatatgcaagcaatgtcaaaacattatctccatatcattttcacattatttaaacatatacatctaccatttctacgatgtataacatgtatgcatctacatatgccgcaacaagcatggggtatgaactagttagataacaaggtatgtaagatctttatgataacttggcaaggaacatatcctatacacatgagcttttcgtataaacaccgtacaagctaactaacaatttttaccaaaaaatgtaaaaaaacgtacgtatattttcaatagtattacatcagaccaatgcatcaggccagattttcttttattcgtgcaacccatatataggtgtcgattcctaaaccagcaccttcgatggcatatcatcggtatcgcttgtgaggtgccagttagggaatctagcacctaagtagggtttccaaccgacacccattacgttttctgtagtagtgtcagtgctacgtttaatccaaccggcattgataggttatttgtggtagtgtgaggtcattcaataactacaacattacatttaattatattacatagcatgaaagtaaatgtaattcattatggtggtaaaaaggatccaaccttttagtctcgccccggccccttaatatcccaaagaatatcaatattaggaacaaccaatcactactacaaacccagaaagctgtggcgccggcgccggcgtaattggtgacgccctaggaggacaacgtgttgtgccttaaggaggtgaaggctgagctccgagacccggacaggctgctctcaatgagatcctgagcagcaagagatgaagaggtgacgcgacgccccaagcgcggcctcgccctccctggccgtggggtaggaccagttcgacgtgtcatcattgcttgatctcggccgccccttctcccctcatccactctacttaggggcggctggatctgctgatgcatgctcgtgggaggccggatccgcgaccacgagcacggggctggctggctcgatgacaataccagcggcggtggtgggtcaagcggcagcagtgagatgattgattttggtatctttatgttctcctctatttgttcttggatgttgattttgtattttagtgctaattctttgattgtgttgttggatagagagtcaggggtgatcgagagtgatgcgattacaacttgacccctatttgaggtcaccatcgtccaaagagacaagaacctatgtcgctgcaatgttcttctctttgtttgttcttcaatgttgatagatttcatcattatgaggggatctcaggggtggttcgtggatggggatcagtagctcgatgcatcgaacacctctagtattttttttattcctagaatctgttataggtgccagttatggggtaagaaccaacacctatttataggtgtcggttctaatactggcagctatgccaatgggcataggtgtccctaaattggtacccagcatctatatgtggttcccaaccattacatatagggtgctctgtagtagtgaaaatgcaagaattagaggggccagccatcatctccatcccaaaatcattaaagaagaacatggaattttgcaattttcatctttggtctttgtccaactaacaagcgaaagtaaaataacatgaattatttcataaagatgggttgacatcgatgtttcggttatttctttactggaaagacgaaacaactgaaacccccttagtcaaggaatcttttcattttgatgcttttagaaaatttatgtcacaaacaaattctaaaaataaacatttagttagctcaatgcatgtggattttgttttgtgtgtatagcacttaggccttgccatgcatgctgatcacctctcggttcaaataatttgcattatcatcatatcttgaaggaagccccagtagtaatcacataggagaagaaaaggagacataatctttaatttagatagtttttgctaattccaaatcattgacttcataactatatgcatgtctgagctggtttggaaaacactagagatcttcatgcgtgagatatatatatatatatatatatatatatatgtatgtgtgtacacacatacatgcacacatacatgtaagtgtgtacacatacatggatgtgaggcacacacatacacatatatacacatacatgtatgtgtttccagatataagtatatgtagtgccgtgttcttgcagtctaattttacatttttagaaaaagaatgcatggtaaaccaccttgaacagcttttcttccacatgcattacccttagtctcagccgaccaattttgacaggtcttcagtactttaacgcatgacttgtctgaattttcagactgcttgtataatgcagtccatgcacgcgaaaaggatatgcataagttcatgcaatattaagtgcttctatatattctatatgccaactttatgtgatgatttcatgttttatatatatatatatatatatatatatatatatatatatatatatatatatatatatctccagtgacgtagtacgtccttgactgaaagagaggacgcaattaatcgatcgatcgataatattctacagagaagacgttttcacgaagaggtacatggactgaacatgtcgttttcaagtgtgggatgagctgattgatttgtctattaattctatttaattagtatatacgtggtatgcacgataacgtactctagtgaatgattgtctctatatatcaagatcatatcgaacaattccgtgagacaccgtaaaaatcatgctagaaactactccctccgttctaaaatataagtatttttagctataaatctggacaaatagttaaaagatgttacattttgggatagaggtagtatatatataactatatatctagaacatggcactggagagatatttatttacctaattaaaaataattttcacaggcgatatccgaactagtaggctttctgaaatggcattgcctgtgtataatagagggtgttatgaaccgtctatgaaggtcatcactaatcgtagatgggaataatattagaattactagtacaagtgatcgggtataggatgtccgatagtcccacgcgaaaatagttttcataggaaatgaatatgtgtctatgaaatctgcatataggtatttagttcgaggcagctatagtatccgcatgaaacaaccatatttagccgctgaaaaaaatcttgttttacggtgagacataaatacaggagaaagttgatacatgaccgtagttttgaaaagtactgctagcagtgagtgttttttcaaacgttcaaaggacccaagcaacctttttcttctgcggttgtacaaatcgagtacacaacggtgaatttgaagaatgtgacgtttcaaccaactcccctagctgatactccctctgtcccaaaatatttaacgccgttggctttttcaaacatatttgacaattcgttttatttaaaaaaattaagtaattgttaattatttttctttcatttaattcattgttaaatatactactactactcaagtttttaaataatattcgcaaaactttttgaataacacgaacggtcaaatatgttttagaaaagtcaacggcgtcaaatatttagggacggagggagtacttccgtcctctgtttaaatataaatacaattgtaactaaaaaaacaaattatacgaaaagttagatctagatgtcctcgttaaatgaggggtgattgagagtgaaaacgtagttagggcaagattgaaagagatttggatgagggtgattaatttagagtatgggataaaattttgattctaaaattgcacgcacttatttattttgagatggagggattatttatcccttaggtttctgatgttgagcataagtattgaactactccctccatttaatattataaatcacttcgaatttttttaagtcaaactatttagaagtttaaccaagtgtagagaaatatagcaacacttatagaacaaaattagttttattagatctgatagtgaacacattttgatagttctttttaaaaaatatatattgctatatttttctagcaaataagtccattatacaccccttaactactcacgttgtctaaaattcaccccttaactttaaaaccgagcatctaacacccccctactatcaaaaccgtttaatttacactcctagaccaaatcagggtggttttcctacttgcgtggcatcaacatatcaatacgggttagtaaaatttttaaaaagaataatggacatacatgtcattgaaatttcctcttctcacaccttctttcctcccccttcttgagattttctcgatacgcctctgccgacgggttcgctccatcacccgtgtcgacgaggcaacgatcacctcagcctcccagccggtaaggttgacctctatctccccaagtgcctccttctccatgcgccggcgagctagaccttcagcttcccatcatatacatgtcttcccaagcgtctccctgactccacgcgccagcgaggtcgaactctggctccaagctacatcttggagtgcctccttctccagggattggtgagctcaagctctcctcccctcgaacccccatcgtctcccgattgccgcaagcttgagctcacgctgtggctcccagctgcgcccccaagtgcctcctccactccatgtgctagcgtggtcgagctcgagctctgcctccttgccgcccggagcacatgctccatgctcaagctggtacgcaagctctagctttgcctacgccttctccccgatttgccggcgagctaaggagcggtccacctccccttttcttcaccaagtgtttcctccatgcgccagcaaggtcaagttccactttccctatcgcccctcgagctcgagcttgcagatcccactcaagagaacttcgatgctggcgcttgtctcaggtgagtcgagatagggaactagggggagaggatagatcagagagaggagaagaatgcctcctgactgatagttgggccctgtgttttcctttttatatttttttactaaattgccatgtcaattgccacataggcgaaaaatcgcctcatattgacttaggggtgtaaccgtgcaagtttaacacttttgatacactactagaaaaacaatttttcatggcgtttggaaaatatttttcatggcggctaagtgaaaaaactgccagcgtagaaaattgcaagggtgggggtcacgggccgccagcggaaacacatcttcgctaacggtcgccttaagctagccgccagcgaaatgtctttgctagcagcccacttaacttgacgccaacgaagataccatatcttcgctagtggtaaggtgatgtggcccacaagcgaagaccacctacatcttcgctggcggccctcttaagctgccgccacctctaattattttctatggcggttcaaactaatcgacatatgttgaccaccaggaaaaatgtaggtacctatatcagccagctacagtactttcaggcaccattaggagcacgattttctctctcttaagaacacgttcatagaggggaaggttttgattatcagccaactacagtactttcaggcaccattaggagcacgattttctctctcttaagaacacgttcatagaggggaaggttttgatcatgaatttttgaaagatatattgcaccagaggttagtatactttctcctactctatttgtcttttttttcatttttattggttgttcgttgacattttgcatggcaaaaagtatgtaacatggaggaacaaaagtatattttatttgctatttggagcttgaaatggacaaaattgtaaagaatattgtgcatgatcgatgttccacatatatatatatatatatatatatatatatatatatatatatatatatatatatatatatatatatatatatatatatatatatatatagttttgatagatttatttgtaggagatctaaactgcagacaatgatgaagaagagaaagaggggtagtttggtaaattttctagttgtatgtagctagtttccatcttattatatatgtagatatttggctagctttaattatgttgtctagattatactggttatatacattaattagtaggattttaaattgacatattgttcaaaatatttaaactaactaagttgtattattttttccgcaattaattaattaatgcatagatagcggacacagcatagatgtataaagagagatcgtgcgtcatacatcgaaggagtcgacatattcatgaaagcagctaagaagagtgctgcatctaagaaaacaaaagaaattatatgtccatgcgcgcactgcaaaaattagaaaatttggatcgatccatctgtaatcgagcagcacttggtgacgcatggatttgttgaatgctacacaaattggtcacatcatggagaccccaagcaaacaagttcccaactaggcgacactacgtgatgtagtgttcagctgggacaaggatttcatggtagtagctgaagaagaagaagtgcatgcagtagaacccgttgatgatgatgatattgttggcgacaatagtcagcacaatacagttgatgatgccggtgatggtaatgtgagcgtagatgatggtaattttgcagatttggaagagatgttgcgtcatgctgaatgtgaggttgtagctgggtccgctcgtgggttgtataacttcgatgcattgaaaaaggcagcgaaggatcttttgtacgatgaggcaaagggttgcgagaaggatttcacattgttgcggatggtgcttgagcttatgagattgaagaccagaaacagttggtccgatattagtttcaacgatttgttggttctgttgaagaaactttttccgcaacccaactccttgccaaccagcacctatgaagcgaagaagcttatttgctcgttgtcactgggtgtgtgaaagatacacgcgtgtgttaaccactgtatcatgttccgtagagagtacgaggatttggacagatgcccaacatgcaagagtagtcgatacaaaacaagccatagcccgtctgagtgtccgaatgttgcccttaacgatgtagaagagtccactccatgcaaagacaacaaaaaaaaagaagattccgcagctggtcatgtggtacctttcggtgaaagatcgattgaagcgtttgttctcgaacccgagggatgccgaactgatgcactggcattatgaaaagcggaaaaaggatgggatgattcgacatcctgcagatgctcgatagtggaaggaatttgacacaaagtaccataagtttgcagaggacccaagaaatgtaaggtttgcattgagcaccgatggaatgaatccattcagtgacttgagcagctcacacagcatgtggctagtactcctaaccatgtacaacctccctacgtggctgtgtcagaaaaggaagtatattttgttggccatcctcttacagggaccacgacaacctggcaatgacatggatgtgtttctggagcctttgttggaggatatgcatgatttgtggaaacatgggatccgagtttgggatgaattcctacaggagtacttcacactatatgcagttatctttgtcaccgtcaacgacttgcccgcactgttttccctatcaggacagatcaatgaggaagacgggccgcgttatttgtgtggatggtaccgtgcacaggtatcttaagggatcgaagaagctagtgtacatgcgacaccggcgtttcttaagaaagaatcactcgtaccactccaaagcagaatatttcgacagcactgttgaggatggtgatgcaccagaaccatggaagggtgataaagtgtcaaaatgacaaaaaaaacgtcaaggttgtttttgggaaggcaaaaaagaaggaaaccaacaagcggaagagaaatgatgccgaagtgccaacaagccatagcgggacattcaagaagcactccattttctctaattaccttccgtactggagagatttagaggtacgtcattctgttgatttcatgcacctggagaaaaatgtcttcgatagcaccattaggattatactagacataccaactacgacaaaggatgggctaaaatcacgtaaggacctcgtgaatatgtagataagggaagagcttcatcctgtggatgaaggcaataatggaaaagtgtagcttctgcctgcttgctacaccttgacaaatgaggagaaaaaggcaatgtgcaaatgcctacgtggggtgagagtgcctactggcttctcctcaaacattaaacgactcgcgtcgatgaaggatctgtcgctttcaggctacaattctcatgactgtcatgtaatgctcacagtattcctcgccattgcaattagagcaatcgaaccagtacacgtaaagatggtcatcacaaagctgtgttatttcttcaatgccatatcacagaaagtaattgatcctgaagagttaggtcctctccgggctttcgctatagagacagtgtgcgagcttgagatgtgttttcctccatcatttttcgatatgatgcaacacctcatagtttatattgtgcctcagataattgcacttgggcccctgtgcctgcatcagatgtggccattcgaacgatacatgtccattctaaaaggctacgtacggaaccgcgcccacccagagggatcgatgatagagggatacacaaccgaggaggttgttgagtgttgcattgattacctaaaagatgggaaagcaattggtttacaggtacctcgatatgaaggtagattatgtagagaaggaacaaaagggaaaaaaagaatccgtgataatgactacaaaaaagtgaaagatgctcatttcactgtgttgcagcaacttgcgatagtggagccgtacataaagcagcacctgcatgaactacaagcaacaaatgtggggcgctctaatgcatagatcatgaaaaaacacaaacatcactttaccgaatggttcaaggacctcggtctaccagatggtgataccacggaagaaagaacaattaaaatgttagctgatgggccatcaagtgtgtacacctcgtggcaagcatatgatctgaatggatacacgctttataccaaagcaaaagaccaaaggagtgcatgccaaaaataatatataatgttgtttttaatttttttaaaaaaaatacatcttcacaggcgggccacgtgtcagaagtcggacggtccctatcttcactatcaggccacgtgtctatccccagaagcctttgggcatttttcctagcgggccacgtagcctaaaatactataagctgccagcgaagaaatatcttcgctggcgaccgtccaagcagagatatttctttactagcagctggcttatattcgctgccagcgaagatatttcttcgctggcggctgccttaatactacccaagtgaagatatgtctttgctggcgggtgtggcttagtcggctgccagcaaagacatatcttagctagcggtatataaccgctagtgaagatctacatttttactggcctttgctttgtgacggctgtgatttacgccagcgaaaatccaaaatggccaccacgaaagatggtttccatagtagtgatagttgagggtagtgaaagtccggttttagagttatcggtaaatttcagacaacaagaagagttaggaggtataaaatgaactttatctcatttttctattaatttgatcaaacctaaaaaattttgacttaggaaaaaaatcaaaatgacttataatatgaaacgaatgtagtagctgttttgttaaggcttggttttaaacagttaatacagcttagctacttctcgttttcaattaccacattttttaatggctaagtgagatgtttcgtaaaaaaaattatgtgtagaagatgctttaaaaaatcaaataaatctaacttttaaattttactaactaattatcaaaaaccataccttaatcgtgttcctcgttttatatatagcaactcagtgaaaacctatgggtcgaaaagaacgtcactagtacagatcctctcatctgtgatggcccatcacatgcctgggcaacgtgggccgtcagaacgaagtcatctcaatcgggcctaaatttttgccattgtagatgtactcgtcggggtgcatattcctaaggccgtcaccgatgacattcatctgtggcgggctcaaagttaggcccgattgagatgacctccactatctcaatcgggcccaaatactgagcccgtcacagatgagtgtcatcggtgacgggctccaaagaaggcccgattgagatggccttaatgcccgttcaccgatgactcttattggtgtcgggcttctatttgtgcccgttagagattagtgtgcgcccgttagagatgacattttttggcccaattgagatatactttgcacactatatatactccaggagtccgttgtctgtagttatcccactgttcactattttggtgggaggttgaagagggcgaatttttgtaatttttttacaaacaaaaacatgaagatcataaaaataagtaaaagggtactaatcatttcctattaatttagtagtacttatgttatgagatgttaactaatattttgttcattgttcagcgatgaattgaagttggatgtacacgactggcttgaggcgtcagtacaaggagtatagagatgacgtattaagttttatgaaagccgcagaggaggataggataagaagaaacaacaagtacatgtgttgtccatgtagcgattacaggaatgagattttgttggaagatgaaaaggaagtacacgctcacttgatacaccaccggggattattcatggagagatacacatgttgggtgaagcatggagagcaagatctgggtactgatggtgcagctgcagacggaagtggtaaagacaatcatgaagaaggagatgaagaagagcataacatgtttgtcccatctccattgggtggtgaaatggttgatgtggaccctgatatgctgcaagacatgttacatgacgttgatgacccaactatgaacgagagagattccatgaagttaagcaggttggtcagtgactcggagactcctctatacgcaggatgcaagccaaagcacaccaaattatcagcaacattagacctaatgaagttgaaggctagtagtggatggtcagacaagagttttacagaacttttgggaatactgaaggacatgcttcctcaggaaaacacattgcccgagacgacatatgaagcaaaacagattctgtgtcccctagggttagaggtccggagaattcacgcatatccaaacgattgcatattgtaccacaagcaatacgcggacttagtgcttgtcctgtctgcaaggcttctcgatacaagcaaaagaacagtgcaggggagggaaagaagtcaaagcggggtggtccgatgaaggttgcgtgttatttatcaatcattgatcgtttcaagagaatatttgtcaaccctaatgaagcaaagttagtacgttggcatgccacagagagaaagaatgacggtttgctaagacaccccgcagatttgatttaatggaggaatatcgatcgaaagcataaagactttgttaccgaccccagaaacatgaggatacgtatgtgctcctaagagcatgtttaatagcagagctcactgctagttataatagttataaattcattctagacctaacattatgtgtaataggttagctttaattttccctcatctctttttctcacactataaatttaatatatatatatatatatatatatatcttgcagcatgtgtagagttagttctttcatgagagctaaaaactcctaatttttctttattttttcttttatgtaaacctatagcttgtatatactgtagctcactgttatccttcctcgatcgcgtcagtcaggtttgaactcgagacttctgatttagtacgttacataaggattaacctactggagtggccaattcacttttagttcaacaataattcaattccagcggtataggcgacaagggttgtcatatcatctcctttaatcaaaaggcgtcgacctgaatcatatcctgtctcctaattaagcatgtgggaacaggagagcaaatctggtgctcccttctctaaagtatgcaaataagtttctaataatgtttatgactatacatactactccctccgttctaaaatataataacttttagcctttaaaatttgtctaaaaatataacaacttcttcaccaatattattttcttaaccaatcacaatccaacaccattcaatttttctacctacctccaccttctatccaatcacaatcttcttctatttaattctaccaatttacttaataaccgtgtataattctagaaatttttatattctgtaacggaggagtaagaattttcttgtaaaagaaacgactcatgactaaggagaaaaaataatctcattctaattttcattaccactgtgatcactgattcacttcactcatgtctaactcaatttttggcatgccagtttttttttcaattttttccacacttaattttatgggttaattggatccatgcaactacaaatatgtcaaattagaaaaacaccactactactcgcgatatcggttgggtgccactgcagttttgagaaattggatccatgccactccgtcgcgttttccgtccactccccgttaatgccgtctcttcggggcgccacttcatattttcccgtgcatggacgacgccaccgccgctccactcgacggaggtcagcctcgccattgatgatgccatcgcggagatcgaaggcggtggcggctgggacctagggtctggatgcggccgtcgccgtgtgggacgggaagaggggggccgatggcagcggcgccggtggtgccgactgcatgaagctccataggtcgtcgtcgctgccgatgacgccgccgttggcaccaccgagcagcctaatggccgcagtggagtagtaggcgaggccgttggctgccgaggcgtcggcgtcgaagcagagctggtcctcgagaggtggcagcttcacgaagccgtggccgccgagcatggtgtcgattggccggaggtacctcaacgctggcctgcggcgaggtgagctcatgctcctgcttacttgacctgcccatgtactgcaggatctcgtcggcgcatggtctccctgtcggcctctagcgcctggagcggctgcacaacgccacgaagctcgcgcgcagcaacatcaagagcacaaacatactgctcgactaagccagcaaggcgtgcgtggctcacggactacggcctggcgcagctgggctcgtccccggcggtggccgcggcgagctcgatcggcggggtaccgcgacgtgtacgcgttcggcgtggtgctcccagaggtgctgacgcggtgcccgggcgtcgcggcgagctcggcggggtactgcggcgttgaggctgtcggagtaggcgcgcgtgtgggacgcaataaggcggagccaagcgcgacgcggagagacggtgtcaacggagagtggatggaaaacgcggcggagtggcatggatctaattttccaaaattatagtgacacccaaccgatatcgggaatagtagtagcattttctaatttgacatatttatactgcatggatccaattaaccctaattttaatatagtctatgtatatacatagtaaactatacttgttagttagcaatgttgtgccacttcgcctctcgttggtttcttgttggcttatggaccgtaagttaactagtaaaatttaattttgagtaaatttcactttagcccatttttattacgatgtttcggtttagattaacatatttttattttggaccaggtaattttacctctgacactttgaaccaccgttagctcttttactcatctgcatttaactagcttggcacataaagaaataatctatatacagctgtaggagtttatttaaaaaaatcgacatacttgaaattgtttatacgcttgagaagagagtcatggtggtccaaaatacaacaaaggtacgattacctggtagaaagtgaatataaaaggataataatacaaagtgaaatttcggtaatcaaaatatcatccaaagtaaaatttactcttaattatttatacttagttaattttgagggtttttattgtagtttattttcaacattgatttttaaatcactaaaataatggctataaaggttttatgtacaaattatcgtctgtgcttcgttcctcggatgcttctatctcttcaggaaaagaaaaggatgcgtcggatatgatctccgatctcccttaaacagtaaagaatacagcgacacctttgctttaattagcttcacaccaaactttgaattcttttttttttcaaaatgaaaggacgtaacagcctagccacaacattaattttgttataatatattcaaaaaagttgcaaaagaggcattattaccaaattaactcttttacatacacattcatgtttacttttcctaattaagttgatgcacgaaaatttggaagccaatcatacttatttttatatttcgaagaaaaaacaaaggaatggaatcctccaatttcaatctaaaatttgtccttcggtgctaatatgtactccctccattttaggttataagatgttttgactttggtcaaaatcaaactgctttaagtttgatcaagtttatagaaaaaaataataatatttttgatccaagataaatttattataaaaatatatttaactattaatttaataaaactattttggtaatgtaaatattactatttttgtctaaaaacttagttaaatttggagcagtttgactttgaccaaagtcaaaacatcttataatctgaaacggagaaagtaatatactacatctgaccgtcctaaaatgaaattgtttctggtttgtctaggttcctaaataaaatctatattttagaacgaaatattattatgtttattaatataatactgcactcctaaagctagccaagtcgatccaaatccaagcggctctagctacctatagggtagcttagctcaagctttaatttggctcattgacggcacacttgctggttgtactagcattttttttaagataatgaaataaaaattctgatctttgcttcaaagttataacaacttattacaaaattctctcaaagagagcaaatactcaggcaaccataagaactgaaaaaataaagccaacacacaaggaaaagccaattattaaattctatttgtgaatctccgttcgtagttggcgaaaatctgcactgcataaccataacttctaagctaagacatgtagaatcatggccggccctaggacagtgcggggcctccaaaatatgtatactatagtaacaagcctgataggctattttgtgcattgagaagatgctgctagatcagattgttattgacactatcatcactgattttgtatctagaactattagaacaaattattttaaatgatctagagatatttatttttggtattttaaacttattagtgtgaaattcgttaatgacaatgagtttttaaatattaacttgtatttttatggtgaatgggggccttcattttttgttccgtactgggccaccaaaaagtcagggccggccatgtgtagaatataagaactccttgttctcttcacatttttgaaaatgtgcccagaaccggagccagtgggatgttggttgtagctagctaggcgtccaataggagatgcatgcatatgtacactagatctggctttcattcactgattcacagcatgtgttgtgcacgccgtcgtgtcgccgatgacggccggcccccatgactttgagagatgcttccatatgaaaaacagagcatgcttggtttttgcagcgatccagatttcgacgtatgcatgcgaaatggcagcatatgcaacgcctgtctccaagatgtactcctacactacttacatatttaaattttgcatacgatccaaa

SEQ ID NO: 10069 - DNA, 29386 bp, Oryza sativa
gatctatctctatagatccttatgcccagaatatatgctgcttcccctaagtccttcattgaaaaactatttttcaacgatgtcttaacggattcaagcataggaatatcattcccaatcaataatatgtcatctacatataggattagaaacaccagtgcgctcccactaatctttttgtatacacaaggctcttctttgtttttgacaaagaccaacgccttgactacttcgtcaaaacgaatattccaactctgagatgcttgcttcaacccataaatggatttatgcaatttgcatatctttttagctgattgtggatcaacaaatcccttggattgtgtcatgtacacatcttcatcgagatttccattgaggaaagctgttttgacatccatttgccatatctcataatcgaaataggcagcaaccgctaaaacaatccgaatagattttagcatggcggctggcgagaaagtttcatcataatcaacaccttgaatttgtctgaaacctttcaccaccaatcgtgccttgtagatgtaaacatttccatctacatctgtctttttcttaaagacctatttgcactcaatggcttttacaccatcaggtggatcaaccaagttccaaacttgattgacatgcatggattctatttcggatttcatggctccaagccatttctcagagtctggtcccaccattgcttcctcataggtggttcatcgttgtctaacaacaatatatcacattgtcctgtagttaacaatgcatacctcgcaggtgtacgccgtatcctttcggaccttcatgaagccggtgcttccacaactggttcaacaacaacttgttcaacctgttgaacaacatcttgctcagcttgtggttgtgtggacgttgaagcattttccggtgtttcctgaatttcttcaggtcgcaccatgctcccactatcctttcttgaaataaactctttctccaagaaaacactgtgtcgggcgacaaacactttgccctcttcccgattataaaaataatatcctttcgtttccttaggataccccacaaagaagcatttatctgatttaggtgtgagtttgtccgattgcaaacgttttacatagacctcacagccccaaatttttaggaaagacaaactgggacgcttccctgtccatatctcatatgatgtcttatccactgattttgatggaaccctatttagggtgaacgcagctgtctctagagcgtaaccccaaaagcatagcggcagatcagtttggctcatcattgattgcaccatgtccaacaatgtacgattcctccgttcagacaccctattccactgaggcgttcctggtggagtgagttgtggaacaattccacactcctttagatgattgccaaattcaagactcaagtactctccaccacgatcagatcttagatacttgattgtcttgcccaaatgattttgtacctcattctgaaattccttgaacttttcaaaggactcagacttatgcctcattaagtagacataaacatatctactaaagtcatcggtaaaggtaataaagtacccaaaaccacctctggcagttgagctcattggttcacatacatcaatatgtactagtcccaatagctcacttgacctttcactttgacccgtgaaaggtgcctttgtcattttgccaagtaaacaaaattcatatgtctcaaatgattcaaaatcaaacgagtgtagaagtccatctctatgaagcttctccatgcgtttctcatttatatgacccaagcgacaatgccaaataaaagtgggattcaaatcattaggacgttgcctttttgcattaatgttatagactgaacatccatcaagattcacaatgtataagccattcatcatgggtgcatggaaatagaaaatgtcattataatagactgaacaaccattgcccacagatctaaaaccataaccctctggttgcaaacaagaagcagagataacgttcttacacaaagctggaatgcaataacaattatttaactccaaaactaatcctgacggtaaagataatggcagagtgccgaccgcaacagcagcaactcttgctccattgcccacgcgaatatccacttcgcctcttgctaagctcctacttcttttcagcccctgcaacgatttgcatatgtgagcaactgacccggtattaaatacccaagaattagtagaggaagtagcaagattaatttctgtaacattaatacttgatgtggaactctttccattctgctgcttctgcttgagctactctaggtatttcttacagtttctcttccaatgacctgtctccttgcagaagaagcactctgcattcttagcgggtcctgtcttttgaaccttggtcttagagttgctagtactcatgatctcatcagagtttagctttctcttttgaccactcttcttgttgttgggcttgcgcttatgcataaccatcacatggttggagtttttcttaatgctttcctcggcagtctttagcatcccatgcaattctgccaaggtcctgttctagttgttcatgttgaaattcattataaacggctcaaagctgggagggagcgactggagaataaaatctgtagccaactctaggctaaggggaaagccaagcttatctagactctcgatgtaaccaatcattttgatcacatgtgggctcactgcattaccttctgcaagcctgcacgcaaacaaggactttgaggtattaaacctctcagctcttgcttggtcctcaaacatgttacgtagtcccgtgattatcgtatgagcatccaatgcctcatattgcctttgaatcttaggggacatagtagcaagcatgagacaacttatatcatggtattcattgcatcgcctttcatgctccctacattgagcagcaatagcattgttgggcaagtcaactggaaaaggctgtgtaagcacaaactctttgtgctcttgcctgagaacaattctcaggttgcgataccaatccatgaagtttgttccagtcaacttctctttctcaagaatagaccgcaagttaaaattggatggtgtaggagctgccatgatgtatgcaaaatcagcaccatgtttacatttaacctttcattaaacaatttaacaaaatatacttccactatgtattgtgaaacaaaattccctctagtaatatagtgagtcaagatcctcattttattagtgtctagtgagctttggcatcacagctagacaactatcaaaataggtaagcaacaccttgctaatcacatcatatgtgactcttgtgctgttggggtgacatctccatgtccaacccaacctatgccccaaggtccaaaactgttttgataaccttgtcaagtaaaccaataatctctgcatatagatgtccgacatctatcctattttatcatgataaaaagtgacactttactatggcaaacccatcacttatgatcacaaccgtaataggtgcaattattggaagagcataaattacacttaatttttctgagagaatctatcctaccatgttatatcaaatatacaacaacaataaagtaagatagatataaaaacctaagagaaatctaaggggcaacgcacacggcggtcccgttttttctacgactcatgcaaaggtcacggggtacatagatctcatctacgacccgccatgtgaaaaccttaacggcgtaatcaaattatgctgaaaccgagtcaatctcattggctcattttttctcattggcgtgcgttccagtggacatcggactatccgatgaacacaatcgcgctcggccttggtgagtactagacattccagtgaagtcaccaacacacattccgatcacctaagaactcatctacaacaagatagatctcatttactatactgtatatcaactatatgcaatgatctagatcataagctatacatggcggctctgataccactgttgggatacgatacgcataggctacgatagcataaatcaaaattttctatcgcgtaaaccaggaaccatgcaagtattagatcatagatcgttaccactcgacgcgccgcgcagcggaagaagacgctgagaagtcgaaggaactctcgggaagtagcgcgcgtcgatgtagagaacgtagtcgatcgcatcggctcgaccttctcctcctcgtacgttctcctcgccgtactcccacgctgatcagcaccgcaaaccagcgacgcctctaccggtatccacacgtacagggacggaacgccacgcgcagatgtgctagcacccgcgcgcggctatggttttgctcggggagggaagtgacggctagggtttctcacgtgatgcaatacctccgccggtcacacccctcacgaatatataggatccatcacttgggcctccaaggcccgtaggaatcctattcggatccctatccaaattaaactcatattggatctccatccaatccccttattccggcccattaagcgtgcgaccctgtaggttcatatatactcggttgtaaaccgaaaactccttttcggtccacgcgtcaacagcggcccctagcagaacgtattgacccaccgggcatacataaagatcatatcggctgaacctctagtgtatacttgtatgaacccctttgcctcacgatatcgattaagctcaagactagatatgtgccatcctctaatagctcaatcattcactcgaacctgttgatagattatataacttgtgattgactcctcaatcacctttggcatggccatgcacttccatattctacaacatcgaggggtccagagatatctctccataggaggggcaaatcccatcttgattatttatatcctactacatgtttcatagcatacccgaaaactacttttataactacccaattacggagtagcgtttagcagtccctaagtaagatactacacatgttgggaatcatgataatctcaggtctaaggattcaacaccaacactaaatgagatcactgatgacacaacacatatggctcttgcagtgtctcatgttgggtctatccaacaacatgttcactaacatgtgtccacattattaatttggtatctctataccatgatccatgagacatgatcatcaattaatacatgtgctgatcatctaaatatatttgttccacatatgatatttgatcagagatcctttataaatagcaacacataacataaagagtcttatgaaagaatcacatattcattaaccaataatgagttatctatttcaaggaacaatgtcggataaatatgtaaacatagtatatgatacaatcatctctataattgtctctagggcatatcactaacacttccttcgtctgtgtactttttaacactgggaacatggccgggtttatgagtgggatggatctggaagaaaggtggagttgggatatgacgccacatgacaggtgggctaagactgaatataactttttcttatgctaggagatttttttttcattttatttagaaaaagtttctttgagcaaagttgactggttcgaaaaattcaaaggtctacaatgttataaatcatcatgggtcctagccaaagcaactctatgttgttgatttgtttgtgtcgataagattatgctcccacatgacgcacagttgttatcgaggtctgatttaaaacgtcgataagattatgctcccacatgacacacagttgttatcgaggtctgatttaaaactagattacgatgtgagacacacagggtttgttgtcttttttttcagtgtttaattctaattctgttatatcgggccctctactccccgttcgctctttctgactaaggtttggcatgcgccatttccctccataattaggcgactaccctctctcttcttttacttcctcaacttcctcacattttctttacttctcaatcgcattcgatgcggcaaaatgacggtgtatgattctaaggcattagaaggtgctgcaagtgaaaatatgtagataattgatgttggtaagagcccgccctctagaaccgcacagcgcagcccaatcaacgggtgagcctggttacacacaccaccccgcatatactttcttctacgcttcatgtacttaaagagttaatccgagagtgatatggttagagggaagatgccttataaattggttccacccttgctaaataacaagttggtactaaacacaagtacacagctctcatggatcacacaagctaaattctaattgagtcaggatatcacaatgttacatcactagattcatttcaatatgtaagaaagtttttctagaaaatcttagcgaatgttaaaggtggtagattagaaaaataatctatttttgagtaagttaatgaaaaatatattttctcagagggctcatatcatgaaaaacaaaccctaataatctaatatttatatatttattataattttggtttacatgtcctaacgcacgtgtatttttctagcatataaaaacgatgatcgatctgtcaagaatttaaacagcaaaacagctaactaatctcggatttgggttacccaaattgagtggcagtgtatgacaccaagtcgctaacaaacggatcgaaccgtgaactgataaagaaaaggaataagttcactttgactcccttaaaaagtgactgaatctaatccatgaccctaaaccgcaaaaccggatatctcgacccccgaactattgaaatcggtgcaatttgactccctaggtggttttggagggcggtttcgctgacatggcgctgacatggcggtgttgacctagtctgtggggttgacgtggcgcttaggtggcatttgaattaaaaagtatctgtaggacccgtttgtcattcacacactaaaaaattgtggagcccactgacatgtggggccccacatgtcatcatctctttcttcttcctcccttgtctcttcccttctctctctccccttccaccggccgcggggagcacgggctggagcggcgacgggagctgagctcgccactgccacggaggtcggcgccggcgccgctggaggcgagatcgaccggccatgcaagtgcgtgagtcctgggcctgggagcccgacgggattggaccgccacggagctgcacgttggctgcggcccgggcgccctggctgaatgcttcatgccacagctcgtcagcgtcatgcgcgcagccgtcgagagggtctgcgtcgtgactcgtgacccaccaataaaatcaaaaaaaaaagaaaatcagccatccagtgcaaattcaccacaaaaacacggtgaaaaccacctgttaattatgaaatctccaccgcgatgcaggagatgggaaagagcaggtctcggagttctctttatataggccggaggggaggaggtcgaccgcacggacggaaaacggcgccggcgacggtggagctcccaattgaaaacaccggtttaagaaatcgattgggggcaatttagtgcgggattaagtgggatttgttggggaaattgatgcccactacacaaggaattgatttttgcaattaatttggaggagaaacgatagggcagggagatcaacggaggcggcagtacttgagtttcatgggagagatgaacagacgacggacaaaggtggaagaagctcctggcgagcggggcccacctgccagcgcatggacagcgaatggaagagaaagagaggggggaggatgaggagaggatgatttatgtgggccccacctgtcagtggtcccacccgtacttttggtgaatgacaaatgagtcccacacatatttttttttatttataatgccacttaagcgctacatcaacgccacgtggaaaggagaccgagtcaacactgccacataggcgccacatcagcgaaaccgtcctccaaaaccgtcgagggagtcaaattacactggttttgagagttggggggtcgagatatccggttttgtggtttagggtcacggaattttgagggtcacaaagtgaacttattcctaaagaaaatacagaatgaattataatcaggccgaaagtacagcccaaggccgggccaggcctatatatgtattcatactgacccatgttttcgctggccttagtctgaccatcaacaagaccaaagcccaaaggccatccaacaaactagtcaccctgcatctctctctctctctctctctctgtgtaacattttgattttgtttgaatgcaatttgatcccaaaactaaaattctaaacactaattaaattaatgcgttgcaagtggagcctaaatagctgacgatggacccatcaatcaatactaatagcacttcttttactatctaaaatactatcgcaactttttttaagaaaactttcaattgtaacagtaagtataattagagtataattcaaatgcaactgtgccgggtgagttttttctttcttcgctccacacaaatctcgacaggatctgaattcccccccttttttccttcaaaaatctcactgcaatctaacagtctataagttacggacatgtaaaagtttttttcacccaaaaaacttgtaatattctttagcattatcatttctttttgttacattcagatgagttaatgctttgccatttctcttgacctcttgccgccatttaatcatacagtagagatgtgtagttggattcttagcccaaaatccgtcataaacatctcattccatccactaattatcttcgttttttcaattaagttataatgttattcgatcgcgatattttcactcgtctctcccagtactcatgagctacgtcctacgctttctcctcttgtatgccaacattttactttattattttcttagctactacatactccatcctaaaataatttaaacctgaccatgagaatatgagtctgaacaaggttcgtagttaggatttaatgcttttttatgacagagggagtatataaattcagtagacaatccttaaactaatttattaattcgtcaaattccagccgggtcgaaaaactcctatccaaaacgtaaatgtctgaaaccacaaaccatttattgtttacccaaattaatttccacgtgcgtacataaaattgtccatttcttccgcatatagtgacagtaacaaagaacaataattaagcaccagaagaactaatgaacagtcaatcgattaagcatgcaaaagttcatatattgatcatgacccacactactaactaactacttacttgacactctacctgaagattaattatatatgttcgtccagcttcaataaacctagcctgccgaacacatattacatatatataattatagcttggtcatgaattaatacaaatgcatgcgcataagtaactaatcaattaaagacaacatcacgagagttaataattagttatctaagaacaaccaagcctaagctcaagatccaacccttcctccataccaccaccgactccaagctccaaatccacctccaaacccttcgtcgccgccatcgccgccgccgccgtggagaagaagctgtagacgatggccggacgatcgccggggcagtagcactgctgctgctgctgcggcggcggcggcggcggcggcggtggcggcggcggcgagaggttgaggttgggaaggggatgaggtctagggttggggaattgcctgagcctggccctctccctcctgtgcacgttcatgtggcctcccagcgcctgcgccgacctgaactccctcctgcagtagccgcaggtgtacgacgacgacgacgacgacggcggcggcgacctctgcagcggcggccatgagaagccgaagctgcagctccatggccgctgatgctgctgatgaaggtggccatggccatgctctctcgcgctcctgctctccattgatttactgatcgatttgtagtgtggttgtacaatgtgtagagctagcttgacactgagctgagctagaaggccatatataagcaactcaagaacagtgctcacggaaaactgaatagtccattagcgcgtgattaatcaaatattagctaaatttatttttaaatttagatcaatatgaattttttaagcaactttcgtgtagaaacttttttttaaaaaaaacacaacgtttagcagtttgaaaagcgtgtgcgaggaaaacgagagagatgagttgggaaacttggggtaagaacacattctaaagtgcatgacatgtggggtcccaggctacatgtatgacagacatgtgggccactgcatgtcggtcagacacacacaaactatatatatctggttagtgattttcaaagggtagctagctagtgatgcatggaaagggagagagagaagccattgaaagcagctggtttttgccaagatgtacaaacggcatgcaatcgatgtgtcgaccaagataccgtcagagcgatgagagccaatgtggggaagactatgtgacatgtgtttgcaacccctgcagaagctttccctgcaggacaagacacccgtggctatccagccatacatcagatgcaagagattaacctgctggctttagggttagcatccatgcatgcagatgcagtcacacagggcccaccatttttctgagctcttgcaaagctagtcttcgtcctaggagactgcacagttgcatatatatttggatatggattttcatctctcgaggggatgtcttctctttgcatgtcatcagttataaaaaaatttgacaacatagattaatatgaaatataaaactccaaaaacgtgcaagaccaaattcaacttccacaagttgcaacaaaaagaacaaaataaactgaaaatagttatcgtacattcgcaactatatttgttatttttgttacaacttgtagaagttaaattttaacttatgtgttatggagtgatatatttcatattaatctatcttaccaatttttttaaaatattttgatgactatttaggtggcatgcacgatacgaggggttatcacttgagggatgaaatcgctttccacacacacaatttatctaattgcagagatctagctaggtttgcactgtgatctgagctaggttttttgcttgcttctgactcactccagctagctagctgctggctgcatctgcttatatatatgcattgttcagagaggcaaaaggagtagtgatatgttaccgatgccctgaaagcatacttggccttactccatatatatttgcattcaactttggtcagcatatgttagagtacactgctcttgtgttcatctttcttcctttttttttcttttgtttcacatatgtaatgtatatgtatattcgagcttcatcattggttaggtgtcatgtctagctgcaagacatcacatcagtcaatttaagttgttcacagctgaattgaatcaatgaatgcatggagtggttttcatttttttctgggtcaactcggtcgaaagattgaaggcctgcaggcatgctatgagctcttactggcttgtctgacgagtgaacaagccttttggcagtttgcactgcatcccattggccagcatggggcgggcaattcaggcttaggaacacatgatgctcttagaaaggtgaagtaattgttgctaaaagtgtactagagtactagctacaactgttctccccaacacaactatatatgatccttgatggcatgatgtcccctgaaaattgagatggtactattatctctttttttttacttgatgtttacaacaatatagatacaatcttcagtgcatatgtttggtcattcctttttattatgtatttacaacaaaaatattggattttcagtgcaaattttcagttcaatagaatatatttgattttaccattatatttgttacaattaaatcattacaataagttcatattttgttatatttctgataaaatatataaatatgattatattgctaattaaattaattttatattatacataagatagcgaattataatggttgaaacattagaaaaatacttactgaaacatccaaacaacaacatgagcaacatttataaatgaattaatgaaacactagaacatatttactaaactatccaaataacaccacatgcaacacatgcaaataaaccagtgaaacgttagaaaatatctaatggaacatctcagtaactttcgatccggtgtttcggaaaacatctaatgattatatatatatatatatatatatatatatatttcgaatatagataaagggtgtgttcgctgcagccggctcccaatgtacgcacggaaaacagagcggtccattagcacgtgattaattaagtatttgctaatttttttttcaaaaatggattaatttgatttttttaagcaactttcgtatagaatttttatttgcaaaaaacacatcgtttagcagtttgaaaagcgtgcgcgtggaaaacgagagagaggggttgggaaaatgggcatctgaacacagccaaagtgtgtgtcgcacaacaattttcgtccgggattaaaaattattaaataatgtatttctagaaattaaattaaaagttaaagcaatttaatcaagtgaattcatgagggaatcaaaattttcctttaaaaatcgtggctggaaatatttttctaatattctccgtgctatagtatactctctgaaatttcctgtgaatttttggagctcaatatctaattttaacatcacaaagttcattaaatccattaaataaaataaaaaacaaatttaaatctccatccttcactttgggccgcttcaggcccaaagcccttccttcgtcccttacggcgcccactcggccgtcctcctttccttttcccctcccgctcggcctccctcctatctactcccttccctgcccagttcgccgctcggctcgctcctctccttccccgtaagatatctcgcctccctcctctcccccgagccaccgaccgttgggacccacctgtcagggttatccacttcctccggccaaacctccatggctgccagcctccaccccacgtcgccgccaaattcagtgccctcccgctcgcgcgcccgcgtccaaacagcttggaccggtcccctccacatcctccaccatttcccccactctccccatgaagatcaccgccggtttgacctgatgcgccccacatcgtcgccccacttcgccggcgatttccgcctcttttagcctcatgccgcacctccgagacctataataaccctccccatgcatccctatatcaatttcccatcttcctgagctctcctgtgccccaaaaccatcccctcgccgcaatcctgagctctgccacttgccgcaaaactccggccaatcgttgccgctggtgtagtcactgccgcaccgcgccgaggccgcctctggcttcgccgccccacgccacgtacaacccgtccaccaccctacttccccaatccattgtcgaaacgccatcttccctgcaaacccgagctctaccgccactttgctgactccggccggtcgctttcgccaccctagccaccgccgcaccgtgcagcctccaccacgcccctacgcacctcagccaccgcaaccctctcctccccgtcaaggtgaggtccaccccgtgctgccaccatcggccgtcgtttccggccgttccacacccgttttaccctccctaatccctccatctccctcccgaggccgtcctgctcctcagctgcccctccgccatcgccggcagccgccggaatgccttccgcgccatcgtcccacgggttccgtcgccatatccctgccacggagttccccgtggctccactcgcagccgtcgggcacttggtgagtaccccctcctcctcctctcacggttaccctctcctgcgcctccttccgcgccgcccggtggtaaccggcggtgaccccaggccacgcgcagccagttcgtcgccgctgtctgctcgccaccctctgccttggccgcccgattggtcgccctgaccaatccgggccgtccatgaggtggacgtgcgcccgggccacatgtggacctggttcgccgtgcgctctcccattgtgccgctgacgtgcgaggcccgcgtgtcggctcgacctctccttgatgacatcagcagtcccctttttcttttgtaaaaataattaataattgcacaacaatttgtatttaattccaaaaattgatttaaatggctcaaaacttctaaaagtcatatctaattcatacgtactccaaattatgccactcaacttgtaaaagtcatctaaaattgacttctacatgattgtttacttttcatgaactgtttatttggtttcgcgtgccagcgcgtagattccgtcgttttggaagatcgcgatgttgaggaaagtgtttgaatgatcggttgaagaagcaaggcaagtcaaacattccccttgagcatattaagcctactttataaatgttttactgtttgcaaataaaattgcatgttttgctaatttcgtgggaataggttttacctatctgcttgcttgtgccatgtttaattcataaccatcctttgtcaaacttaggtgataattttactagctcgtgtcacttatgttgatcttgcttggattatatatgcttagccatgcttaattaccactagctcacttaatgggataatcacattatttacatatagtgtcttgttgagctgcgagctcgacacattggaccgttgtttaatggtcgtgagtaatccaataaaaatatgtcttaatggtgggttgtgggtgcatggttttgctagtcgtatccatggcagttaaggactagttcgcgagaaacccttggaagacttaccgcacttaccacaagcaagaatgagcaactgctggacttgtagtgtagcttgtctctagccgacgttcctaggcaagggtgagcgtgatggagttcggatggaccgtgctgcagtctatgcggctgccggattcagcaaggcaccagggggacttcccactgccagttataggggtgggggcgaaacacgatgtaacgctctgctttccgcgtggcgttaaaaagctaatttaacgaaaaccctaattgcgaaaatttcgttctttgagtgttgagtctaagttgtaccaaagatctcaatttaaatctctcctttggtccatcttcgtgcaatcaaaaatcgcctcatcaaaaattccccacctcaagatcccaatcccgattcaagtctccaaatcaattccgaaattcacttccttcctttgaatccttgacaatattcgccccgactccaaaaatatccaaagttccattttgcattcttctccaaacccaaatctctccaaatcaatctttcagcaaaagtctattttacctccctcaggtgttgtgggccgttttcccccttagcccacctccctccctcggtcgtttctcctccgtcagcctcgcacgtgcgttgcacgtgccgagccgagccgagagagagctctctcactctctctgtttctccctctctctctcgttttctctctctcgcgccgacgccgcttcccgccgtcgctgcccaaaatccgccactgccttcgctctttcccgcgctcgcgcgtggccgaccggccggtcgttgccaccgtcagccctgccacgcctgcgccgcgcagccgcccggttgccgccgcgtcaagccctggcgtcgcctgcatcgtgcgctgccgctctgccgctccatgccgctagcttccaaagccgagagaggcagcccctctctcactccctctccctcctttaacttttcccgaaacagcaaggagtagagctccctttctccccctcctttttccttttgcccgaccaccattggcgtcaccgcctgccaccgcctggaccacgggcgcgaccgccagctcctccccttgaccgccctaagtcggtttcctcccccaaaaccgacttcccgcacccataaaacccaacccgagcccctccctttcctcctcgtttccttgcccaacctccatcgcgccattgttgccaccccgccctgcagtcgccctcgctgtctgtcgccgaagcaccagggagaccggtgcgtgcgtggacgcgtgacgcgggactccgggcaccctctccttccccttccccggcccgaggccggagagctcgccacgcaccgccgccgcccatcactgcgcccggctcagtagtgcctccctccgttctccttcctcgttctccctcgccctctctagcttgcatgatagctcagttagcccctcgaacgcgcgtagacgccgccccgagctccgccgccgctcggcatggccttgccgccgtcggcgccccctcccggaggccgcctctcgtcgccggacctccacggcgcctccccaccctatctgatcccagaaacgaaacccttgagccccggagatgctcccgccacctttaattgagtcctcgtcgcccctcggtgatttcccctttctctcgccgccggccgccactgtcgaattccaccgctgtcgaactccctctagcgaatccgagccgttggctcgctccttctcgatgccctcgtcactccggtgtgctccccgaagaccaaatccgtcgcgcttgctccggtgaacatggcctccgtccgccatccatctcggcctccccttcttcctcctcccgccggcctgcgtggctgccacgtaggcgccacgtcggcgccacctcggctttgaccgagccgagccggtcagccgcctcctccctcccccctcggacgcgcggtccatggtgcgccaaccggctgcgcgtgggcccgccgcatccctggtccatccggtgcacgcgcatgaaccgcgctcacccgaaaccctagcaccgccctcatgcgccgctcccacggtgagccgcgccaccgacaagcgggccccactcgggaccccacaaggtggactcggcccaccggccctttctctccctcacttaccccgcgcccccttgggccgcctctccgggccggccggcccattagttcggccgagccgtgcctctcctcttgggccgcacccaagccgcccgaggaagtctaaatcatatccctccttcaatttctttccaaaaagggtttaataaattattaaatcctttttcctttagacagaaattccttaatccttagaaaatccatatcttctcaaccgctcatccgattgactccgttaaacttccaataattccgtaaaaattgagatctatctaatggtactattatctagtctaaataggatctttattttgggtcttgtgtagatttttaattgtttgcgtatagttgcggttaccggattttcgtcgatcgcgggttttctcgaagattcgtgaagcttcgtgaagacctcgagcaaggcaaatcaccctttgaccaattgctcctataattggaaaatcattattaatttgtttgcaacttgcattattagcaacacacatttatagcatgcttggcctcggtttgcgtgccaaaccgacggacctacctagtagtcgcactaattcctgtaggctgtactaccctgaatccttgtcgctccacctttgtggtacttcggtatccgtgctctctgagcgcgtataccaactattccacatacaccgttgtttgtcgataatctgagaaatgggtttgagaagcctttaaaacccgacatgtggtgtcggcgtgtttgaaaataaaatgaattgtgaaaactcgcgatgcggatgctgtgcctgggtggcactgtcccgtattcgcatataaggaccgattcctttgggaaattcatcaagcataacaagtgcaaccacatggtggtatgggacaccctggctaagtaattagctgcttttgggaaatcttgtataccaatagaggcggaaagccgggatgtgggggtagaggcatcctgggagtccgaaacagaggaaggcacccgggagtcctaaaaggaaagccggagttggcccgatgttggtcagggagaccctctatgtggcatgaggtaacccagagttagctttggaaatgccttgtcgcgaatctcccttttccagccgtgtgtcatgaacacgggttaggtgatgggagcaagttcgtgttgtgtgggtaaagtgtacccctctgcagaggttaaccaactgttcgaacagccgtgcccacggtcatgggcggatgtgaggtggttcccgttgcgtagatttgtttgcctgtgctttgtgaaaagttgttgtggattgggaatcgtaaccagaatcagcctaagtggcagatggatgacctgagtggtcagaaacgaatctgtgtgattcgggatgtctgcgggcatcatagactaggcttcccgagtggaagcggattgttgtgctgctgggcagctggactctgggagtccacaaaaatgaaaaggctctgggagccgcctaatcaagtgaaatggctctgggagccgagaagtaatgatctgaccttggaggtcggtacattaccaattgagttgttgaaaagcatctcttaagccgaatcgagacgcaagtctcttttcaacccaaacctaaaaagaaataaatcacttagtgatttcaaaatgatttcaaacaaaagatttgcaaaacaaccttgcctctcttccaagcttgcattaaacacctaagttcccgtgacttgctgagtacgaaagtactcacccttgctctctctctctctctctatatatatatatatatatatatatatatatatatatatatatatatatatatatatatatatagttcctccgcccggatgctgaagatgaagaaaagtgaagattagggtttcgtcctggttcccagccgtcgcctgtggtgttgggtgttagaccgttggttccactgctgctgctgttgctggtgtttcctcgtctgtgtcttcggttgtattctcaggctgtcctgagctgcaacctaagttaaggtaaataagtcctctacttattttaaggatttgcaatgattcatatttgtcaccgtgggtaccagcactatgtcctgggactggtactatgatcgcggtttcgtaggaagcggttcgcgccgtttttcctacgacacgctcctgtcaggtgctgttgtacggcggtgccggattggggtgtgacacacgaggtgtggtgcgcttggttaggggggagttatgcgaagggtcttgtcacaatctctcgcatggtaacgtgttaggcatggcatggtgtcatacggtggattgtgtctcgtgggtacaattgtgcatctctggtcagagtaaaaactatttgaatagctgtgcccgcggttatgggcgatcgatcagcttcaccgtgatttgtcccactctattaattaaattgacttaatgaactggtgtagttcaagtggaatagttgggtttgttcaacatagttatagcattgataagtggagatttaatcttgagttaattaaacaattgttttaaactataaatgtttacaaccgtctttacgcaaatagccacaaacctcccattgtctccccttgcatgtctgtatcattggtgtggcttgctgagtacggtggttgtactcagccttactgttactcccccttttcagaagtgttatgcttctgagctgaagacagagttagaggaccaaggcttataccccagttgagttttgcctgtggagtggagctaaagccatgctaggatcacctttttccgctgttgttgctttctttttgtgtgaggactaattgcctattctataagtatgtacgctttatttatgtttggatctgtatattaatttgtcgttttgtgtaccttggctgattcctagacagggacttaatacacaaaatactctagaaatttcggctaaatttctgggagtgactgtgcatgcaaaatgagaaatccattagcacatgattaattgagtttaaataatttcaaacttaaaaatggatttatttcatactgtaatggtacttctacatacaaaattttcatatgaaatgtatcatctagtagtttgagtaccgtgccaacagaaatcgatgaaaaatatgtattttaatcagaaaaaagaacggggcttagagtggttttgacaaacaaacagattgtgttgccactccgataatttcgtgtagagtcgtattcggagacatttaattgtattttttctctcaaaaacggaaacaaatatggcatcaatgttattgggtagatatgaaaaaaagtaagaaaaccgtgtatagatgcctaccaaaagtaggaaatactttttttttcacctacaaaaataaaaacttaaaaaatgcttttcataggcaggtcctaaagagagccacccgtggaaatcgatttacagaaacattcgtaattcagcccgtgcaaaaaccagcgatttctataggcacatggttgtaggtggatcagaaaacgctcgtgtaaatgggttatcagccacctgtacaaatgttttatgtagtagtgcgttttactttttctttttcttagaattcctctaatttattagaggtgacacatggcagcagggtttgtaagaacatcaccaacagcatctcgatatcatttcctatctggtattttggagatttttggttaaaaattgcatccaatagattctcaaccaactctcccaatccttccagttaccaattgagttcgctcccaatctgtctaagggcggcgaggcggcagttagggttgcatgcgagcgtgatctcatgagagcgaggagtgaaaactgatttctgttggaagtatcctaatgggcccacctttttgtttttaggaaaccaattatagctaatgtgttggagggatgttcttggtgatgcatgctcatgtttagtggattttaagaatatggataatatggagattgctacctatcggacgtatgacattttgcaaaaaatcggacggtgtttcaccacatgtaaaaaaatgtttcaaatgtttcatcactcattgaataatgtttcactaaaaaatgttttagatgtttcattactcgatgagaaatgtttcaccacttggaaaaaaatgtttcaatcagataaaacaatgaaaaaacactggttgcaacattaagactctattatgcaacatcgaagaaaacacatcgtacatcatgtgcaacatccgatgaaacatggatgaaacacacaaataaaatagagtgcaacaaacatatacaatatattgcaatgcaacatgatcgttaagaatgatctcatggctctattcagagaatttcataaagggacattacccctttatagcctaaactttgggatcatcgtgctgctgccaaaaaaggctgatgcaaaacaaatttaacaatataggcctatttgcctactgagtgtaggctttaaaatttttacaaaagttggcaccaatagaattacagcggttgctcacaaagtcattcgcccaacccaaacggcgtttttgctagatagaaatatcatggaaggggtggtgattttgcataagactgtccaagagttacacacaaagaaaatggatggtatcatattcaaaattgacttcgaataggcttatgacaaagctaaatggtagttccttcagcagacattacgaatgaaagggttttcacaatcatggtgcaattggatttccaactgggttgaaggaggaactgtaaatgtcaaagtcaatgataatgtaggaaaaaaattccggacatgcaaaggcttgagacaaggggatccaatgtccccaattctttttaacatagtgactgatatgttagccattcttattaaaagagccaaagccgatgtccaaattagaggggtaattccacacttagtggatgatggtttgtccattctccaacatgccgacgatagaataatatttcttgaacatgattttgaacaagcaaaaaacatgaaggccattcttgttgaacatctctcggggctgaaaataaactttcataaaagtgaaattttctgctttgggggagctaaggaaatgaaggatcaatataaacaactgtttggttgtaattctggttcctttccattcagatacttaggaatccccatacactatcgaaaactcagaaattctgattggaaatgtgtggaggataggtttcaaagaaaactgagcacatggaagggcaaaaataactcctatggtgggatattggttcttcttaactcggttctttcgagccttcccatgtttatgctattcttttttgaaatacctcgaggtgtacttcgaagactggatttctaccgatcgagctttttctggagcagtgatagccagaaaaagaaatataggttaacaaaatgggattatatatgccggccaaaatatcaaggtggactgggtgtcctaaatcttgatatcatgaatagatgtttgttgagcaaatggctattcaagcttcttaatggtgatggcctatggcaaaatcttttacccaacaagtacttaaagggtaaacccctctcccatatgtcacacaaaccaggaacatctcaattttgggttggcctaatgaaagtaaaagatcaattttttcagtatggatcttttaaacctggtaatgggatagagataagattttgggaagacacatggttgggcttgcaacctctcaaatatcaatatccttctctgtacaatgtggttcgaaagagacattctactttggcagaggttacgagcacaacaccgttgaatgtttcattctgacgatcaattgtaggaccaaagttagttgagtggaatgatttgatttctcgactagctaatataaccctgtcaaatgaaaatgattgctttatttagtcgctacataaaaatggccatttttcggtcaaatccatgtataatgcgatcatcaattccaatgtaaggatctgtaagaggatcttatgggaggtgaaggtaccactaaaaatcaaagtatttatgtggtttcttgacaaaaaaaagtaatcttgatgaaagataacttcacgaagataaaatggaggggaaacaagcaatgttgattttgtaatacacaagagaccatccaacatcttttgtttgactgtcatgctgcacgttttgcttggcgatgtgtcttctttgcttcaatattccctgcccacaatgcaaaagatatttttggtaactggctaaggggagttcctagacccacaaaaaaaataattttatttggagctagtgctctatgttggtcaatttggcgttgccgtaatgatatagtttttaaccataaaaaaatgcctaacatcatgcaggttatcttcatatgttctaattggctccactcttggtgtatgatgctttcacagaaacaacaggatactatgcgcaatggtgctacacgcttggaattggtacgtagccaaggaacttttattctagtttggatagcgtagtacctacagaatttcgtgatagaatctacgtgattttaaaaaatattatttagtagatcatattatcggcaaaagttggggatttgtcccatctcgccttttttaagctcttttctgttcacttctggactttttggttgtgtgcctatggacagaagccggagatgtaacccatttccattatctaaaataattgcaatgcaacatcaaatcaaaataaagtgaaacagcttactacaatagagtgcaacaagctaaaacagtaggatgtaacatccctaaactccaactaaataaacccgtctccgtcttcatcaaaataaacccacctccatcttcttcatctccggtcgccggcgagtccacctccatcaccggcggcggctgttcttgctgtagcgccactacgcccaccgccggcggggatgggggagataggtgcagaggtggtttacctggcgaggccaatggagggcggcgttggagcagcaggagaggagcccatcggggtagaggaaggtgcacaagcagccgagcatgatgccaacggcgaccgccgccgcgatgcacgaccccaccaccgtcgtgtcgtgccgcccccacccctgtcggcgtggtcgctagcctcctcctccctcttcgcgtggtcgcgagaagcagtgctacggtgttgaggggagagaaagagagaagaatgatagagataaggttgatcggtggagagaaaatagtgtgatagtggttaagtgggacccactcggtggcacatctgattttttgcgccgtatcgaaattccgttgtaaagaattttcgggataatatccatgaaagtgacagagacgtaggcatgagtatatgacacttaatttgtctattcgttgcggaaactggacgagatggaagctgttggctcttcagagtacatccggataaaaatacttcctaaacatacattgttgagagttgcatgctttaatttgtagtagtacgtacgtacacgcaagttttattttaattcatagcataatgcccgtgcttcgctacgggtaaacaaaatttcatactaaggccctgtttagtgcccacgcaaaaattttacaccccgtcacatcgaacgtttgaacacctatataaagtattaaatataggttaaaaaataactaattgcacagattccaactactttgcaagatgaattttttaagcttaattgcttcatgatttgacaatatggtgatacagtaaatatttgctaatgacggattaattaggcttaataaatttgtctcgcagtttgttgacggattgtgcaattagtttttttattaatgaccgaacaccctatacgaaaccctatataatacccaatatgaaacgctaaaactttacgcccctagatctaaacatcctcttaaagtatatttcatgataaaaacaaatcacaataaaataattaataattatgtgcttatactacatttcttggtaaaacgaataacaaaataattaaatcctatgagtaacattcacaggcctcactaacgcaccaagatttttaatttccaaacaaccaagaatttttggatgaaaaaagtggcacgaacgagaccagagctacacgaacgtgacaccgtgttgtgtcgaccaccaccgtcgtcttcttctcctcctatggcatttgaaattgacaaaaatcaagaggagacacaagcggacgatggacgatggacgaaaatcaagccgagagaagttgcgcgctgcggacgacggatctctgtttttttttgtccgctgtatgtgattacgagcgcacagacacaaagggtgtagctctcggtcggattacggacgataaaattgtgacgattggaaaattactaattttttaattagttaagatttgaatacttcagagcagatgatttttgacaaaagaaaaacattatgatcaattatacgtcgccacgccagctgtcacgagtaactaacaaatgaaggtcgtactatatatgtactcacgcagattgacgctcctgggatcagtaatgcccatggtctttttctacatatgtcattttgacaatctagcaacacacaacaataatcgtcatttgatacatattccatgaatgattgatctcttttgcatttgttcgtccctttcgttttcaacttggtactcgtaatttcttttaaagaacaactacttgcaattcccaaacatggagtactacatttgtctagcttccatcaaagtatatatatatgaaacagcaaccttcaattaatttagctctcgttgatcgattgatcgatcagtttgcaggctgtgttggctgcatcaggtcagcaattaatctagctagtcatctacggctagataacccttgcagttctcgtctacacacttctctttgcgaggtacgtatgtgttctctttgtcttgttaaagttaatttcgtaaatataatatagattatttgataaaataatggaattaaattatagattttgaagaattgtgtcaagctggaacctttttttaattctcaataattttgtcatgaccttgatgctagaattcttacagcgctatggctttgcagtttcgtgacatatatgcatgttcattgctaaacctgtagattattcgtagataaatcttcttgattaaatatatatgtttacaataattttattaaactataataaatacattcctgatcaagaagcagaaactttgcagagccgttgttcatcatggcaggcgagcaaggttcagctatggccaacagaggaggccgggcaaatcggaaagaaggggaggacgagctacgaggctggctgatgttgctggcgacgctgacggcgtccatcacgtacgcggcggcgctgaaccctcccggcggcgtctggcaagccgacgacgccgccaaggacttcgtcgccggctacccggtcctcctcgacaagtcgccgtggcgctactacgtcttctactactgcaacgccacctccttcgcgtcgtccgtgtgcatcatcgtcctgctcgccaccaacttctacctgagccataccagtgtcatggtcttcaacgtgctcgtcgccctggacatggccagcttgggcgccgcgttcgtcgcgggctcgtcgagcagcaagcggtttacggctttcaacgcggggctgatggtatgcctcgtcgtgctgttcctcctgtggaaactgaagtttctcatgggtaatgatcaagcaggtcaaaatcctgctagtggaggtgtcgccaatttacaacatggcaacagtgcattataaatttataataatgtaaataaatttctctgatttaatcatgtcatggtagatgtataccggatataatgcctgctgcctggcactttgctatggaacctaatgatgaatttatacgttaaataatgttgaaatatggtatatggatatattttaaaatttaatattatggaaatgatgtcgaggatatatagcatgatgatatgattagtcagtacacgatgtgatatatttatattttgagctttagaagttcataattattattggatgatgttgcggtatatttacatattacctttaggatctaatatttactagcgggtttcaattttatacaagatatactacattaggaatgtttatcgtgtcattacaaaatatttcatttttattggctagaactagattatttaatattaaccgattggatgaaagataatattacaagatgctattgaaggaactagaaatgtaagtgccggttccaaagaagtttaatccatctcacaacatgccattttaaaaaggtaaatcctattccaatcatcctccaggtgaccaaaatttaaaaattctgtagctcatgtatcccagcaagttaggccgtctccaatggacagctcttatctagctcatagagtgttttaatcgatgaacaggaccgctagctcttcttcaagcgttagctcgcacgctcaccgaggcggtgccctctcacaggcacgctcgcccaggcaatggccggcactatgccgagcgcgtatgagctagcagccggctcataccgctggataaggccttagacaaactgagccaatgccacaagcaacagtggcgtacattcatgcacctactcctctatgggtagatctatttagagaagcttctagcatctatatattcttctacaattttcagctcccagatttttattcatgtactgagaatatatatagtttcagaatctatatttacgccaaacttttcatgtactgaatatgaagctgaaaaactaaacttttctagcttccgaatcttaagcactcttagacagtacttaagccagtgacgagcatgcgagtggtttggacggacaaacacatcgtgcccgctctgataatatacataccattgtactcggagacatattaaattttaaattggagtttttttcactcaaaaagggaaacgaatatggcatctctagtatcgggcatatatgaaaaacagtgagataaatatgtatactgcctaccaaatacgaaatattttcttttgagcataataaaattcaaaaattcaattttatggatgggaccttaagagagtcatctatgaaaataatttttaagggcagttggaaatttgcccgtgcaaaaccggtgatttctagatgcacacgcgtggtggcaggtgggtataaaaatgcccgttatcagccgcctacaaaaacgtatatttgtagtagtgtgttttgctttgttttccttaattttttctctaatttattagaaatgacacatgatggtttaaaagcgtttttagtatatttaatgaatttttaagaatataatagatatcccatgacagggacagagatgtaggctgagtataaaatgacgattatggttatatatcagattgacgctcttgggatcagtaatgtccatggtctttttctacatatatgtcattttgacgatccaataaacgcatataacaataatcgtcattttatacatattccatgattgattgatctcttcttttgttcgttcttttcattttcaactttgtactcgtaatttcttttaaccaacaacttgcaattcccaaacatggagtactgcatttgtcttccatctcaagttcgacatatatacgtacgtactaacgtacgcatgagagtatgtacgaaacatcgacctttaatttggctcgttgatcgatcgatcagtttgcaggctgtgtgtagctaagctagctagccatcgacagctagataacccttgaagttcacttctctttgggaggtttggtatgttctctttgtcttgttaaatttaattttatgaatagaaattctttgataaaatcatgaaattaaattataaattttgaagaaatgtgtcaggccagaacttttgaaattcttgattttgtcatgaaatcgatgctaaaacttttggctttcaacgctgcgctgatggtatgcctcgtcctgctgttcttgtggaaacgaaagtggctcatgatgggtcgagcagcggcgaacccaaatcctactagtggagatgtcgccaatttacaacacgacaacagtacattatagtgtaaataaatcgctgaattatatcacggttttacagatatgtatatgtatactagataatacctgcctgg

SEQ ID NO: 10070 - DNA, 13812 bp, Oryza sativa
tatattgtgaataaagaaatttccaaagtattgggcatacgccatgcgcacactgctttaacagatgtgcttaagtccctagaagacacatggtttcaccacacctggaaatatatggcatatgtggtgtaaaatccgaataaataaactcataaaggatttaccaaccgcctagaaaatgaccacaatatataatcagcctaagccataatattggtcaataaaaatgcacacttacgtggcaaaaagcaatgatattgtatccaatcaattgcttaaaaacccaaacagcaccttgacttatatataaaaaagtcagcgggacagctatataaagctttactgtttgacaccttttaagatgcattgtaccaactcctaaaaagttaagtaactgcggtataaaaggattttaaggtattgggcacttgatcacgcgcactttggcctaagcaaaaagtgcctaagtccctaaaagaacgtgacaggccacacctgaaaatatgggctgcagacatattaggcctaggccaaaaaatatgccttcgacaccctttaaaggatgacgcatgtgacatgctcccgagtaacaaatcttctgggtaatatagaccaagtgtagctcatatgaatagcttctgatctgaatgactatcccttatgggatactccaaaataaatataataattgaatcccgactggcgcaagtattcagttgatagcctttacggggaataataattggtccagtctttgagcatagaagatagactcatgactatgaatccatgtggaatgtatccggaacaagtcccaattggagatataatcctcacgcttgagttgatgagcccctgagcatatagcttgtccttctgtcatagtcaaaattgtctattggcaatagctgacgcagtcggcatggagatgaaatgaccaacatgaagacgaaattgctcatcagaagtaacggaagatgtcagtggtagtaaaaaacagtgacaccaatcaaaggtaatgaagttgcataaccatggaggcgaagaaacagtcggtgatgacaaaagcaaaccgacgatgaagacgtagacgcgcatcaacagtgatggcgaaatccaccaatcatgaagatgaagaaaatagttgacgacgacaaacgcaaccgacatgatgaagatgacgatgtcggtgatccagccaatagcagtgtagcaaccaatgataatgacaaagacgctcatcagcatttgcatagtaggtcaaccgtcaaggtgaaataataagtcggcgaaaacataatcatccattagcaacagcagagatgtcagggtcgatgaagcagaggtgctggtgatgatgtcagtgacaataatccatcaaattggtgttatagctgttgcagatgcttcacttggaggaaagtagatgatgttgtccaactcgtcgaaactgagctgattggttgataactctgctctaaagcaaagacgaagataatgactcctggaattgactcgttggctgattaattgattgcttcatcttgtcgaattttgagagtcttgtatttgtgtagcccccgactctttggttagttgggaaacaactgaacatagagtcgagaattatagcttcttgtcgtcgagtaatcattgcttgattgaagatatgtgttgaagatgtccaagtagaaatccggtagtgaagacgcgcagttgtgaagataaaagcaccagtcggcggcggcataatcagtcggcgacggaagatgatgatgtccatcagtagtggtagctgtataaaccagatgtagaggcgagggcactagtcagcagcagacgagacgaccggcgatgaagatggtaaggccaatcaacactggcagaatcatgcagccatggaagtgaagaaaccagtcggcagccatggcaaacgtaggcagcttgtgttgaagatactgatgcctattagtagtgacagcgatgtagccagccgtgaagaagatagcatcagttggcgttataacaggccagccgtgcaggcggtgacaccagtcagcggcggatgcggcggccggtcggtgaagacgtagacgcccaacaacggcagcataataggccagccgtgcaggcggaaacaccagtcggcggcggtcgaagcggccggtcggtgaagacgtagacgcccaacaacggcagcataataggccagccgtgcaggcggaaacaccagtcggcggcggtcgaagcagccggtcggtgaagacgtagacgcccaacaacggcggcataataagtcagccgtgcaggcggaagcaccagtcggcggcggacgaggcggccggtcggcgaagacgtagacgcccaacaacggcggcataaaggccagccgtgcaggcggaaacaccagtcggcggcggcgaaggcaagccggtcggtgaagacgtagacgcccaacaacggcggcataaaggccagccgtgcaggcggaaacaccagtcggcggcggcgaaggcaagccggtcggtgaagacgtagacgcccaacaacggcggcataataggccagccgtgcaggcggaaacaccagtcggcggcggtcgaggcgagccggtggtgatgttctgactgatccattcctggagcgtaagagataagcttaaagccatgaatcccttttatgcatatctggatctggatcctgcagaacaaacatatcggatgagtagtatctgatataaatataatactcgagaaaaaatcaagtattttaaaatatttataaatatgtatttctcctcttatcaattgtgatttccccgagcagatgactctgtacatttaaacactctgtccgactagtcatagcccacaagcatcgggagtcggcctaggcatttcccaaacatgcatatgagtgatatgagttcgtcattaatggaacaaagtttcacggatcagaatttactactcgggtacttttgcaattattaagagcagaaaataaatttatctcgtctctatgcttttgatttattccgaataatacttagcaccttgcgttactcggtccatcgaacgagcccccgggtgctaggaatcggcccaaaggcaaccatccaatggcaaaccaaacggaaagcataggaagatagaactccataactcgataggtacttttgtactcagattatgtcgcaagcaatcaagataaatattataaaaaatatgatataacatctatagccctcgactcactactcaatggaagaccaattggtgtagtgaggcagaggaaaaggaaaaatatcatataaaaaataaaataaatgatgacttagctttgtaatattccccttggtgatggcagaagtgaccaatgtgggaacaaagtcgtccatcaataacaatgaagacaccagtcggcggcgacggaggcaggccggcggtgaagtcgtagacgcccaacagcggcggcataataggccagccgtgtaggcggaggcaccactcggcggcgacggaggcaggccggcggtgaagtcgtagacgcccaacagcggcggcataataggccagccgtgtaggcggaggcaccactcggcggcgacggaggcaagccggcggtgaagtcgtagacgcccaacagcggcggcataataggccagccgtgtaggcggaggcaccactcggcggcgacggaggcaggccggcggtgaagtcgtagacgcccaacagcggcggcataataggccagccgtgtaggcggaggcaccactcggcggcgacggaggcaggccggcggtgaagtcgtagacgcccaacagcggcggcataataggccagccgtgcaggcggaaacaccagtcggcggcggacgagacggccggtcggtgaagatgtagacgcccaacaacggtggtgtgaccaaccaaccatataggcgaagacaccagtcggcggcgacggaggcaggccggcggtgaagtcgtagacgcccaacaacggtggtgtgaccaaccaaccatataggcaaagacaccagtcggcggcgacggaggcaggccggcggtgaagtcgtagacgcccaacagcggcggcataataggccagccgtgtaggcggaggcaccaatcggcggcgacggaggcaggccggcggtgaagtcgtagacgcccaacagcggcggcataacaggccagccgtgtaggcggaggcaccaatcggcggcgacggaggcaggccggcggcgtgaagtcgtagacgcccaacagcggcggcataataggccagccgtgtaggcggaggcaccactcggcggcgacggaggcaggccggcggtgaagtcgtagacgcccaacagcggcggcataatagaccagccgtgtaggcggaggcaccaatcggcggcgacggaggcaagccagtggtgaagacgatgtcgctatcggcaacggcggcggcacacaccaaccgtggcagcgaggccgcaagcagtgaatgattgtttgatctcgactgccatccaatgcatgcgaacaaccatcgctccagcatacatgtagattaaatcgacgtatacacgtgcttgctcctggtggccgagtatattcctgtgtcctgtgccaatctagcagcacgtccatctgcatggaagggaagagaggagcactcggacacggcaagaggcacccgagtggccgagtaggcgacgatggcggccgtgtcgtgatctcaaccagcatgtgaaaaacaacaaaaattgccaggaaatcaaaacggccggcgattagggattaattaataatcaatctaataaaaattaaattggaacagccaacccaagttgtacggcgtggcttggatacgtcgtgcgcgtcgatcagcttgggtcgcaatgcctcgatcagcagtagccggcggaagccatcaacggccctgcgacctcggagagtcggcagcatgtagatgaccgaccggggcagctgtaaagcctaatgataacagctcggaggcgaccgactacggagacggtggagccggtcggcgctgacggatatagccggcagtagatacggccggcggtgtacatgcaagacagatagcaacaaaataattgctggttagaatcaactagtaaacagattaactctgtagatgtaatgtgcatgttggttggatcgtgcatgtatgttgatcagttgaatcaactcatgcagtgttttctcctggtaaactgtgcccagcgatggccaccacatgtccgccggcaaagcacgaagaaagtctcgatgcgtgagggcgtcgtcgacagcttcggcttgatctccgccgaccgacacaagatcgacacaggaaaatataccagaagattgatctatgatagaaaaaaaattaatctaataaaaaatagattggaacgacaaacccggtccaaagttcgagccatcgaattcggtgagattgatctcgccgtttcttctgaagtggattccatctcacttttcgacgggtaattcgacgcatcccctacctggcgcgccaactgtcgaaacatgaattcggcaataataaaagggggtagcggacgagacctaaagtggatggatgcagagacaaaggatttagacaggttcaggccctctcaatgagaggtaataccctactcctgtttggggatttgaatccgccgagtgtgtattgatctgacgatcaggttgtctcatgccccctagagggcctcctgcccaccttatataggatggggggcaggattacaagatagaaaccttaaccaatacggtatcggtttcctaaatctattttacaatattatcgaatcaggactttaggccgctccataatataaaaggaaacgtaatacccaagtcatgatcggttacatattccatagatatatgttatcccctattactagtcggataaccatgccgtgtgggtatggggtacccataatctccacagatatatttactagtaactttctgacaacaaagtccatggaaatgaacgtctatatatacttccatagattcaccgttcaattgagctcagtttggaagcacaaccttttgggactaatattgggcctttttcactaacaacagagaagcaaatcaggcccatatctgggcttgcaccgatcgtgggtgtgacggatcagagcgacccagtgatgggcctttttagtacccagggcccagtgttcgtctcaagaagagagctgaggcccatatttgagtttgagcttttagtaccacctcggagacgcagagctgaggcgcgcaaggcgctctgtatataagcaggcagggttgcacggagcaactcatacctttctcggccttttggctaagatcaagtgtagtatctgttcttatcagtttaatatctgatatatgggctatgtgcccacttcgatattaaatttattttttgtgggggagggtccactacagtggcttgccgctggggccctcacgcgtcgcccaggtgttgcactgctgcccgggcctggcgcaccccaaccaaaccaacgattaatttttaagtatgcagttgcgctgatagctagacggagtatcgatgcctgatgtgttcgtttgtgtgagatagggtgagaaaatacctcgttttccgcgcgcacgttttccaaactactatgcgtttttttaaaaattttctataggaaagttgctttaaaaaatcatattaatccatttttaaaatttaaaatagtttatactcaattaatcatgcgctaatggctcatctcgttttacatatcttctcaatcctctatatctcaaactcacccttagtgttcttgtatatagatgatatccaatttgatgttgatgtgtttaaagtttgatttcttcttggctaggctctgaattatgatcctctgcgccttttacattcacatcttcctgcaggaagagttgtcactgatgttcggtgtcgctaatttgctactacctccgtctcaaaataagtgcagccgtggatatccgtactcaacgtttgaccgttcgtcttatttgaaaaatttatgaaaaaaattaaaaatatataatcacacataaagcattatttatgttttatcatctaatagtaataaaaatactaatcataaaaaattttcaaataagacgaacggtcaaatgttgaacatgaatagtgcaaaactgcactaattttgggacggagggagtatgaaattggtgatccatgaatgttcggtgtcgctaatttgctatgaaattggtggtccatgaacacaaactctgcaagagttcggatagctctcgtcgtaaattcgctattatgaaattggtcacggacctgttgatctgtgaacaaaaactctgcaagagtgtcagaattcggatactatccaactctcatgattgatcagaatgtcagcgctcgctctacggttcagataccatcgatgacatcgtcagagttcagatacctgtccaaactatgaaaagtgtcgtcagactttagtgctctggagttcagataactctccaatttctgccgaaacactgtaaactcgacgtgatctgcacacacatttaacacttcaactccatgcgatctgcagggagagacatttaggttcggtactgcactgtatactaggaaattgcctcgcaaaataggaataaatacagtgccattcaaatttacatcctgaaacccagaatataaatggaatccatatttgcatttacaattccctccatgggaccttattgttcattacagaagggttttacatgtgtaacaacaaaatacaaatgcctactacacttactcaaataaacaatttcatactgaattctcagagcccttgtattttcttgttttttttttctccctgttgctctctgtttcccatcacaacagacaaatccgagtatttgtatctcgattataggtaagcacgttttggaacgggataaatcagaggcaggtgactcttctgctgcatgcataagaccgcctcatgcaaactcttcctcagtggagtgaattccaaccccaaatccttgagcctctggttcgagaacttgtacggcttcgccatcggcttcccgtcatcttcacacctgaaaaatccaagaaacacacgcatgaaaaatttgagatcgatcgattacatctcagaagactatttcagcaacgcacacaagcaaatcaatgtctaatagttgcgtactttgcagtggcagggtactgggggaagaggtccctgagcatccggaggagctcggcgcggtggagcacggtgccgatgcagaggtagcggccgcgtgcgtcggggcgctcgtagacgaggacgtgcgcgcgggcgacgtcgcggacgtcgacgtaggcggcgacggcgttggggtacgacttcttggtgcccatgaggtagcgggcgacgtggttgctgctgaagttgagcgtctgctgcagcatgggacccatcgtcatcgacggcaccaccaccgccagctccagccccctcttcgccgcctcctccgtcgccgtcatctctgccatcatcttggcgcagcagtacaggttctgcacgtacgacgagaaaattttgccgagatgatcaatttactgttcatgcaagcaacgcggttggagttggtagaaacgcagcagagtaatgtgcttacgtcggtttggcggcagaattcgtagtcgctccagcaggtctcgtcgaggacggcgtcggggctcctgctggggttcatgtgcacggcgccgtaggacgacgtgaacaccacgcgccgcacgcccatgtccgccgccgcgttgatcacgttcctcgtcccctccactgcaaccggaaccaggtcctgcagcacggagcagcgttagtaaaagttggaggaggttaaaggcgccattgtcgtctcttttgggctcaagaaccaggctagtgaacttacagggtcgttggacaccggggaggcgacatggaagacgccgtggcacccgctgaaggcggcgcggaggctggcggcgtcgaggacgtcggcacggcagagggagagcctctggtcggctccctccagctcaagcaggtgagcattcttgctgtcagctacagatacgcgcgtgcaagaaccgatcaataaatcaagcacaaaatgcagcaaattaatggtaacaccgtgaactactagttagtaacttaccaggatctctggctgttcccctgacgtggtagccacggatgaggagctccttcaccacccacgacccaatgaagccacctgctccggtcacacagaccagctgcttctcgccattgttgttgttggcctcaaaattggacgacatggtgagagacactgaccagttactgtcactagccaaatgctactctgaacttgtgagagaactttcactcgaactctgaatgttggttgtgtgagtctgccgtgtatggacatggccgctatttatacgcgagctgcgagcacctgcgccgccatgccacggagcacgaggaggacgacgacaagaggaagattgctagcgtagggtggtcatcgggtgaggggtgggggaggcgcaactgcgaccacgcgaaacggaatgccgtcgccttgtcgtccatttttgaggattcagcggcgcgcgcgcaaaaactgggcagcacaaggccgaattgccgatgggttgggcgtgcgcgtgggctcatctcacgggcgcgtacgagcagtagagtatattccattgcctttctggacgagaggatcacgaagccaactctggcacgtaaaccgtgcgaggttttcgctgaacctggcgaatcttctactgtactaggatgcaacttgtactaaacaattgcatctgctgctggaacgaccgacgattcgagtcagactggtacgatcgactaatgtctttttgaaaccttgacggaaatagtactatagtagtacgttcgagtgaatttgacgattttttacgctaagtcttatttagttcctaatttttttctttaaactttcaactttttcatcacatcaaaacttacctacacacaaactttcaacttttccatcacatcgtttcaattttaactaaacttttaattttagcgtgagctacacatgctaattatgattgtcttagagatacgagagaaaaccaatgaacaatggcaaattcggtatattgtggttacaagttccgcgattacaatttccaaaggtaagtaaaataccgacgtagtgcaaaatacgatactactaactgaaataggagaaaactggcacaaatcaacaacagtttatgacataattaatggaacgtgaaaatagcatataagaccgtaaaacaaacatatttatattaagatgctttgtttacttagaacacttagggcctgtttggcacagctccagctccaactccacccctcctggagctggagctcagccaaacagttttagctccaccaaaactaggagtggagttgggtggagctctctcacaaaatgtaatagagttgtggagctgggtttaggcagctccacaactccactccagagttggagctgtgacaaacaggcccttaagctgaatccgccgtgctcaagtatcaaaactggagtacttaagtggactaaaccaaccgaagaattcagtcggccgttgaaactaagatccggcgcgtgttggctgcacgactcgcggcttttgaaaccgaacggcacggcacggtcggagttaacagaacccacctggtatctgtttacgggaagccccatgtttgagactccaagggaggaggtgagcttggcaacgccaacctttttgacggctcgtgtcggctgctgcctgcttgcgtcacccggtgggcgagcgccagccgatcgggagcaactctaagagcaagtttaacagtatagcccactacaagctccaatttatctatagtcaatttaatagccaattcatataatagttgcttactatactattaatatatggtcccatctgtcatacacacaccgtctcttggagtctatgctgcagctacctacagatttgtagcccgctgcttttctctttcatcttttatatcattaaaatatgtttatagctagctaatagtctgctattgtacctgctctaatcccaacttcacccccaataccggctgaaccgacgggggcttatattcattctcttttcttttttttttaacttttaactcagatttacaaatttttaagttaagatttgaaaatttttaagttaaaaaatttaaaactttcaactcatatttaaaaactttcaagtgaaatcattaatatttaactcaaagacttaaaatttttaactaagatttaaaagctttcaactcagatttgaaaaaaaatccaagtgaaaatttgaaaacagtcaactcaggtttacaaactttcatctcaaaattcaaaacatttaactcaaatttaaaactttcaaccgaaattaaagatgaaagattcatttctttttttaaaaaaaaggtgaaagaaaaagtcccacgagggcgcagacccacgggtcacacaggtgtgtgcgccagcaagcgagttggcgtgtctccgccagttagtttttgtgttgtaccggtgcttgtattcacgctactcggttaagttatgcacttacgcgtacataagaaggaagtcgctgacacgtggttctcatttgttaacgagacaaccatggttaactggccacgtcaacaaaaaaatcattttcaaaaacaccgaagtagtttatttgtatcagtttttaaagatggaggagacgtgctatatcccgttctgtagccaagggagatattcattcaggatcaagaggacgagggagatcaaatagacttattcaaagagtgtggagtacataatacgtggggatttcattccagcccaattcgttgcaaacgtcctttgtacctatccggcccaactcaccaccgtcggctacggagacgacccggttctcctccgatgctactgctgccggagccggactcccaaaaccctcgccccatctccgcttggctttgagaccgctcatcgcggctgcagcagcgtcggcaggatccaccgccttgccgtcttcgatctacccggacgctcggcctccggcgacgactttaggcatgtccagcgccgtcacgggcctcgtccattaccatggtacgtcgtcgattcctcgtccactttgaccttctcactccctcccctttgccgctcgtccggctcaactaggccgcggtggcttccaatgttaggtagttgggaggaactgtgttgcagcctggcttgatgcagactaactgcttgctgtcttccgcatttcttgttgtttggagcataagtctcaaattattttcggtgatgatgtgatgaacaatccacaaacgtacatgccacctcttttggagcataagtaagcaagttatgggcttctaaactaatcatagtggtgttgaacttttgatggtcttccagccaattgatggatgttgagcaatcgtcgacaatggaattttgtgcttctataggtgtttgttttttttttttaaagaaacgcttccataggtgttgaggatgaagttttcacataaaaaaacaaactcaccgtagttaggcctgaccaactctaaaatttctcgggtctgctactattccagcccatgccattcaattgaaggcctaacactgaattttatccctgtttagcaccatcgtttaaatttgagaaccaattgattgctaattaaatggatcagagtttcataaactactctactcgaatatgtacacaataaatgtcatgcctacttcacctgcagtacaattgtactgcattttttcggagttactacctccgtttcacaatgtaagtcattctagcatttcccatatttatatgtaagtcattctagcatttcccatatttatattgatgttaatgaatatatatatatatatatatatatatatatgaatatgggaaatactagaatgacttacattgtaaaacggaggaagtagtcatcttgtcttattattgtaatctgtgatgccaatgccctcaatgcaaatttttagaagatgatatcgcatttataaaatctgaggcctctcagcttaatgttttattctaaaccaaagctggcgtgtgcaaaatggaacttgccgctaacttaagccttttatatccctagattcatgcagaggtgctagtgggaggagatagatattttacctgcttaatttacctgaagaactcaaggccaagatcaagacactgaaggatgctgacaaaaggtgttggttgaaagatttattggtttatcactatggccttgttaacagtgaaatttggtaagtccggagtagtcatcggtttagagtcagcatcggcttcgaagtcctgagattagccgatgagagttgtcaagtcatcagttgtcggattcttgctatattcggttaaggaaattgatctactaaataaaacttatccagaagagaccgagtttaaagagaatgcggcatgacaagttatctattaattaggaatagtttgttagtttccttttatctttaggaaattgtgtttagtgtctgacggagcgtggggctccttaccgggagaccgcgctggcccccctttgccggttcggccggggaccctgggtgagattctaagctctcaatctgtatgtggaaggttcgcgagacaggaagcacag

SEQ ID NO: 10071 - DNA, 22022 bp, Oryza sativa
gcccggcaagggttttcctgcaaaaaaaccctccctccgtcaccgcccgttcctcccccgtttgccacgtcagcttgctgccccagaggtgggcggcaggggctatttctgtaatttttttggtcgatagattatttctgtaaatattaaaaaaaaatctaaaaccgaaaaaaattctggaattttcgtttctcttgtgggaagaaaaaaattggcaaatagcagtgcagttgactggtcagagcatgtaggagtcagcagtcagcaccctgcttttccgcatcattcgagtaaatcaattaaatagctttgtcgagtgcaggctgcttctttacaatacttatgtaagattagcctagagctaatgttaaaaggtaatatttagtcatgaattggtaggctaaacattagcctagaatcgtatgtttggatctatgggcaaggctaaaaggtggagagagagtaaaaagagaggagagagaaggagagagagagctgtttttttatggtccccacacaaaattagccccattaacatatttggagagactaatgttttgaggggggctaattcatattagcccaaaattagcctacctgtttagattcttgtgggctaatttgaggctaaaaggtgagggctaaacattagcccatgaaatcaaacctggccttaattactcggccatcagctcttgtataattaaccgcataaacgtacgtactccgtagcatatatacaggccggtcgtactacattagtttagagtagctttgtaacgaggagcaaagagaaaaccggcaacacagcaggaagtaagaaatcaacagaaatagccgagggacaattgatcagtgatcaagggcgaatccagcctccaaaaatcattactgttggttgcccttaaattttacaagacgacacttaggcgtcattttagattctactccctccatttcatattataacttgctagtattgcttacatatatatgtgtgtgttttaatgaatttagacatatatatttagcttcattaacatatatatgaacgtgggtaatgctaaaaagtcttattataatatgaaacggaggaagtagaataaaatcattgtttgccaggttatctttctgaacgctgtatatacgatggtatccactactaaatcactactcccttcatatcaaaatattccaacctaagataagatataatataatctagcacaacgagaatctagataaaccaatgttagattcattgtacttgtactagattattacattccatcccatgttgttttgttttgggatggaaggaatagaccactgcaaatccgtttccatttacgttcgcaaaaaaaaaaatacgtttccatttctgaacaaatgaatcccgcggggactgtcctccactgaagaaaaggattggcaaatgggcaaggcaattgactggaccaacagtgcaagtggaacacatgctcggattcgtgcttttctgacccacccagcattacaagtggaacagcttagctccttccttgtcgtacgacgcaacagtccggttcggaggacgtgtcgagtcgtcgaccgccgaagcgaccaacctagctcgtcaacgagcatatgcaaatgcatcttcctttacaattctccaactaaattaaagaacgaagtgcacgtgccatatactcatgtcatgtcaatacgatctatttatgcatgctgaaaccagcgtcatagtaacgagaagcaatgcagagttcagaaatgggggtgttttccagcttaggcgtcgtagtgttgctgttactgttagtcgtcgccctggcgccggtgagaccagcgtcgggtcagccattgccgggctgccccgacaggtgcggcaacatcagcgttccctaccccttcggcatcggcgcccgctgcgcccgcgacttcggctacgagctcttctgcaaccacagctacttccctccgcgcctcaccttcttccctccactccccacgcctacatcgatcttggccgggcgccggctgaatctggccagcctgtccatcgccgacggcgaggccgtagctctcgtcaacgtgttccgccagtgctacagcagcaacgagagctacgtcagcgacaactcccgtaactacacggtgtacctgtccctccttggcagcaacacctaccgcgtatccgccgcgaggaaccgcttcgtcgcgctcggctgccccaacctcggctacctcagcgacgacgcgggctactacatcaccggctgcacgtccgtctgccgaccgtcgcagtggaactccgtgtcgccggcggcgtgcaccggcgttgggtgctgccagagcaggataccacccaatgtcacctactacgaggcgtccgttcaaggcttccaggaagcccaggggagaatcttccgcgagaacacgacttcttgccggtacgcgttcgtggtggaggacaggtgggtcgacaccacctaccgggacagcgccgacttcaaccggaccgacgacttcgccgtccccgtcgtgctcgactgggccatccggaacgtcgccaactgcgacatcgccaagcgcaacaggacggactacgggtgcaggagcaccaacagcgattgcgtcgactccaccaatggtgtcggataccgctgcaagtgctccaatggctacgacggcaacccctaccttgacggtggatgcacaggtatacaatactagacaccttaatacaatgcagatattggttatcaagttaacattgaggattgttcatttgctcgccattcttatattctctgccctcaaataaataacaatcattctgacaagaagtgatgagtttgtttttcctcttccaagatattgacgagtgccaacacttagacaagtacccatgccacggagtctgcacaaatctgctgggaggctataagtgtgattgccctcatggattcagcggagatgccataaaaaatgattgccgtccaaacgacaagttcacattagcactgaaaatagtcacaggtaattttgagacactaaggaggtgtttggttcatggccacaccacacttttgactgccacagtgtgttaggtatatgtttgtttcactgccacagttgtgacttgccacattttttcaataccatgtcctacatgtcatagacttaattttttttgccaactttaacacattttgtggctagcaatttgtccaccacacttttgtggctgctacaacttacctaatgttagttgtggcaaagtgtggccagcaaccaaacacaccctaatgcacctttctctctattgattctccgatttctgatgagtgacattgcaatgccatcttcaggggtcagcgttggtgtgttcttgtcggtgttcatgtgcttttggttgtacttggggctccagaagaggaagctcatcagaacaaagcaaagattcttcgagcagaacggtggagtgatcctccagcagcagatgcactctggtggaggcactggtgggttcaaaatattttccacggaagagctcaagaaggccaccaacaacttcgccgctgaccgtgttctcggccgcggcggtcacggtgttgtctacaagggtgtcctggaggacaacatggtggtggccatcaagaagtccaagatgatggaggaggctcaaaccaaggaatttgctagagaaatgtttattctctcccagatcaatcacaggaatgtcgtcaagctgctcggttgctgcctcgaggtagaagtgcccatgttagtctatgaatttgtctcaaacggcaccctctaccactacatccatggcaaggaacccacaactgacatagcacttgataaccgtcttcggatagccgcaaagtccgccgaggcgctcgcctacatgcattcatcagcttctccaccaatcctccatggagatgtcaagacggctaacatcctacttgatgacaagctcaacgccaaagttgcagattttggagcatccaaactagcaccaactgatgaggctgcaattgccacgttggtgcagggaacttgtgggtacttggaccctgagtacctaatgacatgccagttaaccgataagagcgatgtctacagttttggtgttgtcgtgctggagcttctaaccaggaagaaggcattgtacctagacgggccagaggaagacatgagcttggtgtcacgcttcaccacagcagtgaaggctggtcgtcatcgagagcttatggacagccaagtgaggaaagagatgaacgacgaaatggcaacagagattgcagacctcctcatgcgatgcctaagcatgaacggtgaagaacgaccaacgatgaaagaggtagcagagaggttggagatgttgaggagataccagcagcacccttgggctgaagctaaaggtaatgctgaggagaatcaaagcttgcttggcattgaacatcaaaatccaaattaccaattcaggcagcatgatgttcttgatctggaagaaggaagtacatatacatttagcttgtagataatgttgtttgcgttaatcttttataaatcaatgaattcacatacaaattcttttctatgtaatatgaaaacacatccatggggtgcaaccaaagaacgaccaagaaatttatgtgttctgtaatataaaagcaagaaattgcatagacgatagagaagaatggtatgtcactatgagtattgaaaggttcatgtccgttcttctcttaaaagaaaaggtgaaaacaacatgatgtatagacaactcatgatcattaaatagaaacatttaaataagaagataaggacttgccacaaaatcaaagatatatatactgtaaagcgagttacattggattgtcatggggaaatttctccccaaataccgccgtgtatgggtcaggaccatcacactcctagagttggtcgtccaatgaagggaggcgatcgtccctgacaggatttttttttcttctacacagagtaggtcatctctgcatgcctgatttgacaagaaccataccaaattagtagagttattcgtaattttgcgacgcgctcaccagaccagatggagtcggcggcggagtaggaacagcctgcggatggcgtagcggacagctccctcccagctcccagaggatggaaggaacggaggacttctggtagacaccatgtatggcggctgtggcggagacaatgacagtctgcgcctccgacgacgccggcggaggcacgggaggaagggttccagccgccggccgctgacctgcttgagacagagagagagagagagagagagagagagagagtgggtggggaggatgatacgtgaagggctgaaggccctcgagacacattgagccttgttggaaggccattagagaggagaaggcctagtattgggcccttttgtttaggctctttgcgatgagcgaactgggccgaaactgtacgagatggaataagtctactgtctggtggactagacaagctacctactcccttttcacttggtgtaatacacatcccggatcaataaatataaatataaatatagtagggtcatttttcacattgaagatctaaatctgaatagggggatgctttacaacggaatcccgttcgagcgggatgataccggttaggtatcaggacatgatacctattagatatcatgcgatttctaccacgtatcaaatgatacttgcaaggtattagacgattcctatcaggtatcatgtgattatacttacgaggtatcatgtgatacttggtattgacttattctcgttgataccagatcgataccgactgatatcaggtgattctactgggtatcaggagccaggcaccaaggcatcatcgtcggtggccgtgtcctccgcgtttgagcaagtcctttaccgtcactccccacgctggagctcggcggcggcggcctcacgtcccatgccggagatcgacatcctccgccatccatgttccacgccggagctcatcgccggcggccgcgtcctccgctgcctcgccctacgccgggctcgtcgctagcgcgaccacgacatcctccgccatccatgttccacgccggagctcatccccggtgcagccacgacatcctccgctatccatgttccactgttaacagtgaaatttggtaatcggcaaagacgtcatcggctgagaatcattatcggctgcagcatctcggaatcagccgataggagttatcaagtcgccaatagtcggattcctgctatattcggttaaggaaataaatctactaaaggaagcttatccctaagtgacagagtttaaagaggatgcggcatggcagtttatctattaattaggaataatttgttagtttccttttatctttaggaaagtgtgtttattgtccgataaggacttgtatcaacccatgggtataaatatgtacacaccggggtctatgtaatatcttcacgatcaatacaattcggcgcatcgccaccctttttacttctacttttgtttttaagttccggtgggacttggcacccgacgcggggctgcatcgtcttcgatctccggcgaagggataagtccaatgttccgccggtccaggcaattgtatcgtctacgtcgacgttgttcaaggctgcatcagtacattcgacctcttggattgctctggtttggatgatatatttgcctacctatttatcatgtctctgttaatctagtcttagcatgtcaatttagctctatcggctgcttctcattttagggtttctgccggtatcagctaaatcgcgttgctagattagattagcttagacatctaccaccctgaaaactcagtcaacggcttgattgtctaggtattatgtttcttttcatacttagtgctgcatcagttaagtttgatctactaagtcgtgcttagaaccataatctctagcctgcttcttaattgctaataagggtttcatcggggtttcagccggtgagttatctggatgttgcatcggctcataatgattgcatatacatataaattggatttagccgatgacaacaaaggtttcactgtttaatctaatcttgtagatttcatgacatcggacctccagccgatgtgtgctttaaacctcggatcgatgcttatttatcatatcattgctagccgattggtttatactagattatattgcaatattatattatcatcagccgattgcctttatatcatcatctacattggacatatagccgatctatcaaaaccctatcgctatcggctggtattggcattagctattatcgatatcggctgagattgctccatcggcttgtcagccgatcgactgttttgatctactatttgcatatcttgtcagttgcaggatcaaactgactggcacgcccgcatctcatcaacctttggacctgcacaggagctaagcagatctcctaggctagtgtgttcgatttttttcgtcaacatccacgccagagctcatcgccggcggtcgcatcctccgccgtccatgccccacgccggagctcgtcaccggggccgcatcctccaccgtccacaccccacataaccgagtgttcgcatcggagcggtcataggcagtagcgatgagcaggcggcgaccgcgaccatgaagccatcatcatgtcgtcttgccacctactcgccgtgaacatactcattctcttgccatctcgccccgtcgggaggaggcgatatcgtcccacgcactcgggacggtatcccgtggtatagcatttctgaataggattagataaaatagttgtttctcacttttctacccccatactcatgtctaccaagagactcgaatattagggaaggacctaatatcaaataattagaagttgtgagactttgaacccaggttgtctagcccaccaccttgtggagctagccagaagaccctggcatttctcactcgtgtctaccttataagctgaatcttgtatactcaactatcgtagttaggtaaccagccgacagataccatttggcttcctctaccaccgtgaggttgagacgtcgtcatagcgttcaattgtttatccaccaacttacagtatacaacacatgccttcatccattacaatgcagacatgcagtagactcaaaaggaatctcgcggggactatccttttcagaaggaaaaaagaagggcaaattggcaataggcaaggcagttgactggaccaaaacagtgcaaagtggaacagatgctcggctcccaaattcttgtcagtgcaagtgacccacgcgacagtgcaagtggaacacatgcccatatgcccggctccatgctttaccgacgacgcaacagtgacgtcgaccccaaaaaccaatcaaacgacctcttcaacgatgaccgggagcctagcacgcatcttcctttccgatcctccaaggctccagctccaactaagcgcgctatatttattcggaaaccagcatgcgatgcaagcagagaaacgggcaaagagttagctaaggtaggatgtcagagataaggcacctgcagccgggtgtcgccatctcagccgtagtcttgctgttaggcatggccctggcgccggcgacaccagcgtcggctcagccattgcctggctgccctgacaagtgcggcaacatcagcatcccctaccccttcggcatcggcgccgtctgtgcccgcgggcccaaattccagctcgagtgcaaccacacctactcccctccgcgcctcatcgccgtcatcgattcccaatccaatttggagatccatctcgaaagcctgtccctcgccgatggtgaggcccggatatacaacaacgcgtcgcggagcttgtacaaccacagcacgggggacctcgtccgcacaaacgacgtcgtgtacttgttcttgggacgggaaggcccttaccgcttctcgtcggccaagaaccgtttcgtcgcactcggctgccccaacctcggccttctattagacgccacagaaaattacgtgaccggttgcatatccctgtgccggtcgtcgccgctcgccgtgtcagcaggggcgtgcgccggcgtgggatgctgccagagctcgataccctccggtctccacacctactacgtgaaccaggacaagcccaagaacgtcacccttcagtattatgccgccactgattaccgctacgtgttcttggcggacgccgagtggctcagtaccagctaccgcggtgacttcaaccggaccggcgacttcgccgtgcccgtcgtgctggattgggccatccgggaagtcggcagctgcgaagccgccatgcgcaacaaggcggactacgcgtgccggagcgccaacagcgactgcgtcgactccaccgagggagaaggctaccgctgcaactgctccaggggctacgaggggaacccctacctcgacggtggatgccaaggtacaaaattaaaaacgcctcccgtgaaataaactccattttaacagtgagttcaaaagctaattcccgtcgatttgggcgattcgcgaagacatcgacgagtgcgagcgagataaggacgcatgcttcggcaacaagtgcaccaacacgctaggagggtacttgtgcatgtgcccgccaggtgctcgtggtaacccgctcattgaaaaaggctgcgtcaaaactgatctaggtaactaaattaatcttcttatcattttggaatttatccagacatctaaattaattgaagatgctaaactaatctacctgagacttgagagtgtgctagctataatgtgcaacggaattttcgcccttatattttcacttatgcttatacttatgagtcaaaatttaaagttgcaaaatttgaattttcaactttaaattttgagttgattttaggatttttttatcgtagtttatttttcagtctttgcttctagatcgttaagagttaagaatatgtatataaaagttttattcataaattctttttcgtttgtaaataagccaaacgacggggttgttttgttggagagaacagtcgattgttcggccaagtaccagcacaaattactctgttccataaacaaacaaaagcagactacgatgtttttacaggctaatatttccataaggctgatttcttattaaccaactgttcggcaagtactggcactaacggttctcaattacaaacaaattcagtacgcctctctaatgaagaaaactttttttcccttctattgtgctccaggtttaactattggtattggagttggcagtggtgcggggcttttggccatggcattcggtgcagtctttttaacacgtaagatcaagaatcgtagagcaaacatgcttagacagatgttctttaagcagaaccgtgggcatttgttgcaacaattggtatctcaaaataccgacattgctgaaaggatgatcatccccttagcagaactggaaaaagccacaaacaaatttgatgaatctcgtgagattggaggaggagggcacggcaccgtttataaagggattctatcggatcttcatgttgttgcgatcaagaaatcaaaggtagcaatccaaagagagattgatgagttcataaacgaggtagccattctctcacagattaaccatcgcaatgtggtgaaactttttggatgttgcctagagacagaagtgtcattgttgatttatgaattcatatcgaatggtaccctttaccaccatcttcatgttgaagggccattatcattgtcatgggaagatagactcagaattgcaactgaaacagctagagccctcggctaccttcactcggctgtatcattccccataattcacagggacatcaagtcccataacatcttattagatggctccctaacagcaaaagtatcagactttggagcttcaaggtgtattcctgctgaacagacaggagtcacaactgttattcaaggaacactaggatacttagaccccatgtactcttacacgggacgtctcaccgagaagagcgacgtttttagctttggtgttgttctaatagagttacttactaggaaaaaaccatactcatacagatcacctgaggatgacggtcttgtttcgcatttcactacgctactcacacgtgacaacttgggtcacatacttgatcctcaagtcgtggaagagggaggaaaagaagttaaagaagtagctttgttagctgtggcatgtgtcaagctgaaagcagaggagcggcccactatgagacaggtggaaatgacacttgaaagcataagatcattgtttctgcagcaagaagctatacatagcatggccaataaaagttctaaggagaatcatgtctcaatgagttacccggcaaatgaaggcacaagtatggagtcgacaaaacagtatagccttgaagaagagtacttgctctcttcaaggtatcccaggtagtggaaatttttttaaaatataaagcgttgtcacaatgtacaaggtatgaaaggcacgcggtccaaagctatatgcacaaccgtgttttgttgatgttcatctgaatgtgtatttttgtcatctttcttccaggcgcatgaaattaacctttgtattatgttgataatttatgcaatcacattaccttcaggagggtggctatgattctcataagtactttattttttccctaatatataggtcacacatacaactagtcatatgctggattatttttttctcagataagtaaagattaacctacttgtttgaactattcaagaggacgaattctttaaaattcttgttcttgtgacatggaaacacatatatggtgctcacccaaagaaccaagaaatgtatgtgggctgtaataaaacaaaagaaaagcctaaagctgcatagaccatatagaccaatgatatgtaactgtgagtattaaatggttcttgcccattcttctgttaaaagggtaggtgaaaacaacatgttataaagacaacgaatgatcattaataacatttaaataagaacatagggatttgcaaatcatctctatataatactagatttaccaattagattaatagacttaactagaatttcaagttatctaggattacatgggattatgggaacatctcttatgcactatgtcacggcctattcaaaataaaacttactatgaatattctgaaatatttcttgatgtactccctccgtcccattttaagcgcaaccatgagtttccgtgttcaactttgattgtccgtattatttgaattttttataattagtatttttattgttattagatgataaatcatgaataatactttatgtgacttatgtttttttaaaaaaaaattaaataaaacggatgattaaagttgaacacagaaacttatgtctatgtttaaaatgagatggaaggggtagcttttagagttttaattgcagagatgtggcaggtacctcgatgattaattaaagagtaaatttctcaaaattgcaactatctagtcaaaactcactttgctactactttagctaaaattttcacaaaactgcagcgataggaaattattttatcggtaaactgcaacttttatcccctagctacgtgtttgacatgtgtgctcaacttgcaacagtgtaagtattacacatactagacattttgcgcgcgttgcgtgccctatcagaagtccaacaaaggggtaccattaagcatgttgtgggcgaataaaattaaagatccacactctcactgaacaacaaagcatcagaattaaccataagacataatcattactctcatagtgagggcatgacaaaatagtactacctccgtttcacaatgtgagactttctagcattatccacattcatatagatattaatgaatgtagacacaacattcatatataagttaatgaatctagacatatatatatgtgtctacattcattaatatctatataaatatgaacagtgctaaaaagacttacaatataaaacggagggagtagctgtttaaatgacagcatgtttaaatacagggagcattggttaccaacgtttttcttaaccaatgccattacagagtaaatggttcacttctagcactacatagctagtgcacaccataatttattttatagaaacattggatgaaggtagacaactgcatttagatcacaataatctttgataccttggttgacactaaaacttttcatcatatcatacataaaaaatcaacagatctctcaagatcacaaacacatattagatggcattctactataaatctttttttgtggagatactttaaatcgtcactgggagaaaaaaacatagatttctatgataaatagagtgaacattgtgttgaagttatgcaaacaaaattaccagaataacatctaagcacagaaacatgttcttttcaattcttgcaagacaacttctgtaatcagcaatttacacagtagtatcgcaaatacagagaacattatattgcagctatacacagaaataaccagcaaagcttctaagcatagataaacaggcattttcaatgttgtaagaaaaatttcgtgatcagaaagctaatagatgcataaagacgaattccgtgatcagaaagagccatataggctcatgctttgtattatctcaattcagaaagacaaccaggattatagatgcaggacccaaaagaaatgccatgtaagaattaaacgatctgaacacctctagccaatagtgaacccatagcccgctgtttaaatcatttaagatttaacagcaaatccagctccttaagcaccataatctaatcaaactaaaaaaaaaaggaaaataaaatgaacaaagaatggcatttctgcctgttgctccatgctatcgccaatgtataatctccttgccacctaaatgttgcatccaaacgtgcaataaatgagaggttacctacaagaatattgaattagtgattattctttcaatttggatgtggagtattagttaattatcaatgatttaatatggggctgtatggctttatttacttatcattaagctagagctggaagatcatagctaaaactaataatggcatagtagcatctagaaaataaaagtaccctgttattttcagaggaacattgcttctgctctattacaactgactgtccttttgaccatgagctaaaggaatgcagtaaaaaacctcttcattatggcagaccatgcctgctgtggttataggaattaaatttatctggttgtagattctcgaactcttcatctacagaacacacaaagggcaattttctaaaaccagattgggcgtcacacattatagaattatttgcacagtattggccacctaatgctggtgttttccttgaaaactcaatcaggaatctcatggaccatactgatttatgaatcacagggacaagcgacgactgattgcaattcgagaagttctttagctattgaggtagatagtcacataaatattctagccaaaaaagcagttgtcagcaatcattatatatgaaatgcatacatctatagaactaactacaaatgaatattttcaatgatgcatttcattagcaattttaactcttcccttgtattatgaatatcgatctaactgctaatattaaggtagtttcaaatgtttagagaaattaagtggaaagtaggatccaaatctagatcctaacaaatcattcgggcttacattacaggtcatgcaggcgtaactgatagctttaagatcgccacatcaccatgcttgtaggaaaaacaacgaacaccttgtaggcagggcatcacacaaaacaaacacctcaaatcttggtggggaatagaaatgaaaatcaaatacaagtggacgatggcgtgatgcgatgagggcaagcttgatgcatccagagaacggctagacgatggagacaactcctcctccctctgatgaccagaaaaaaacaggagcttgccactgctcatggagcccccacatcactcgaaaatcaagtcatgcgccgccagaccgactcctcgccttcgagaactccgtgccgacgccatcttctcgcaagctcgaggcgtccgcctcctgggcccatcggcctacaccaccacgctggggacgccgccagcaacctacttcaggtcgacgccgccgtgcgctcctcctcccttcgccagatccgatcgctgcacggcagctaccaccagatcggaaggcagcgtggagcttgtattgagtagacaggtaaatcgacgacgaggtagtgagaaggacgaagacctaacccgattgaatgttggatcgaccgactcgttgtcgacgtactgagcctctcaccattgagctcgagctcgagctcagcggcaccggcagcaaggagagagagagagaaaggcagtggaggacatgcggcgacgcacggcggtgtcggggccaggacaggcgtcggaggatggagcggcgctgcagggcatcggtggggcggggagaggcggcgcgaggagggtgaggctgcgcagcgacacgggggctagggtttcagggaggatggggagacagagttttatgttgtttcagaaaagccccttgatttgtgtttttcagagcgcagtcctattttcttttttcctcttctccgtataggattttcctggttatggaggatctatatgtaagaaaacagaacatatgatcgcaccatgcgagatctaaaacaaattatatattaattatggatttttttgcaaaatgtccaccgtgctaggaactacgaccgatctcggccgttgctgtgagggatcggacggcgccggagccgctcgcgcggacgctcgagggggtgtggaatccgcccgcctcccagcactcgcgagcgacgtggatagctccgcgtgcgaacacgccgcccctaatcgctctccgctcgccaatccagggcaggttttaatttaaccgatactagcgtgggacgcgagcttcgtgcgctgcaccggtggaggtagaatagggtgttagtgattacttgctgatagcattagcaaaaagaaaaaaaatgttgtttatctgatataagtggcatgattatgtttttggttgcaagaaataaaatggcgtcgggaaccgatgaaagcttaaggcaagaattgttatggaaggcacgtagtatgtagcgcttaatataggtatgactaagataaattcagaggtacattacaggtagagaaagggcagcataaatagaaggtattgtcatcaactcatcatccatctgataattatacataaataaatgtaaatgctactcccttcattttttaaatgtcatcaactcatcattctcgtatgtttgactattcgtcttattcaaaaaatttatgcaaatgtataagatataaatcacacttaaagtactatgagtgataaaacaactcataacaaaataaattataattacgtaaattttttgaataagacgaatggtcaaacatgtaaaaaaaagtcaacggtgtcatctattaaaaaacggaggtagtatatagagagggagaaagtagtgtataaaatagtccatctgataattgtacataaatatatgtacatctacaaataggagtgtaaaaagttaagaactactacaatgatattcctgtaattaaggtttgtaacaaacctcattaagtaacaaacattactattctgacagcaaatgacatggatccttttgatcttgtccaaaattgtttttacttgcatcgcattacactttcaaaagtgcacttgactctttgacatgtaaatctctatcctagactgaaaagcaaacaaggaagagttacacacaataatgtaaatatgaccagagcaacttcagtgtgtacttcttctcgagcgacctacagaacaagtgaaacactgatgacagcaacacaaaaatgaatcacatagctaaggtcagcggattagggacctgagtgcaggcacaccatcaacgcgacacgcgcactgttgcggagccctgaagccatttgtattcccctttaatctctctttattttcgtgaacattgcagctagatttctgctctaaaaaacaaaaaatactcatttttgtaaataaaacagagaggatacaatataaatttctaaactactctaaaatttagatgcaaagaaactcaattttgagatgccacattacttgcaaaaaaaaaaaacttgagatgtaaacctgagtgaatgatgtgcataccgggggcaggcaccacggtcacggtactgcagactgcgcagcaaatcgacgttgctccggctggatacatgagcagattacggcacccagagcaaacgagctggctttgggcccctgaaattcagagactgactgaatgtcgcatttcagcagctaacattttcattttcagacaacaaaagcatcttccatgcatcattttcatttcagacaacgaaactcagcagtaaaaaaacttccattttctcaacaaggagttctctctaaactttcaggatttctatgagcagaataaactgcaacctctgaaccaggaacagtaacatctgattcaagaaaaagctgtctattgaaattcagttcataagatttctagtccaaaagaatgcatcagggcgaacactatggcatgtaccaacatttctaggtgaccaaccaacatcagggaaaaaaaactcaaaatgtagctgtgttcttgcagtgccaagttggaatccataccattgggaggtgtaaatggcacaggagttggatatggggcaaggggaaccggcattgctgtgccagctgcctgaaccgatggcatcgcttgtagatgcttcacagattccagcaacagtcaggcaactgaaatcacctttcctttccctacaggaaagaaacctacagaaagattcaagagaagctaatgagaaagcaagaagaaaactggttagaacaccacttcagtttgcaacaagaagtttcaggactctttatgcaacagaaaactggttcagcaatgcacatcagtcgcaaaaaattttagcttcttggttgaatctctcatcaaatctgatgttcaggttctgtttacatgtacaaaaaaaataagaaccatcccataattgaaaattcattggtgggtatagcatccaggcaaacagctatttgagtacttttttttgtgctaaaataccaacaaaactcacatgaatttttattagtttggagagaatagccactcatgtaggaaagacccctacctgagtaaagctgatgaagtgaccagctcatagatgtataaattgcatcaagaacagatcaacttatttaagctagtaataacggggtagcataatgcagctaattaatcagccactaacctgccttacaacaccaaatagagtcaagacacaatataagaaaataatttagataaccaataaatatgtgccacattggtgccacaatttgctactaccaggaaggaagctataattttaatctaagtgtggtcaaggaaaatgcagtgaaaggagtaggtaaaattctcaccgaatgagcttaacacctcctggtaaataagtgaggtagataggagcgcaacaatcagcttcaaccagtgagcacatagagcaactcaacccctccccacatccacctcccttgccaactacttcctccgtttcataatgtaagtcattctagcatttttcatattcatattgatgttaatgaatctagatatatatatatgtatagattcattaacatcaatatgaatatgggaaatgctagaatgacttatattgtgaaacggagggagtattttcaaggtttttagtcaatcaacctcaagaaggtgacgtacagcaccgccatctgttctgctaggaaggggacaggaagagctagcaagcacagctgccaattcatggagagctgaaccaacagttggaaataaagttcactaacttgtgagctcgtggggatctgggaagcacaaatcaggagaagggatcaagtgatttcttacatgctaccacaatagcatccttcagtatatcaagcataaaccaaaccattacctaggggtacttttccgagaagcaccttagtttagattttaatagaaaaggagtagtagcagtagagaaaatggaggaggtaggaataggggctcttacccagggaatggctgcttggtggcatcgagctccatggggtgctagccatggcagttgagcctgaaactccatgcatgggcttctttagccatggagattcactccttggagctgtgggttggggcaaaataaaatagagaaaaaattaatgcaaaataaaatgtctaaacatgtccaattaaagtagaggaaaaattgacttgaagaaggcatatgatattgatcagcctatcaaagggtagcagttcgcagttcgcagttcaaacacctatatttacatgtagattagcatccactttaatgaacaaggatgtcaaaaaatggttttctctttgcagataatccaagatatcattgttacagacaaataaacaaattaataatgtactcagctacttaaggtaaactttgtatcaaattacttcctatggtaattaccaacctcttgaagccaccatgttttctatcttctgcaagtatagctctatcaactattacaccagttcttgaactgccaaataagataaaaggtgaaaaaaatcagattgagtgagctcaagctactgtcgttctatattgcgtaataataatggcaaattggaaatggtttatggtttattcttttaaaagtaactctccctttactattgtccataatagattccccaaagtacatgttttccctgtactatcctatgactgataagaaatgataattcatttgttttcttcctaaacactctcacctgttgtaacatagagaaacaatatcagctaacatgtttttttcctgtggcaacaaatacgcccgtgaaaaataatgcaaaccttgaggaagcgacggggatgaagaattgaagatttccttaagcggggctgctagtatctcctcccccaagagcatgcgactacggtgacatgagcttgctctattgctgccagggctggagggaagagaaaaatagtcaccgaggagaagtggtggctggacgcgtttctcgttaacctatgcacatcagcaaagtaaagaacaaagaaaaggggaaaaaatcaaggaaggcagaggattgagaaaccgagaaagagccaaaaactcaccggagtgattccaatcttgcagctgcgtgagggagaggatgaggagggacgcagcaccagaccctcactggggcgacccggctctaggacagtgtgatgacaggcttgccttgtgagtgagccatccagatcgaccgtagcgccagttgaccgaccatgttgccgccgagctcgtcggcagatcagcctagcgatgtacggttctcctcttctcgccgcagccaccgccttcattgatgccggcttcgtcaccaccgtcgtttcttcgatggcagcggcaacggagggcggatctgtacgcctgcggccacatggagcccagatccggacgccggcagccgaaggcggctgttggtagcggcggcgtgaggcggaggcggaagcggcggcgctcagcgacggcggtggccaaggcggagatggctgctcgcctcaccgaagggaggaggggactggcagcggcggctagggttggcggaggcagaggccgaggcggtcggcaatggggacggcgggaggcggaggtggcagcgcgatgggggacggcgatggcgctcggcggcggcggcggtggcggcgcgaggggtaggcggaggcggcggtgcacggcggctctcggtggcgggggcggcgggagagggagagggagggacgaagggagaaggggacactggaagcggcggctagggtttgggggtgggttgcgcggggttttttcgacaaaacccctcggcttctacattttagagcgcggtccctgttcttgtttttttgttcttcgcgtgaaatacctggatttcctacggaactaaatgtaaaaatatcatatcaggagcactgttgttgagggacctcgatagaattacatagaaaccgaagggctttcctgcaaaagttgcaaggacgacgcggccgcacgagagctcgcgaaatccagccattctccagcgcctgtccacgcgtcgcgacgcggcaggggccacgccagcgcaaaacgctgagggcgctgcattctcgggctggtttgaagactttagatgtgcctaagagcacccacaatggtaaagtaaggtgctatctataaaacatgtacatctcagcaatagactagattaatagtaaaccacttcaatggtatgtctacatgggtatctatagctctctaatccattgcctcgtttttctctataaactatctccaggttagtagatagatttcctctctctcttcatttaatctcttccaagtaggaaaatatgctgacatggatctcttgtagagagcctatagataaccattgcgggtgccctaacaggtgttcctggcctactagtggaacaaattttgcagttctaataaaaaatcattagctactgttgcagctttgtggaatctaggctatagttgcaacgaattaattgataagttttggcataatatttgcagtcttttgaaatttactcctagttaaagcctccattgtaggccatattgataaagcaagaatctttctaccaactcctttaggccatattgataagcaagaatctttctaccaactccttttggtagcatccttcagatcttgatcttagcctcaatggcggacgtaggattaaaaaga

SEQ ID NO: 10072 - DNA, 8120 bp, Oryza sativa
ccagatgaaaaagtacggccaaaagatttttctatgttatgttaataataaataaagaagtatttattggtaaaacttgttaatattgttataaaaatgtattgagttgcgcaatttcatatgttaagtgaggtattattttgtaccttattcgacgtattagtactcggataatttatataggcctatcgcagtctgggtcgtagaaacattatatggacttaaacaaggagaattatgttacatgaagaattatgttaaatttgaacatgatacaactatttgcattgcggttacatagatgatattagattcgaactaggagggaggtagtgcaatagttgaacacaacgacgatgtagtaatgggacagggaagcatgacagtagaaatttcaatatgccaagttgtccgataatagctaacccctacgtgaggatccctctcctctctcaaaccgcgctttagtaaccctgtattgctctggtagttcaagctgcacaacacggctaggtggagttagaacccttctggtgtctatccattctctgtattgacatctccttggtggttcctgggaggaatgaatagatgtaaagcaagcaaagttagtaaatgttgtgagaaaataaggattcatgtaatcaaaatattcttaccatgaaatcgtcgtcaagaatatttggacaaacaaagaaccttcgacccaatgttgtaggatttatggaatgaagaacctgacaacgatcaccacacctgcatcttggacgggcttcccatggagggagtgccgtagttagcacccgccagtcgctctgttgttcacgacattgtcgtttataagccgcttttctctgtaagtattgctcagtactttcggatgcgaaataccagcgaccttcttgtaaacaagtggttaggtcgagaacgggattttctgtatcgacccactcgatgtatgcgcaagccgtagtgcgggtctgccgaatagagtagtgttacgaagaataaagcgattgcccatacggaatgaataagcatacgcagataataaaatacctcacggtcatagttagggcacctaaaaaagcgccttcctcgaatatcaggattcctcgaagccattagttggcatcgatcaccgcataggcagagaggacgctgacaccaaggtggtagtaggtatacacaaggatcgctacgccagtttagatcctcaacacctcggcgtctagccattgacgaaagccggtcggatttgtaatgaagcaagtggggaagagagtactgaatgtgactgagttctgaaagattgtgaggcctcactcgttaaggcgacttatataggcgcaaaaaatcgagtgatacccctgacatgtgaacgtggtggggtatggtgggtacgcctgattggcgccgaaagatacatgcatgatcggcgccgacagttacattggtcgtatgcgccaaatggcgggcaaatactcgtatcacacgcgaataaaggaggctgcatcggtgcggcagaaagtagtcgtgcatgcgccgaaaggtatcgtgcatgcgccgaaaggtatcgtgcacatataacaacaacgtagtcattacacaagcatacagtactggaaagtgaagcaagtaaacaaagagaagactgctctactggccctgccccgcgccgcgaccacgcttggtcctccgggcctgtgctcgcacgtggtcctgggagtaggtgaaacgatccggtggcacagcacgggtagcacgagtgtcccgcggaggagtggcctgcgcctggtcctgcgtctgcaccggcggtgcgcctcccagctgtgaggggccgatgacgtcctctgtcgagcctgaagcgaagtcgaagtcggtgatgtcgaagaggaaggtggaaggcaacaagtggtccgacgaggtcccagcatggtccagtggtggaccctgactcgacgtgccgactgcctgtgacgaagtcccggtgtactgccagaactgcgctgagtgcgaggtcgacacagctgcctgagacgctgaccctacagcctgggagaagtgggcggcctgcgtcatagcgaactgggcgaaacctacacatcgacaacgggacccttgtaagctaagacataaaatgtatgtaaattgattgtcgaagtaatgttgtttttttaagtacctgtgggggcacaacataaggcctagctgaggaaggcggggtgctgaacggtgcacgaaaccctgaagcaatcggcaagtgaaacggctcacttatatgtgcgaggcatgtacagaaatagtaataaaaatacttacctccgtgcagagggggggtcggcctaggaacgtgcgcagctggacggggaccagttggtacgggtggccgctgtacagctgcgtctgcccgagcaacgtcgtctgcacgacaggtgagaactcggagaatcgagcgcatcgactccaccatccgcgtgtacgtcgtcaggtgctcctctacgggtaccggaatccccgcgcctaaacgttggatcgtcattgaaccatcaacgacgacccggttgatgtcgtcgacctgcatggttaatttgttcgtaaatattcgtaaaatttgacgaagagaaagacatgaaaacataaaggaatggtgcgatgcagggtactcacagcacgagcgaagtcctggtcgcggtgcctggcatagaggtctctagtgctcgcaacgtggggctgctgctccaagggagcgaaggtgaccctagtacgggtgcgtggctggtaccagcgtaggtaggcctggtacgactcctcagtgtgtggctctccctcgtggtccacgacctcctcggttgcgagcaaccagtcctcaacaaaagtcgccaacttggcgggccagtcgccagctgagtgctgacccttgcgcgagtacctgcgaattaatgtgtaatattagtgtgaaacgacagatgttacaaattattgtgaacaggcagattttaatgcaacaacggaaagcgtagtgcaagatcttaccggtgaacagcagctgggacggtggtcggaaacggtactggaaagggctgatggaagccgaactgccgcatcacgcggaaaggggcgtgaggctcaacgcagatgtcgaagaccatcggaaccgtagtcatccagtacgcctggtccctggtgcagagtgtggacagacccaacggcgcacgagcctgggtagccgctgcactgtagggctcccacacgacgtcagtcggcagaaggcggtcgaactccataacaaactcaggatacgaccgcctaacctggacgtgagcccatcggcgctgcaatacgagacgatcgatgtgatgtacaatgaacttagcaattaacttaacaatacgataagatcgatgcaacgtacctgacgacggcaccacagagtacccatcgtagggtagtcgacctctggtcgctcctcgtacagtgactcctcgtacgcgtgctggtccacctcagggcggccgatcgcaatcctctcagctgcccagatagaaagaaagagagggcacccaccaaaggtcgcgctgggatccgtcttcgtgcaagactcacaaagtgcacggtacagagccgccaacaacgcggaaccccagctccactgaggcacctcgcctaccgcggcgtcggcgatgctcctggcgtagtgcacgagtcccttgtcgaccgcgtgcccatgaccgccacagaacatcacccagccaaaaagccagagcaagtacgcctccaaacatcggctgtaggagtactcgtcggcctccgcctgtagctgctcaacctgcaagccgtcgataaaatgttaggcaccttaactgcggactaaatatgtaatacgattgtcatttcggtacaaaaacactcacggtgaactgaagcagccacctcttcgtaggtctggtgttgcggtggtgtgccaacggctcgagcgggaggtgcggtgcacgctgtactagtgcgaaacgtgccgtcagatcgtcctgccagtccacagccgtggtcactggcccaacagcgtctcccgcgagcggtagccccaacaagtacgatacgtcctgtagggtaggggctacctcaccgcacggcaagtgaaaagtgtgcgtctctggcctccatcgatcgaccaaagctgctaggagggacctgtccaccgtccatcgtctggccgggtccgcgtcgccggccgcagcctccaccagccgacacatcggtaggaggccggcctcacgtagcctgcaataacaaattaatatgtcattataaaaaatattacagtgcaactaacttatagtaaaacattgttcgtacctctcgacaaaggagtcgtgaaccgtgagtagctcaccgcacgtccgtgcccggaacgtcccaagctgagccccctgcaccgcagtaaggtgagaccggtgtcggtgatctatcgccgggtccaacaactgaggtgtatcctgacgtgccatctctgaaaaatatagtgtttcgtgttagaacaattcaaaaaatagtactgtaaaacaaaagataacttgcaaaattatgaaatagtaataaaatcatgagattaattatgtacaacaagagtacaggctatttaaatatagcaaacgttactaatggtacataatgatgacgtgcaatttaacatatatgtagagttcaataatataacataacattacgtgtcgaagtctgacatacatcagcatacctaaagacgttaggcgccttagtccgacgttacatcacgagacctaaagacatgacatgccgaagtctgacattacacgacgaaacataaacacatcgataagttcgaaacgaattacaagcaaatccacatgccgacatagaacataagaactacaccacgtagctagacgtggcacgacgacgcctaggacgtggtcgagtggaggtagtgccttcacccgtagggcgagctccatctgctgctgatcctgatagtcctgcctccgccgcacttggtttctccttgtctttaggacaatgcttgtaggtgtgcccatgttcatcgcatttgctgcaacgcttcaccctgccagcctccgactcgtccatatcgttgcggatgcgacgagtcctcctccttccagccttgcctcggagcttcgatgggtcaggaatattgagtacttcatcgttagtctctgtgaactccccagctatgccgaacccataaatctcgccgctccacgtatgatatattgcttgcttactgaagtactgtgacacatatactgcatctggtatgccacactccgctgcggcagcaatgacatgggtgcatggcctgtggagcagcttcggctttgcacaagagcaatgacatgtgccgtcggctttgagaacacactcctgcttcactctcttgcggtagatacccctgcctgccttatcttgacatagtatctcaaacctgtgctgttgggtaccttgcactagagctcgatgtttcatggcctttttacgcaactcctctagctttttctgcatgaaagctccaaacaaaatgctgttgttcggcatagagggaagaactacctggaaccgatccctaaaatacctgcatgtcccatgtaaaatgaactccactatgccaactagtggcagtccacggacaccgcgcatcacccagttgtaaacttctgccaaatttgttgtcattattccatatctagcaccacctgtgtcatacgccttggcccatttctcttttcgttcatgcagaatccactgagaaaatttctgaatctccaatccagttcttctaaccaatgttggactatccgttgggagaggtccaagagcttgaggagggtcagcaacggcggtcgatggagccgctgcacgctgatcactgcatttggctgtcaactcatctaatctcttccaaagctcattgaattttttctcctggttctgattgcacagcctcttgaacatgttcatgagctccttgttcttgaattgcttgaaaaaattagctcccatatgacgcatgcaccacctactctgtacatcttcccaaacaccggggtatcctcgttccatactcccaaactgcaactctcctatcgctcgcagaatgccagcgtgcctatcatgtatcaggcatacatttggcctcataccaacaacttttgttttaaccaatttcaggaaccagtaccagctgtcggtattctcactctcaacaaaagcaaatgccaagggcaatacctgattgttcccatctacccctattgctgttagtatctggccccgatactttcctatcaagaatgtcccatcaatgcagagaacaggacgacagttcacgaatgccatcttgcatgcatgtagagctaagaacgccctttgcagcacactcttgccaggatgttcaattgaggggaatttcttcacttcgtaagagctcccagggtttctttcctcgataacaccaagcaggcgtggcaaattgtcatacgaagcttcgtaagttccaaatctcatctctattattttctgtttggccctccaggccttggcatagctaatagtatacttgtatgtctcttcaatgtgtcagattattgaccttggttcatatgtgagattatcgatgacatgcgcatacatctcagatgcaacaaatgcacatgtaatgttcctgtggtatttctgaacaccaggtagaaaacatgtatgcttggtaacaactgacactgtccaataatccttccatttccccttatacgtgtgcactctccagggacaaccatctttttccttaacacaccgaacttcatattgcgaccggttcgacttggcaacccaaaactctctatgaagtgacactgcaaaatgttttaccgcctccttcatatcttctgctctactataaatcgctccctgaataacctcattttctttgtactcccatctcacactatcctcttcagagacgatcagcccagaaaaatcctcactagcccattctgctggattaatatccgtctcatcatctgacgaatcaccttcctctacacgctcgttgtcagaatcctccctctccatttcatccacaatggcaccgacagtctccccctcgtcggccactccacctggttgaatgcccactggagctactacgcccccgtcctctcgtgcgttgacctcctccacagaagtctcgtttacttcagcacttggtccctcaccatcatccatgttcgtctgcacacctggatccttcgggtgaacaaacggaaccaaagctagaggccacccacattgcaatgcattttccaaataccatctccacactcgagagttttgaactggcattagttcccaataaaaaccctcagttgcccgacttactataacattgattgttatgtcacttgtttgtggatcaactctcaagcccctcattaaccatccttttatagaaggtacactcctctcagccggtctatcaattcccctttctgatacaataaaatctgacagatctaccccagttggcccgtaacggacgtttcctggtccatggtaaacttggaatatttgtttgttcgacatatctgtcaacgaaataactagatcatattactctttcatgcaataaacatctacaacgtaatatcttcttgtgtaagccaatgcaacggtaatgtattaattccaaattagcagatctacgtagttaccgatatctacaatacgcacttctagattagtacaactaaaaccctaaaaatataatgcatttattcaaacaaatttttaaagaatacacactatttaactcaatagtcacatataggatctatgaatattacctgaaatcggcgtctgaatccggcagggcttcgccccttcttctcttctcctcccctctcttctttttttttcactggaattgaggagagaagaatgagggctgggggctgggcagcaggccttttataggcagcgaggcctgccgcccggccagagggcggcaaggggccactgcaaaatagccggcccccactggctccccggcattcaggccccttgcc

SEQ ID NO: 10073 - DNA, 13870 bp, Oryza sativa
tccctggcgagctccccgcttgcgaagacagcccccgcgcgcagtcgttcgcgcgcgcgcgcccgcgtggttccccgcccgagtcgcgtcgtctgcgtcgtccgcgtcacccggccccgctgctctgccgcgcctgcaaccgctcggccccgcgagccattgcgcgtgcccagccgcgccgcccgttgtttcccgcgcatgcgtgccgagtggccgacctcctggtcgccgccgccgccgtcaccctctgccgcgccagcccgcgcctgtcgcccgtgtcgtcgcgccgctccaaaccgccccgccgtcatcgccgtcgtcatcgcctcggtcccgccactcccgcgctagcctccaagggacggaggcagagcctccctcctccctctgccgcgacgcccccgctccctcctccttttcccgaagaggcaaggggacaagcccccttttctctccctcttttcccctttttcctcccgccggcgtcatcctcctccctcctccctgtcgccgctttggccgcgaccgccgagcgctagccctctcctttgaccgccctaagtcggttcccaaaccgacattgccatcctataaacccgagctccccccctttttcctttcctctcccattcacctccgcgccattgccgcccctctgtttcgccgtcgccgttcgtcgttgcgcgtgtcggaggagccggcacgagcaaggacgtggaaggggacttcggccgcgccctctccttcctcttccccggcccgaggccggagagattactcccgcgccgtcggcctctcgtcacagcaccccgacccgcacggtagtgcctctctccgttcttcctcctcgctccatctcctccccttagacacgggtagtagcacgagtagcctccccgtagctagccggcgccgccccgaccgttgccgtcgctcgccgtgtactcgccgccgttgccgcccgagctccgtagcacccgctcgtcgccggcctcgctcggcgtagctccgcccaatccgacgctagcatcggatttccgtggccgcgtagatgctctcaccgccgggaatcggcccttcgtgacctcgtcgccgtttccctcttccctccccgccggttgccgccgccgcgattcgccgccgtcaagcttcctccggcgaatccgagccgttggctcgtttcccctcgtctcgtgcaaccacccggtgtgctcgctttcgcctgtatcgccgtggttcgctccgccgctcgccgctatcgtccgtcgtccgttccggccggtgtcgtcgtctacctcccgccggcccgcgtggcagccacgtaggcgccacgtcggtgccagctcagccgaggtcgggacgggccgaccccggtcagcccctcccgtgagcgcgttccaccgcgagccgtgaggctgcgcgtgggcccgcgcgcatgcaccgcgttcctcccccgcccgcgcgcgtacgccgcgtgctcgctccgcacagtgagccgtgtcaccgacaagcgggtcccacccgggaccgcgcgcggtgagcccggtccaccggctctctctctcctccctcccgcgcacgcgcgcgtcttgggccgccttgggccggtcggcccatttagctcggccggtccgctccatttcccttgggccgcgccctagccgcccgagaaaagtctattttccctccctcttttcttttcttttcttttcttttccaaaaaggatttaattaaatccttttcctttagacaaaaatccaataatcttagaaattcaatatcttcccaaccgtaaatccgtttgactccgttcaacttccaaaattcctcaaatctcgagatctatctaatggcacgcttagaggtcatcaatagggctttattttttttttgccgtttgttgagttgccccgcttcgcgtgtagtttcggagcccgaagacccgcagtgcgaggatttcgaggatcaagctccagatctcgagcaaggcaagccacctttgaacatcttgagcctatatttgaaatttaattatgttgcttgaaaaatattatgcattgataggatcgcacttaatctgttgtcccgtctgcaaggcagattggcggacctacctaatttgttgcatttgatctttcatttgttaattgttatgtcatgtccccttgtaaccatctagttgcgtctcgatattcgtgcaccctgtgcgggtatcgacggacgccttcaaacttaaaaatctgattaacaacttgggtaaaactagggttttacaaaagacttggaaaacccgacacctgggtcggtgcttgcgaactaaatgaatttccaaaaccacggaccggggaacgtactgggagtacggtttcccgctcttgcacttaaggaccgtttccttggaatttcatccaaacataagacaagtacgaccacatgggtggaatgggacacccctggctgagtaactagcttatcaggggagccttgatgccgagagacatgtggattcgccggggtggtgtcggggaggacccctgggcttcctggcacagtatggtctgggacctaacctgttgttggtctgggacccctctcgtcggcatatggtaaacctgtgtcggctttggaaatgccttgtcatgaaagcttggaggtctcccgacgtggccgatccccacgggctgggtgatccgggttagtaatgtcgtgtgggtaaagtgtaccccctctgcagaggttaacaaactgttcgaacagccgtgcccacggtcatgggcggatgtgaagtgattcctagcgtagttttgtttgactactgcttgtgaaattgctgttgtggaaaggggttcgatgtttgaaaaatctgcagctgatgggatcagctaggcccgggtggccgtttgaaagttgttggcccgggtggccgtttgaaaagctgttggccgggtgccaaccttgtttcaattctaaagactgatacattgcacatactccgaccggacgagacgcactgtctcacccgtgtcgtttgagaagcactcacttagttgtttttagaaaagagttcaaataaaatcaattgcaaaaacaacagcctttctttgaagcctgtattaaacacttatttcccatagcttgctgagtactcccgtactcacccttgctttatataaataatcccccccagttgctgaagaagatgaagcggatcctgctgatgaggagttcttccaggagcaagccggctacgatgagttttagggtttcggcctagttcccaagtcgcgcctgtgttgtttggtccaagtcctggcttccgtttcccttttgtaatgcagttgtgagctcgggatctgtccgcagcccaacatgactgtacctctactctataataaagagacttgtgttgctgtgataatccgtcttcctgtgataccagcactgttttctgggactggtatcgattaacaggttaatttggagcgtcacgggctagttccggtcggtactagttcggggcgtgacaatctagtcgttatcaacaagttcatctgttctctttgtactctatggttttctatatcaatcttatataaactggattagggctattaccttacgagggggttgaaccagtataatcctggtctcttttctgttttgatgacgtatcgtgtagaatctcgtaccaacgtactccaatactccatttgtccggtctatgggtatccccggttgacaaatttatcaaaagaaatttatgccttttgtattatatgttctttcaatattattttacatagcaacaattcacgactcagaattgcagtcatttaaaacttaaaattttctagtgcaaatcatacggcatacattatgtttatttgggatattaaaaaaacaaaaaaaaagatttatgagactggcacgggacgaagatgtaatccattttcattatttaaaaaaacaaaaaacagattttttttaaaattaaatggtctcaaccattggttatatccatgcatgcacgcatatatatacatgcatattttactaagggtaattattactttccttgttagataaatgcatttgtggaaggagaaaaaatatttttaattggaaaataaatcacaaaacaatcatcggctaggattttattatgttggagcacgttaaaaagagtcaattttcttttacgaactagaagattatccttgcagagttctcgggaaacctttactactagggtctgggggtaaaggaggggacgttgtgctctctatcataggcagtgttccgctgcatattgcagctgctgcaacgcagccagcatagctgctgcgatgacacaaactactgtgctgcgaggtggttgtgccacagctgcagtagttgggcgaagaataccagtgacattccgaagacaagtcagctctatcttgcccaatgcagtggttcacctctctgcccgaattagaagtttatctgggacaacaaagcacctctcaaggttcagtctttgcctggcttcttgctaaagatcggcttccaacgaaaaagagccttcataagaaaaacatcgtgtctgcccccaactgtgacctctgcaatttggctgaggaaacggtttcgcacatgtgcttccactgcccccttgctgatgccttctggaataaccttcgcatttatatcaacatctcgttgacgagcgagctggcgcatcttcctctacctcctcaaatccccagcaaacactttcgggtgtaatacctgctatgcttctggtgtctatggaatcatcgttatggggtggtctttaggcataaggaagcttccctatgttatgtatatgctatgtgtgtttcagaggcctctctctgggctgagcggtttaaattagatgatagccatgtaatttcatcctggaaggtcctcttctcttccacccttcactctcttaatatgtaataagataaactgaactatttttcccctcttttctgctttaatgaattcaggtggggaagctctcccccctgagagcaggtacaatagcaggctataagccagctacaaacatattttaagaagataaatgaggagagagaagagcaacgggctatagatttgtagtcagctgtagcacggactccaagacgcagtgtgtgtgtgacaggtgggaccatgtattaatagtgtagtatgtaactattgtatgaatgagctattagattggctacagatgaattggagctagtagttggctatactattaaacttgctctgatgaattttcaaaaaaacaaacagctgcagtagtgcagccgcacatgctcatggtttcaacaaggaaaggtttttatcagagtttatgattgctctcttaggggtttgaaaacaactttatcattgcttgaactaagagagtgatgcaaagagagatagatagcaacatcttaactggcgcaattaaaaataaattattgaacggattgttgctacaaattatctacttgattatagtatagattaaatattttgataaatgaacttaacaaataacttaaaacaagcgatccaagaatgcaacaaaaatatttttaaaaaatgtgaagcaaataatccattttaatattctgacaaaattctagaaagaaaagaagaggggtgataaaaatgaggagcaaattatctgacccgatccactccaaatccgtcaaaaacgaggatatggtatggtcttacataatccggcggatgtggatagtacactgcggattttgatgtgaatatggtatctctaaaatccagcagacgcagattatccgacatttctatcgaattatccgataggccgtttgtcggacaattcgaaattgtcaatccacaactccattttgtttgttgcatactgcaagagatggcacacatagactccttagagctcatctcacacatgcttaactgtttttttatattatagatatacatatattcatattatttagcacttaagcatataagttattcggatggatgcttcattttaattatattgttgtccgttgtatcgctaacttgatgttatattgattgcatatacatgttataactgacaatttcaatatattttcaaaccgaatccacaccaataccatatcatttacgacgtccaaaacaatctgctctgcattcacttcgaatcctcttaatgttgaatagtcccacattggttatggaagggtaaaggacctaagatataagtgggggagcccctcacctcaatggctagcttttgggatgggaaagaccctttacgatcctacaattggtgtcagagccaggctaggttaacatctctggtccgatggacacagtgtgtgaaggcctgatggactgtgcgtgcctgcggggcccgtatacctgatggaccgtgggccggtggggcccggatacggtgaaggggctgagggacaccaatgtgtgaagggggagaagggggagattggggatgtggaagggcaaaggacctaagatataagtggggaagcccctcaccttaatggcgatataagtggagaaaccaatcaccttaatggctagcttttgagggacaccaatgtgtgaagggggagaaagaggagattggggatgtggaaggacaaatgacctaagatataagtggaggagcccctcaccttaatgactagcttttgagatgggaaagaccttttacgatcctacacttaaaacatatgggttgtgatatggtattatcactatccattcgaatccgttttgtttttattcctataaagaaaccacaggggaagagtgtgtaacacaggaactgcgtaagataagatagagcttgtagcaagactacaaaggccttacgctgacacgtatttagctgaaaactatctaagctaaccttcaagtttcaaccacgaaacagtcagagcattccaagtcgctgcagcccttggatttgcacacaaacccatcgggccctggtggatttcagtaaaagctggaccattgtttcccttaattatgcttatgcgtgttggatttcagtaaaagctagacgcttcacagcgtcactacctcactcatttagctccttccccacttgaatccatgcgctacacttcacttctggttgcgtcatgttcgacacgatcgatatcgatcgagttgaggcgcgatgctggccatgcgttctcacggacgaggtccacgcagagatgatgaccatgcatatgccacgtagtcacttggctcccttaaaacgttgaaatttcagatgtttttcgtaaaatcactatgttcctgtagtaattaacaagtagcagcctagcagggagattaagctgtagcagagcaatctcaattctcatttctctaactagaatggtttccctaatattgaataatatgtccacaacgaataaaagattacgtgagaatatatgtactcctttaaaagactctaatggtgatggcagtaaatttgctacccaactgttcatattgtttttgcagtttttacaaattgtcccctgatatttattaatattgtgaaatgatccactatttagttcaaacaaatggataacatataatcaaatgagcaaacaagtgatattaagatatttgataaaaaaaatattttgctatggcatattatgattcttctgttaatagcaaaatatgggtattttgctagtaagcatgaaatgaggaaagagaagaaaaggacatatttatacacactatataagcgagaaatgcgtagttttaaaaaagcatatcaaaatagtaatgtttgtattagcggagtattaatgtgacgtggatgattaaaaaatattttactaatagtatgcaactatttaacatataaataacgatagaacgttctcttgaaagtttaaaaacaactctcgtcattagatgaaagatctttcttatttgactttacatgaagagagccgacagttcacaaacgcactaccacatacgtattgggacatcccataaaaaatcaacctagtactgaatatgacatatcctactactataaatctgaatatatctctatctagatttattatattagaatgtgtcacatccagtcctatatgcctttttttgggatggaggttgttcgcattggggaaacctgtttacacgtacaggtacgcgcaaattaaacaacatgatgcgcagtactccctccgtccaaaaatataagcatttttagcatagtgacaagtcaaatatttttaactttaatcattaatagaaaaaaataaaaaagataaattgattttactagatttatcattaaataaactatcataacatgtaatattttttatttaaaacatcatacttttatagatattgttagtgaaagtagcatatcagaaaccatgtcaagatttaaaaatatttatattttgggatggagtgagtagtatttagcaggacaagttcaggtgggaaggaagtcaattaaaggaccgaggtacaacgtgcaccagagcggcctcccaattccgaaacaaccgagccagcagtaaaatcagtgaacttcggtgatgtcgaccgtcgacgaagcgcgcgctcgcgttcagaccaatgtcaacctcgtcaatgaagctggcttaatatatgacaattaatttttttttcttaatcttcaactaacagtattatttatttatttatttactcagctaaataatgccatcaaaagtactttaagcatttgtctatttgcaacaatatttttatataagtcaaatgaattaaaaaggacaaccgaggtagtatgtcgtcataagcagcactatcatctactcctaactggagtatttatatgggtatgacagccggcaacattagcaagtagagcaacgaggctagagtttagctaccatgttagaaatggctaccactaccctgtgcctgcagggtgcggccctcgtcgtcttgatcgtctgcctggcgccggtggcaccagcgtgggctcagcagccggcgggctgccccgacaagtgcgggaacaccagcatcccctacccattcggcattggctcccgctgtgcccgcgacttcaacttccggctcgtttgcaaccacgcctactcgcctccgcgcctcttcgtgtctgaagtcgagctggttagcctgtccctcgacggcgaggcccgggccctcatcaacgccagaaactattgcagcgacggcacaacctacatcagttacaatgctttgaggagggacagccagggccagctgccgttgtctgatgtgtctttcggccgtagcaccgcctaccgcttctccgcggcgaggaacaggttcgtcgtgctcggttgccccgtcctcggttacctggttgacgccgaggagtactatgtcagcggctgcatatccatgtgccgcaagtcgcaagccggtaatgatcacctggtatggctgccagaacaccatacctcggcctctcaacttctacaagccttacatcctcagcttgaataagtcggcagaggagaaccgcgtggaacccatctaccatcgcctcaactcgacggcatgcaattacatgttcctggtggaggacaagtggatcgacaccacgtacagctatcgcgcctacttcaaccgaaccgacgacttcgacgtgcccgtcgtgctcgactgggcgattcggaacgtccgcaactgcagggtcgccaagcgcaacgccaccaagtacgcgtgccggagcgagtggagcgagtgcttcgacgccagcgacggcgtcggataccggtgcaggtgctccaatggctaccagggtaacccctacctcgacagcggatgcacaggtaatcattttaacccaatcaactgttacttgtctctatggctcccatcgtttggttattcacggaataaaccaaacggcatatttgtaaacgaaaaataatttgtaaataaaacttttatgtccgtgtttttaacactttaaaagcaaagactgaaaaataaacttcgacgaaaaaacctcaaaatcaactttaaatttaaggttataaattcaaattttaactaacaatcataaacataagtgaaaagatgggactgtatattttcttggatatataatgctgcagtctgatcagtttgatgatttttctgggcaaacggaagacatcgacgagtgccaagacaaagagaaatacggatgctacggagactgcacaaatacgataggagggtatacttgcttatgccctcgggggactattggaaatgtccacgagaagaatgtttgccgccctaaggacaagttcacgtttgctctcaaggctgttacaggtaattaatgatcgaactaacccatcatgtatgcaattatcttaactttcaatggttttagtctgcaatttcttcctaaaattagcctatgtatatgcaacgttatgattaggggttggcctcggcgtgttcatgtcggtgttcatggcattctggctccgccttaggcttcagaagaggaaactcatcagaacgaggcaaaagttctttgagcaaaacggtggaatctttctgcaacagcagatgcgttcctatggtggcgctggcggtggagtgggtgggttcaagattttctccacggaagaactcaagaatgcgaccaacaacttcgcagttgatcgcattcttggtcatggagggcatggcattgtttacaaaggcgtcctggaggacaacacggtggtggccatcaagaagtcaaagatgatggaggaggcccaaaccaaggagtttgcaagagaaatgttcatcctctcccagatcaaccatcgaaacgtcgtcaagctgcttggatgttgccttgaagttgaagtgcctatgttggtctatgaatttgtctcaaacggtaccttctaccactacatccatggcaaagaccccgaagttgacatagcacttgatacccgtcttcggatagcggcagagtctgccgaggcgctctcctacatgcattcgtcggcttcaccaccaatcctccatggtgatgtcaagacagcaaacatcctgcttgatgataagttcaacgccaaagtttcagattttggagcatcaaaactagcaccaactgatgaggctgagattgcaacattggtgcaaggaacttgtggatacttggaccccgaatacctaatgacatgccagctgaccgataagagtgacgtatatagttttggtgttgtcgtgctggagcttctaacaagaaagaaggcattataccttgacggaccagaggaagacaggtgcctggtgtcatgtttcaccacagctgtgaaggttggtcgtcatcaagagcttctggacagccaagtaaggaatgagctgagtgacgaaatgctccaagagattacatacctcctaatgagatgcctaagcatgattggggaagaacgaccggcgatgaaagaggtagctgagaggctggaatcgctgagaagatatcagcagcacccttgggctaaagctgaaggcaatgaggaggagattcagagcttgctcggcatggaacaaaataatgcaaattaccaactcaggcaacaagatgtcctgggtctggaagaaggcaatgcatatacatttagcttatagatcatgctgatcgtgtcaatctttggtaaatcaatctgttctgatacaaaatctttaaaattcttttccgtgtaacatgaatggaaacactcatatggattgcaatgaaataaccaccaaggaatttatgtggctgtaataaaaaaaaagaaactgcatagactatatagaccaatgatttgtaactgtgagtattaaatggttcttgtttgttcttctgttaaaagaaagggtgaaaacaacatcatgtaaagacaacatgtgatcattaaatagaagcatttaagtaagaacataagagatttgcataccatctctatgtaattttatataccttttggagttttagttggatagaggtttttttttaaggggaaggagggagctctgccaatttcaattaagtagggggaaaaacaaagttttacaacatacaacctccatccctggagagcgtggagggcaggcacataagtttaaggtaatgcaaagcaactaataacaagacgcgcagaaaaatcatctaagttatttgggcttcatcaaactccttgcacatatctatgatggaatcaactacctgaagcacggaattgtatatcccattaaagattattccattcgtttgtaaccaaataccccgagccgtgtggatgaaaaggccatcgaagttgcgtaccatttctttcctgcaagcttcccacgaacctagcatgtctccagtgaagagggatggtgaaggcgtgtggaggcccaatttcctccatatggagctccatacttgtcttgtgaatgaataatctatgaggaggtggtgggtagtctctggttctataccataaaaggggcaaatctcactgttatcccattcccgaatctgaaagttgtctgcagtaaggatttttcaatggatcatgagccatccgaagaatttgctaccttgtaatagcaaattcaagcttcccctgctaagtgaatacatatcaggtcatcatggctcagctttccgtgctgagccatttatagcgtgtgcccatttcaatccaaccaaagcaaacccaaatacaaaaccaatccatttaacccattccaatccagtccattagcaggcttacccctagctatcgtcgtgtatggtcaggagaccatcacactctaagagttggtccgtccaatgaaatgaaggaaggcaatcatccatgagaggaaaatttgttaattaaagagtgggtgtgggtgagctccgatttgactggcacagtaccaatgcacttcactaatcaagcaagtaagaaaagattcatgatgctagccctagcccacactgcgatgtgcgggtgagaccgactgaagcacacggacaggagtagagaagacgaccagtagagactagagtgaagaaagattagtagagctaaccataatttggcaacgcactcaccctgaggcctgacggaggcagaggcgcagagcgtgggaaacccggcggagggcgtcccaggaagtcaacacctccggcggcggtatagatatcctccgcgtgcggtgcggatctgatcgcccccgacgacggcggtggcggcggcgacggcggagggaggggttccggccgccggctcgctgctgtcgtggttgagagagatgacaaaggtttcaaggctaacacgtttagcccatttttaggcccctttacagtgacaaactagttgggccgaaatggaatttgcactaggttgatatggtgggcctaaactgggctctcgctaacgcgcgagccgaattaggcctgagcacgagattcctgcgaatgcgtggtgggttgggctggaataggtctaggacggcaaatgtgcacggtggcctcccttgtcctgggctctaatgaatctgggccgtcttttctcataagtcccacatggaattttcgaatttttttcgtttttagatttttttttaatatttacagaaataatctatcgaccaaaaaaattgcagaaatagcccctgccgccctaatggtgggcggcaagctgacgtggcagacggtgggtcgaccgcgccgtctgccgccgtcggccaaaattgcgattaggcccttgccgcccgtacagagggcggcaaggggctaattgcaattttggccgcccataaagagcttgcggccgtacttttttcatctgggtc

SEQ ID NO: 10074 - DNA, 25995 bp, Oryza sativa
tgcggggcggagcggattggagggagagggggagagggagcgcgctgggggaggggagagggccgagggagaggggaagatgggccgagagaaattcggcccatcgaccccgggggaggcaaaatagacttttgcggaggaatttgatttggaaagatttggattcggatttgaacttgacgatagatcggggatttgagatctgagatggcacggacactagacaacaagcaaagaaacaaatttcacaattagggtttttaagagataatttttcccgctaggcgccatgacggaacgggcgctacatagatccctgtcgagattattcgacgagatctcccagcggcttcggcttgagtccttcggctttgtagactacggtgggtgtgttgacgctatgattcgatgatcctaaacccctctgggggtgtgccttttataccgtgagttgccttagtctccaagtagaactcgtagacaatgaaaccggcacgatatagaacagtcccggtccttttcgagtaggactctggtagtctccagcccgtaaggacattttccataatgtctatatttccttatcatgtacgaaaacatattgtaggatatgaggtatgtcaatccagtataattggtaaatcgtaggataagaagtactccctccatattttaatgtatgacgccgttgactttttaaccaacatttgaccactcgtcttatttaaaaattttatgcaaatataaaaatacttatgtcgtgtttaaagaacatttgatgataaatcaagtcacaataaaataaattataattacataaattttttaaataagacgaaaggtcaaacatttgtaaaaaagtcaacggcgtcatacattaaaatacggagggagtatgtattatttgtaacctgataaaatttcccatatgatttgattgtaaaaaaacaagaagttattcgttcgtgggctgtgtgagtcggggtggttgattaggcttatgggctttgctttgttaactggggtatatttagttcacgtcaaaattaaaagtttggttgaaattaaaacgatgtgatggaaaagttgaaagtttgtgtgtgtaggaaagttttgatataatggaaaagttgaaagtttaaagaaaaactttggatgtaaactcagcctgaagctcgagaaagcattgaaaatagactatcgaggcttactgagtacttctgactactggagcggcgtacatcctaaatatttcgcatatgttttgggtatgccacagtgcataccaggaacacacatctgtctcttggaataaattcccattaaatcttctaggaaagattaatcgaacgagagctaaagggttaaagaaacattagccatttgattaatgtataatggacggttaaaaatattttggtgtagctgaaaaaatccaagggtgcatagcaattgactgggccagactgatcacgtgcaagtggaacgcatgcacatctccctgcttttctgagaaatccttgcaaccacactggtcgtattcgtatcaatcaggcaggcagcttcgccaacgaagaagcacgtgtgcctaagcatacatcttcttttccactccaatcttccaactaatgaacgaatcgcgtgtacagtactccctccgtattttaatgtatgacgccgttgactttttaattaatgtttgaccatttgtcttattcaaattttttatacaaatacaaaaatacttatgtcatgcttaaagaatatttgatgataaatcaagtcacaataaaataaatgataattatataatttttttaataagacgaaaggtcaaacatttgttaaaaaatcaacggcgtcatacattaaaatacggagggagtaaaatctataatctatttatatggaaatcaggcggccatttaagcaaacagagcaacgagacaatagttttagctatcatgacagaaatgactaccagtgccctgcatctgcaggtgcttgccttaaccgtcttcctcgtctgcgcggcggcagtgacaccagcggcgtcggctcagcagcagcagctgccgggctgccccgacaagtgcggcgacatcagcatcccctaccctttcgggatcggcgcccgctgcgcccgcgaccaatacttcgagctcgagtgcaaccgcgcctactcccctccgcgcctcatcgtgtctacccaccggcaacatctggtcaacctgtccctcgccgacggggaggctactgccctcatcaacgccagacgccagtgctacaacagcacggagggtttgatcggtgatgccaataattatgtcaacaaggatatcactcttgtcggcagcaatgcctaccgcttctctgcggcgaggaaccgcttcgtcgcgctcggctgcccaaacatgggctacttcgtcgacacctacggctactacgtcagcggttgcacgtccatctgccggccatcgcaggggaatggtgcgagtggtgcctcgaccgggggatgcaccggcgagggatgctgccagagcaggataccgaccaataccgactactacgagctgtacgttcaaactttcaaaccaggggaaggggaccccatattacgtggcggtacgactgcttgccggtacgtgtttctggcggaggacaagtggatcgacaccacctaccgcggccacccggacttcgaccgaaacgacgacttcgcggtgcccgtcgtgctcaactgggccatccggaacgtcggtaactgcagcgccgctactcgtaacatgacggactacgcgtgccggagcgtcaacagccactgcatcgactccattgatggccccggataccgatgcaactgctcccagggctacgagggaaacccctaccttgacggtggatgccaaggtaaaaaaaataaccacacctcccattaaataaagggagaatttgaaccatgccacacaaattttgcaaaatttatgatataccaccctgacctacatgtcattgactcatgtgggtcctacatgtcattgagatacgagtggtatatcttaaattttgcaaatatagggtggcatggttccaacaaacccttaaataaaactagcatggtgacccgcagattgcgcggctagcatcattgtattttctctcatataatagcatatatgttttctcattatattattcaaatatattaaaatgacaacataattttaaattttgcaataactttataaacctactaatgtgtaatattcatattatattttatatacgtgttagttattaattatttttaatatcaaattttagttatttgtaaattatatatattcctatatggactctagactcgtcttttaatatttgtttttttaattccgaattttctgtaaattgtatttctatatagactctatgctcttcttcccatattatttatttttatttcagaatttttgttatttctaattgtatttctatgtggactctaaactcatctttcaatattctttaatttttaatttcgaatttcagttacttctaaattgtattcctatattgactttaaattcttcttctcatgtttttcttaatttcgaattttagttatttgtaaattatattttatacggactcaaaactctaattttaattttattatgtttattccaaattttagttagttttaaattcctatatggactctatactctacttctaatattccttactttttaattccgaatttctattttttttcttaattgtatttctatatggactctatactctacttctaatattccttatttttaattccaaatttctattattttctaattgtatttctatatggactctatactctacttctaatattccttatttttaattccgaatttcagttatttcctaattgtatttctatatggactctagtctcctcttctaatattccttattttttaattccgaatttcacctatttctaaattgtatttctatatggactctagtctcctcttctaatatttcttattttctaattccgaatttcagctatttctaaattgtatttgtatatatggactctgctttttctttttcttcgattaatgtgagaatttttaggccatgagagcgaacgtggaggctcatttttctattcctttaataatataactagcatggtggcccgcacagattgcgcggctagcatcattatattatctctcatataatagcatatatgttttctcattatattattcaaatatattaaaatgacaacataatttgaaattttgcaataactttacaaaactattaatgtgtaatatccatattgtattttatatacttgttagttattaattatttttaatatcaaattttagttatttgtaaattatatatatacctatatggactctagactcgtcttttaatatttccttttttttaattccgaattttccgtaaattgtatttctatatagactctatgctcttcttccaatattatttatttttatttcagaattttgttatttctaattgtatttctatgtggactctaaactcatctttcaatattctttaatttttaatttcgaatttcatttacttctaaattgtattcctatattgactttaaattcttcttctcatgtttttcttaatttcgaattttagttatttgtaaattgtatttttatacggactctaaactctacttttaattttattatgtttattccaaattttagttagttttaaaaatcctatttggactctacactctacttctaatattccttattttttaattccgaatttctattttttcttaattgtatttatatatggactctatactctacttctaatattccttatttttaattccaaatttcagttatttcctaattgtatttctatatggactctatactctacttctaatattacttatttttaattccgaatttcagttattttctaattgtatttctatatggactctatactctacttctaatattccttatttttaattccgaatttcagttatttcctaattgtatttttatatggactctagtctcctcttctaatattccttattttttaattctgaatttcaactatttctaaattgtattcctatatggactctagtcccctattctaatattccttattttttaattccgaatttcagctatttctaaattgtatttctatatggactctactttttctttttctctgattaatgtgagaatttctaggccatgagaacgaacgtggaggctcctttttctatttctttaataatataatagatagattatatttctcatgtgagtttaaaagctaattcctgttgatttgggtgatttgcgaagatatcaacgagtgcgagcggccagataagtacgcatgcttcggcgagtgcaccaacacgctaggatcgtactcgtgcatgtgcccgcgaggtgctcgtggtgacccgtccattccacaaggctgcctcgaaaaggacaagttcactttagctctgaaagtagttacaggtgaaaaattataactgtcgtccatcatggcaacaccaatgcacctttttttctctctctctctctcgctctaatgattcttcgatttctgatgagtgacatcttcaggggtcagtgttggtgtcttcctgccactgctcatgtacttttgcctatacctagttctccagaagaggaagctcatcagaacaaagcaaagattctttgagcaaaatgggggagtgatcctccagcagcagatgcactctggcggaggtgctggtggattcaagatattctccacggaagagcttgagaaggccaccaacaactttgctgatgaccgtgttctcggtcgcggtggtcacggtgttgtctataagggtgtcctggaggacaacatggtggtggccatcaagaagtcgaagatgatggaggaagcccagactaaggaattcgcgagagagatgttcatcctctcccagataaaccacaagaatatcatcaaattgctcggttgttgcctcgaagtcgaagtgcccatgctgatctatgagtttgtctcaaatggaacactctaccactacatacatggcaaggaacccatagctcacatatcacttgatacccgtcttcggatagtagcagagtcagccaaggcactcttctacatgcactcgtctgcttcaccgccaatcctccatggagatatcaagacagcaaacatcctacttgatgacaagctcaacgccaaagtttcagattttggggcatcaaaactagcaccagctgatgaggccgagattgcaacgttggtgcagggaacttgtgggtacctagatcctgaatacctaatgacttgccaactgaccgataagagtgacgtttacagttttggtgtcgtcgtgctagagcttctaaccaggaagaaggcattgtacttggatggaccagaggaagacaggagtctggtgtcatgcttcatcacagcagtgaaagctggtcgtcatcaagagcttctggacaaccaggtaaggaatgagatgaatgaagaaatgctcacagagattgcacacctcctgatgcgatgcctaagtatgaacggggaagaacgaccgacgatgaaggaggtagcggagaggctggagatgctgaggagataccagcaacatccttgggttgaagctgaaggtaatgccgaagagaatcagagtttgcttggcattgaacaacggaattcaaattaccaactcaagcaacatgatgttcttgatctagaagaaggaagtacatatacatttagcttgtagatcatgtttgtttgtgttaaccttttataatcaatcaataaattcaggtacaaattctttaaaattcttttatgtgtaacatgagaacacatctatggagtgcaatgaaagaaccgccaagaaatttatgtgggcagtaatttttttttaagggaagacggcaggagctctgccaatttcataaaaggaggagcagacaatagaggtcgttttacaagccagccacgcaagctgagggcaagcacatagcttgcgagattaaaaacagatgggaaaccccaatcttgagaaagtgaactgcaacaagaagaagaaagcgtagaaaactcatctaggaactaagggcttcatcaaactctttgcacaaagcaatgatgaaatcaacgacctgagctaccgagttgtaaatgtcattgaaaatccttccatttctttgcagccaaatgccccaggtagtgtagatgaaaaggccgtcaaaattacgtctttgttccttaactagctccttcctgcaagcctcccaccaatctagcaaacgtcccggaaaaagagagggtgaaggcatgtgtaggccgagcttgttccacatggagctccaaacttgtcttgcgaaggcacaatccatgagtaggtgattagccgtttctggttcaatgccacagaggggacagatctcactgttatcccagccccttagttgaagtttatcagcggtgaggttttttctgtgaatcatcagctagccaaagaatttgcatttattttccattttggccttccagacgaaagttgatctgttgtcctgtatacttcttagaaactggatcctgtaagccgagctagccgaatagcagccattcggggtccatctccatgatatggaatcctcaatgccatcctgcaaatgaatttgctgcagagagtgccaaagaatgatgaactccctgacttggactgtgcttttcattctctgcatctgacgaagccagcgattatcgccaagttcctgggcaaccgtcctgtttttcctggatgcgatctgaaataaggatgtggcaatatctttaggagctttaccttccagccatcggtcatgccagaatttgactttgtttccatttcctaaggagatgacggtggaggccctgaagagttgcttatctgtttcatcacagggaaggtttgagccctgccacggtttgtcctgagctgtccaatcataccataaccacctcagtctgagtgcacgaccaaagagttccaaattagtaatgccgagtccccctaaatcttttggtctgcaaaccctcttccagttgactagacagtggcctccattagcctgctcagaacctgtccataagaaagccctgcgaatcttgtccatctttttctctgcccatttcttgagggggaacaccgtgaggtgataggttggcaaagctgagagggtagacttgattagaaccgctctacctgttttgttgagaagttttcctttccaggtaggaaggcgagcagcaaatctatcaattaggggttgaacatcaagcctccgaagctttctgatgtgcagaggtaggccgaggtaggagcacgcgaattctttcaactgggctgggaagggggaaagaatatcctggaggtccagatcttcacatctgatggcgtaaacctcgctttttgttaggttagtgatcattcccgttgttcgtccaaagtgaaggaggatagcttgcactgcctgtatctcatccttgatcggcttggtgaaaatgacagcgtcatctgcatatagagccatgttaaagcgggcagttctcctatgaaggggctgcagcaagccttcatcctgtgcagccgcaagaaggttttgaagtgggtctatagctagaataaagagcatcggagataacgggtcaccctgccatagacccctgccatgcatgaaactgttaccagctcttccatttaggaggacattagaagaagaagaaccaagaatggagcagatccaacctagccatcttctaccgaaccccagcgtcctaagcctgtcaagaaggtaaggctagctgactgagtcgaaggctttggcaatgtctaatttgaggagaattgccggggtcttggaagaatggagctctttgaccaagttgttgacgaagaggaagttgtcctgtatgtttcttccttttatgaaagcgctttggttgtgggacacaagctgttgaagtttcggagctaatctgtttgcaaggagcttagaaaagagttttccaaatgcatggatgaggcttatgggtctgaattcactgacacgaagagcattctctttttttggaagcaaagcaatgtaggctgaattcaaaagccatagcctgcgtgatatcttcctgaatgatgtcccaacattttttaaaaaagcacctgtgaagccatctggacctggggagttgtctgaacgggattgaaaaattgcacttttgatttcttcaactgagaaaggtgcttctagatcagcgaggtcaaggttgtgttcctgtaagaaggagggattgatcacagaggttcgagacctatgttctcccaagtgctgcttgtaaaagttgaaaagttcttgtcctttttcttcatgagagtgaaccatcccggagtctgtcaggaggtgttgtatgaagtttttccttcttctcacgctagctttgatttggaagaaccgagtgtttgcgtcacctgctttgatccacaattgtctggatctttaacgaagtcgcaccctgtctagggctgccagacctaagagcttctgcttaagggatcttctgaaaaggatctcctgagctgagaggttcctctcttcctgtgctaagtctagtctgaagatcagctcagtagctatctccattctcaactttagactcctaactctgcatctgctccagtttcttagtgctttcactgttcgggctaacttgataagaattcttttcagggcatcaggcgagtggaccggttttgaccaggcagactgcacagtttcaaggaatcctgggagccttatccagtatttttcaaacctgaaaaggttgcatttaggcctagaagggtttgcagttagcagcagaggacaatgatctgagaccatcgtagagatagctgaaagcaagcaattttggaacctttcttcccactcatgtgagcaaaacaccctgtcaatttttgttaaggttggtatttctgtttcgctggatcaggtgtatcgacggccatttagttttatttcaataacttccaacatgtttaaagccgccctaaaagactgcatcatgcccctgttaagattgctgttatttttgtcggagtcctggacaatgaggttgaaatcatctaagatcatccacttttgatttactgtgttctttgtttgctttagttcctcaagaaattctcttttctcattgtctggttgtggtccatacacccctgttatgctccaagccaagacatcttctttttcttttaagtttgccgtgatcgagtaaacacctgtttgcacactttcaatcgagtattttgagtcagacaccgccagcaggatacctcctcttgtacctgtagccggcaggaaacagaaattatctgcaaacgatggacctagaacctgttgactattgcttgatcaaagaactctaatttagtttcctgaagacatacacaggagcagtttatgtccatgacaaggtttctgacaacctgctgacgggccgtggagtttaagcctctaacattccaactcaaaatggcacagtcatttgtagacatttaacgggaggggcacctgcagtatcccaagcggatggaagagcacaacctatagaaatggtgaggcttgaaacatagtagagaagcaaaacacagtcgcagggagagatgaggtagagcttggccggtagaggcaactgagcacttcattttctgcagagacataacctggatacataactgaaggaccatccttactagatcgaggtctaactgggtacagggggagcatgaggcacagcatagaagaacaaagccaactactcgagctacaagagctccaaaagaaactaaactgctctaaacccctcaggagaagcaaacaacccatttcagtactacaaagactcatgatagcaaaaaggaacagcacatcaacaagcggcgaagccaactaagtcttcttcttgctgtcaccaatggcgcagccggccaccagagcagagaaggcatctatgacctcctgagagagaggctgcttgaaaagcttgacgtatttggccattgcgtcctcagtcttcttgccgtcctcagggagcaggccagccttcttcatcagcagctcatgagcgaggtcaccttgcttggccggagaggaacgagcggctgccttcttggccaaccgagcactcttgcggcccgcctggctaagacgggtcgggatcttcttcaagagctttcccttggagacctggcgcgtgggagttttgagcagaggaggctgcaccgccgcgaaggcctgggtcaggaaatctgcaagcttgtctggggagatcatcagaggcgactgggaaggctgagattgggcagcctgagagacctacaccagcacggcggactgggacgcctggtcagctaccagctcctccagcatagggtcagcctccatcacgaactggttggcctgaagaggggtggcctgggtgatcgggtcctgtggggatgtagaaggggggcgagacagctggaagccgccatccttcatcactgcaggaaccgacagcgacggcgggggggatgaccttccacgcggagacctcgagcgagcggccctcaccggagaacaagctgccctgcggtgaccacccccgtaggacccacctctgttctccgaagacctggaagaggagcgcctggggaaagctgagctgcgagcaggagggacatcccaccccaaggggcggcggcgctccctcgctggcggagagcgggaacgtgagcgtgagcgatctctgcctgggcccgggctagggaaagccggaggctgagggggaagagtgccatccttgacgccaaggctccaaataaaatcatgatgctttgggatttcttctgtcatcgagacaggggagatgattccactggcctgactccctagactattcatccaagttggctcagttggcggcgggttgaagtcgagcacctgatcgagatgcacgagcaccgggtaggccagcagcttgggaggggaagtcctctgccgagcctctccgtccaggtcccagcgtgagtctggggagcgcggggacagcggttcttcaagctcgaagtgcacctccttcgggatggagtccggatcgtccgcccacagccaggcgcagaggcaagccgtctcgttctccgttcttggctcatcaaggtcctggatcaagcatccttcatcaagcagtcctgtaactgtctctgccgaccaagcgtggctggggatgccttcaaagcagacacgaatgctgaagcaccatttgaccagctctgcctggacgcgtctcgaccacgggagcaccgagaggtcaatgtcctccacagcaaaagggctcgccgcaaccatcatgtccctgagcgaccgagaggtgcaggtgaccaggtagcctcctttggagaagacgacaacattgaggtcctcacgaggaacctgaaacctggacgccagtaacctgttgatctgtctcatgttcgtcactgggagattgcctgtaacctgtaccaccgctgcggtgcgagaaaggaaactttcatcctcacggatggccgacgtcctgggcaggacgcgctggatgctgtccggcctgttggctgggtcccctgggcgcgacattgccgggagcggagggaaaactagccgactggctagcggaggagcaggagtggggcgaggaggctggaccccccctatcccgtcgtctgtctcccgggcaccagcgggctttgtggccagaactgccacagagaatgcacctcagggggtctctacaggaagcaactcggtggtcctgagctagatagcggaagcagtgacccaccgccttctttttaaagagctcgaggaagctgatccttgcttgaagaggcttggactgcgagaggaaaggttggtggcgaccagtgaatgcggagggaagctgaggaggagcagcggattgaaggtgcatgaatgccgaaggccgttgggcatgtctcttcctccaccaatgctttggcttcactgtctgccaaacttgaagacgggtggcagcctcagacggaagattttttgggattgctttgggaagctgcgagggcgaagccattcatcttgctgcctgaatgaagctatcctgaggagtaactccctgtaccttcaagccggagggcacaggaggagtaaatccttcacccaccctgcgcagtaaaaccggggctgcttgaaaacttaaagaacctgtagaggggggaacctgctggatcttggctggcaccagggggacgcgcatccgctgcctcactgaccagatttgccaggaggaattgagggcgaagcagatctggcagatccccatccgagtagctgccagagagggagccgaggctgactctctctagaaagggaggatagccgaggatgaaacctgtgctagcgggggaggacactagggccggactggtcggtggaggagggggtgggcgcctgggccagagtggcacccggcgatagggcgagaggaggaggaggagacgcgtcgaccattcggtcgtgaagttgccaggaagatgactgtccatgtgggcagtaatgaaaagcaggaaactgcataggctatagagaacaatgatatgcaactatgagtattgaatggttcatcaaatccaccaaacacagagcttaagttgtgcaactaacaaacaccttggataggcaaaagaaaaatcaaaagaattgttgttaatgctcacaatgccgacccattaccatcgtgtgccgtggtgacagatagagacagttataattttggtcctttttccactaacacgagaaatatggcctggatttcggccctaaaacaaaaactcatgccatgtttgcgccttttttcttggttttagtaccacctcggtaacggaaggcggaggagggcgcttcgctatgtatataagcaggtgggcttgttcaaaacaactctcggccttttggctaaaatcaagggtttgtttggtagagctaaaacttctaaatttaggtacaggagttgagtctggggtagagctgtttaaatccagctccacttttttagtttattttgtgagataactctgctcccatttttggtagagcttaaaattgtttagtttatttctagtttattttgtgatacagctcctctagttcattttgtgatacagctctactccactccctttttggtggagctgaaattgtttggctttatcttgtgagacagctccacctagctccgctcccatttttggtgaagctgaaattgtttggctgagattcagctttagaagaggtgggactagagttagagctgtgccatctgtggaccatatatccactgtgatattgaatttattttttataggggagggtccatcacagtgtattgctactgggggccctcacgtgtcgcctaggcgttgcactgatgccagggcctggcacacccccaaccaaaacagcttttaaaagtttgatgatttctcatgctgaacgctgatcctctacgtctgtttaagttgtttactgcaggaagagttgagttgagtactgatgttgagtgccattaatttgctacgaaattggtgatccatgaaactcaaaatttcggatagctttcgtcgtaaatttgctaaaaaattggtcactgacctgttgacccatgaacaaaaactctgcaagagtctgcccaaaatctagacatcgtcagagttcagacttcagatgtgtccaactcttataagggcgtttacaatatgcggacgtggcattcagcctccaccccaaaaaccgaatattccttgccacatcatccaaatgcacaacttccttagctcctagtagccaacattggctacccgttcttcgtctccggtgggacccacaggcgggctagaggagagaggggagatgggcaaggcagcagacagggatttggatcgtctgccttcgcagagtgaaggcacgagcatgcagtcagccccttatccaccattgaagtaatccaacggctcacgtcgcatgtgcgcttaaatagacgaatgaatttgtctgtgaaagaccacgatggttctatcgcaaaaaaaaaaatcccacgatggttgttttggtctgggaagtgtacgcgagctaaagaaacttacaaactatattagtgctaatacacatgaaaaaaaatggatgatatcaccaaattaaaaatacaagaaaactgaaagtttcaaataacaacactaattcattacaaagtagttctccatctttttcatattataagtcatttgactttttttctagtcaaaaatcgttaagtttgactaatttatataaaaaatagtaatatataaaatatcaaattaactttattaaatctaacgttgaatatatttttataatatatttgttttgtgttaaaaagtaaaaaaaaagaagtttgactagaaaaaaaagtcaagcgacttaggccttgtttagttggagaaaatttttgggtttggttgtcacatcggatatacggacacatatttgaaatactaaacgtagtctaataacaaaacaaattacagatttcgctaggaaactgcgagacaaatttattaagcctaattaatccgtcattagtaaacgtttactgtagcaccacattgttaaattatggtgtaattaggtttaaaagattcatctcacaatttacacgcacactgtgtaattagtttttttttccacatgaaaagtttttattttgggaactaatagagggagcatgacgcaatgtcaagtcacatcataaaaagcaaaagaaaaattatgattagagcataggattgataagaaaaattacaaaatttataatgcaaacatcattggtattcggactgaaatatagcagtagtgcttcgtggactttgacagacagatatccattcagacgtgcacaggcgacgtgagccattggattatttgaacggtggatgaggtgccgactgcacgctcgtgccttcaagccgtgaaggtagaggatccaaatccagcagacagggagagaggagcggcagcgccgcccggcatcgtcgtcgctgcttagcccgcctggcggcgcctccttgctgacgagccgcctagcccgccgtcgccgtgcacagccgacgagcccgccgtcgccgtccgcggccagatccggcgagcatggcggccggaggaggaggggacgcgcgacggccggaggagggaggcgtggcggctggaaaaggaggggaggaagtgcggcggccggaagacgaggacggcgacggggctccggtcggcagcgacctccgcgaggacgaccacgccgccgctcgtcgtccgcgaggaagacgccgtgaggaagacgccgacgccagatccggctggatctggccgtcccatcgccgctccgcccggcgccatcactggatacgccggcgctccgtccggcgctgggatcgccccgccgcctctccgtcaaccgcctgggccgccgcgtcgtccgccgccgccccccgtgtccgccgctccattcgccgccgcctgtgtccgccgctccatccgccgccgccgcctgggagagaaagaggggcgccggcggcggagtagaggaggggacgcgccggctgggttcggcagagagagaggagagaaaaagttaggagagataacgggtgggacccagtgtagggaaaaagtagaccacatgcattgtggagcttgttgcttatgaagtttctcagtctaggtggcagttttggctcctcaaaactacgttacgtgacgcattgtgactgccctaagtatcatcagatttcgctgttctagacttcagataacttcaattttaccgaaacatttaggccctgtttagattccagcttttttcttcaaacttctaacttttccgtcacatcgaactttcctacaaacacaaaccttcaactttttcgtcacatcgttccaatttcttcaaacttctaattttggcgtggaactaaacacagccttaggccctgtttagattataatttttttcttcaaacttacaacttttccgtcacatcgaactttcctacacacataaacttccaacttttccatcacatcgttccaatttcttcaaacttctaattttgacgtggaactaaacacagccttaggttcgatatgctccgcggtaacattactacactgaatactaggaaatcgcctcacaaaataggaaaaattacaatgatattcaaatttacatccagaaacccagaatacaaatcaaatccatatttgcatttaccattccctccatctccatgggactttattgttcttttcagaaagattaatactaatcaaatcaaatccatatttgccgttcaatgctagcctcgatgtgcctggctgaaagttcaactatggtcgacattccgtcttctgttggaactcacaacggcacgttcggatttaaatccccgccaaaaaaaaaaacctggcaatctggtactccctccgtttcaggttataagactttctagcattgcctatattcatatagatgttaatgaatctaggcacacgtatatgtctaagttcattaacatatatatgaatgcgaataatactataaagtcttatataatatgaaacggaggaagtagcatctattaccatggtctctactacggggatttatggggaaatattccaaatcttgcacggcagaagctattgtcatggtcattggtcgtgccatcatgtttgacttaacaccaccggtggtaccaaaaaacgcaaagaaccacttgtcatacttgcgacagcgatggcatgtgaacgaattccgccgaaaagaacctccaatctaaacattcagcgttcaaatagttttgaacgacaaattctcgacgtcttcaattcgtcctcgcgttcaatagtgggccgtgacgtatagagacaggccttctccactagtaacaggccaacagaaataaatacggcccatatttcggccccgcaaaaaaaatacggcccagatttcggcctcaaaaggaaaactccggcccatgtatgcgtttaaacgatagcacctgacgggatctggagatggatggatggttcttcggtttagtaccacctcggagacgaaggacgtacgagggcgttgcgctctgtatataagcaggcaggattagacgaagcaactcatacctttctcggccttttggctaagatcaagtgtagtatctgttcttatcagtttaatatctgatacgtgggccatgtgtccactttgatattaaatttattttttgtgggggagagcccaccacagtggcttgccactggggccctcacgcgtcgcccaggcgttgcactgctgcccgggcctggcgcaccccaaccaaaccaacacaatgtttgatcgaaatttttagtttttgtactttgttagtttcaatcgtgtagctggtgaatgcggtagagcattgaaaaatccatcagcaaggaaaacaattgtctctagatctgcaaacggatatctgagttcagatgcccctccaattctgaataatcgatataccttcatcagatatctttttatctatgatgggtgttgcctgcttgatgtccagcacgcacagtctttcaaagggaacggtgccgacatgatgcccaccaagtgctcgacgccggtaccaagctgtggcatcaccaagtctgatgccgagagcacacctaccacactggaacatgtgttcctggccaccatgaatccgtctacaccctcagccgcatcagcagcagcggtgccaccggtttccctcaccgcgaccaaggaggatgaggttgacatgggcaaggttgaggacaaatcagataagaccttgcatgatttgtgtgtagagataaaggagatgatcaatcaaatgcttgagacatgccgcaacagtaaagtggaaccaattgtgggcgatgattccaccggagtggcagtagtgccatgctctgttactaattcagttcccattgcattggaggccagtcaagaaattgttgccgatgagagtgatggcaacaacttggccagggaagaggattgtgtggagaagaccacagagggaccaggctttggagaacacttaactttttgtctgagcccaaaggttgatgttcccattcttgacttgattgctaatcagggcatgtcaagatttattcacaaggtggatttggaaccttggccaaatccagggccttgtcaaggtaacggaggcatggtggtgaagatctcacgatatgggccacctcatcctcgagctaattacaaagatgtttgtgctaagcagcaacttgaaccctgggctgatctatggttgaatcatggcaacgaaggtgtggtggtgaaactcttacagccctggccaccacctattcaagcagaagctaaagttgaggttggagtactactattattcggtgagtcccacaaaatctccttggactacagattcaccaagttcatgagtagaacgattattgtcagtgctggcttgttgcaaattctggttcctggatggtgtattggctatgcgctgcatctttctagcacattttggaattcctaccagcatatgcagcttttagcctatggttggtcatttgatgatcatgttttgttcctcccactaatgctagttttctggccaattcatgacacctggagtgaatgcttgcttggttatactaatgaagatcacgatgtccaaaaggttttgatctgtgacaagaatttgcggggagtgctaattcctacagagctcaaaattccatggccaccaccaaacttgactgttcaaaaatatggagtgttggctaaaatactgttaccaacaggattgatcaagttgaaggttttggataacatattgcgtgcacaacaatggtattgcagctccttgggagaatcactagaagatagcaccaatggtttcaccaagttgcagagtgttgaattggttcagtacaaggttgattttgctagtagctccttgcttgatattgtagtattgcaaggggatgattctctgccatttctacttcctggaagagcggttttagaatatcaagaatttgtgactcatgttaagatgacagaacaatcagtttcgaaaggtgaaacggatgtgccgaagctttgtgttctcaagttcagtttggacaaattttcaaattattcagttggagatacaatgattgctgtgttgcttacgcaaacttgtgtacaattagttccaagctacaatcagtctttatctgggagcaaaaatcactacaaactcttgatgacacaacatatgtcagtcattgcaaactatgaaatgatttggtggaagtcagagcttggtgggggcaagattagcttgtgtgcatcatggaatttctgggatctgtgtttttgttgcaagcaaatgtctacagaaattatggctgttggattatctggtgtgaaggtatggctgttgtttgctatatcagagctgtggttacaaagaaaacagctaaaacttgcattattagaggaacatatcaaggtgctctgcaattctactatgttattcttcctgcaagcgacaatacaagcatgactacaggactatcttcgttccatcttgcacaatgcccttacatatacttctgaccaagaaaaatatgatgcacagaacagaaaatatgatgcacatatgctccgtggtaacagttcactgaatactcggaaattccctgcaacatagaaaataaatacaatgatattcaaatttacatcctgaagcccagaatacaaatgaaggccatatttgcatttgccgttccctccatgggaccttattgttcattacagaagggttttacatgtgtaagaacaaaatataaatgcctactacacttgcacaaataaacaatctcagagcccttgtgtttccttttttttcctttgttttttccctgttgctctctgtttcccatcgcaacagacgaattcgtatttttatcttgattttataggtaagcacgttttggaacgggataaatcagaggcaggtgacccttctgctgcatgcataggaccgcctcattcaaactcttcctcagtggagtgaactccaaacccaaatccttgagcctctggttcgagaacttatacggcttcgccatcggcttcccatcatcctcacacctgaaaaaaaaatccaagaaacacacgcatgagaatttgagatcgatcgattgcatctcacaagagcaatgaagcaatgcacataagcaaatcaatggctaatatctgcatactttgcagtggcagggtaccgtgggaagagctccctgagcatccggaggagctcggcgcggtggagcacggtgccgatgcagaggtagcggccgcgtgcctcggggcgctcgtagacgaggacgtgtgcgcgggcgacgtcgcggacgtcgacgtaggccgcgacggcgttggggtaggacttcttggtgcccatgaggtagcgggcgacgtggttggtgctgaagttgagcgtctgctgaagcatgggacccatcgtcatcgacggcaccaccaccgccagctccagccccctcttcgccgcctcctccgtcgccgtcatctccgccatcatcttggcgcagcagtacaggttctgcatgtacgacgagaaaatttgccgagatgaatttattgttcatgtaagcaacgctgttggagttggtagaaccgtagaacggagcagagtaatgtgcttacgtctgtttgcttgcagaattcgtagtcgctccagcaggtctcgtcgaggacggcgtcggggctccggttggggttcatgtgcacggcgccgtacgacgacgtgaacaccacgcggcgcacgcccatgtccgccgctgcgttgatcacgttcctcgtcccctccactgcaaccggaacaaggtcctgcatcacggagcagcattagtaaaagttggaggaggttaaaggtgccattgtcgtctcttttgggctcaggaaccaggctagtgaacttacagggtcgttagacaccggggaggcgacatggaagacgccgtggcacccgctgaaggcggcgcggaggctggcggcgtcgaggacgtcggcgcggcagagggagagcctctcgtcggctccctccagctcaagcaggtgagcattcttgctgtcagctacagatacgcgcatgcaagaaccgatcaataaatcaagcacaacacgcaccaaatttatgcaaacaccgtgaactaatagtactagtacttaccaggatccctggctgttcccctgacgtggtagccacggatgaggagctccttcaccacccacgacccaatgaagccacctgctccggtcacacagaccagctgcttctcgccattgttgttgttgttggcctcaaaattggacgacatggtgagagacgctgaccagttactgtcactaaccaaatgctactctgaacttgtgagagaactttcgatcgagcttgtgttggctgctgctcgtatgtcactcgaactccgtatgttggtgtgagactagcgtgtctggacacggccgctatttatacctgcagaaaccgcgcgccgccatgcgacggaggaggaggacgacaagaggaagatagctagcgtaggttggtcagcaggtgaggggtgggggaggcgcagctgcgaccgcgcgaaacggagtgccgtcgccttgtcgactcactgttcgtccattcttcaggattcagtatttcagctgcgcgctcgcccgcaatactgggcatcacatcgcaaggccgaattcgccgatgggttggggcgtgcgcgtaggagcagtagagtatattccattgcctttctggacgaggggatcacgaagccaaccctggcacgtaaaccgtctcaggttttcgctcaacctggcgaatcttctctccaagtctacaacttgtacttttttaaaaaaaatatctgctgtcagaacgaccgacgattcgagtcagactggcacgattgactactgtccttttaaacctgacgttaatagtgctaccactaatactcctcctttttataatgtaagtcattttagtatttcccacatttatattgatgttaatgaatctagatagatatatatctagattcattaacatcaatataaatgtgggaaatgctagaatgatttatattgtgaaacggatgaagtactattttaatgtataacgtcgttgattttttatgcaacgtttgaccattcgtcttatttaaaaaaattatgtaattatcatttattttattgtgacttgattcatcatcaaatgttctttaagcatgacataaatgttttcatatttgcacaaaatttttgaataaaacgaatggtcaaacgttggccaaaaagtcaacggcgtcatacattaaaatacgataaaaactataggacggtataccgtctcaacggtatagtttataatttatacttaccaatcactcaccgattctttttctctctaaaagcgtgtcatgtactgtcctttcacatgacggctgctgactagtgacgactgacgagaggtctcttttctcctacattacaaaatagctatgaaatactctagtacagcactacttctacacctctttaggtccatatggatctgacacctgcttcaactagcaaagttagaattaagcactagagctagtagcatgagcctaaacaaagcatgtcagcagcacatgagcaagtttggctgtactttctggcctagctatgcatggtccatctttttatttgattgttgaataggagtatataacccataaatatcagaattagtggtatcacatctgaagtctcgtgacatcacaccctatatttggtatcagatccgctactaagatgtatcaacccggtatctaggtattggatccgatattcataggtattaaacctaacctaggtatcgaatccggtacttataggtatcagacccaatacctagatattagacttggtattcataggtatcatactcggtacctgggtatgcgacccagtacgtacaggtatcggaactgatactcataggtaccagatcagatacccgatacccgggtatctaatccgatactcataggtatcatacgcgataccggattcggtactcataggtatcaaacctgacctaggtatcgaatccggtactcataggtatcagacccgatacttaggtatcagacttggtattcataagtatcatactcggtacctgggtatccgacccgttacgcataggtattggaacaaatactcataggtatcagatcagatacccgatacccgggtatccaatctggtactcacaggtatcagacgcgatacctagttatcggatccggtatttataggtatcagacccgataactcggcattagatcttgtatttataggtttcatacttggtacctaggtatttgacccagtacctggatatcagatatcactggtggagaaaccgtctttggtcggttgcccgaaatccacaatagtctcggttccactaaaaaccgggactaaagatgatctttactcccggttggtggctacagcgggcatatttgatctttagtcccgattggtgttaccaaccgggactaaaaataatctttagtcccggttctaaatctgtcaggccttgtcaggccccccgagatctttagtcccaccaaccgggactaaagataggatctaccaaccgggactaaagatcccagggatctttaatcccggttgataacatcaaccgagaataaagcgtacgcacagcccacgcacaagcgcatgcgtagcccctctctctctctctatctcccatccttatctctttttcttctccttccttatctccatcctctccatccttctccttccatcctctccccttgctcttctctcaccccctctcctcctcccctccccctcttcctcttgcagaggcagccgacggcggcgggatggaggccgggcgcaggctggcggcggccggccggcggcggcgggatgggggacggccggccggcggtggcgggatggcggcggccggccggcggcgtcgggatggcggccgggcgcgggccagcgggatggaggacgcccggcggtggcccggcgcaggccggcgggatggaggccggtcgccggcggcctcgccctcccctcctccagatccggccggaggggaagcggcgggatggaggacggccggcggcggcccggcgcgggccggcgggatggaggccggtcgccggcggcctcgccctcccctcccccagatccggccggaggggaagcggcgagatgggtggccggccggtgagtcgattttttttttatttttttttaatttgttgtttggatgttttgatctgtgaatgaatctatgaatcgatattgtgaatgaatctgtgatgttgtgaatgagtatgtgactcgatgttgtcaatgaacctgtgaatcaatattgtgaatatatttgtgatgttgtgaatgaatatgtgaatggatattgtgaatgaatttgtggtgaatctgtgaatcgtgctgtggagttgtgatgtggatttggggtttgatttgatgatatacataccactcgattcgggagaaaataaaaaagaaaaaaggaccagctaatggactgccgctaccctctctttagtcccg

SEQ ID NO: 10075 - DNA, 15565 bp, Oryza sativa
aaaaccgggactaaagatcgatctttagtcccggttttttcacccgggactaaagatacccggattggtagtcccggttttacagggggttacgaaccgggactaaaaagcacttctccaccagtgtatgataatctagcatctatgtatcacatactagagtttctaagatgtagtataaccaagagcccaacatgacatatctaattagaatccattgtatccatatataatctaggtaattatttgtctggtctaatccgtgcatggtataggacacatgcaaatagatgcaaccaatcttagacacatagctaggctactaggctctgccataacaagtaccctacataactagggtacgggactactagtagctattacagggatttggtatgcacaacaagctagtagtacctccggttttatttactagctaggctagtatcaaaagcaggacttaagcatgctgagtactagctagctgtcaggaacaaaactatacactgatacacacagcaaatgtgcgtgatgataatcctagcagcacgcgacatactcgggagaagccggcacgtggggccgcggcatggaggataagtggtataccgttcaacggtataccgttgtgtagtctttctctaaaatacggatggagtatgttcgagggaatttgacgatatttaaaatttatcatggtttatctcggtgatacgagagaaaaacatcaaacaaccgatgctaccgcctacggtcttgcgaataaaaaggtaaaataccgatggtgcacaaaatacatataactacgtaaaaagagaaaactagcataaatctgcaacattttatgacataattaatctggaacgtaaaaaacaagagaccgtaaaatatatattttatattaagatgtttcgtttacttagagcacaaagcagaatccgctgtgctcaagtatcaaaactggagtacttagtggactaaaaaccaaccaaagaattccgtctgccgttgaaagttgaaactaaactacgatttgggcgcgtgttagctgcacgactcgcggctttcgaaaccgaacggcacggcacggtcggagataacagaaacccacctggttatctgttaccgtgttctgaaatctgaactactacccaatgtttgagactagctcggtgaggttcgcaacatcaacctttttgacggctatcggctcgtgtcggctggatgcttcggcttgcgtcacccggtgggcgcgccgccagccgatcgaacgggaaggtgaggtgcaattccaacttctcctccgcctcccgtgggctgggctacctgttccatcgccatatacacagtccccaccgacacatgtccatggctttgctagtggtataatttcactttgattctctaaactggttgtcggatccggttcgtatccctaaactataacatcggatattttgactcctcctcaattattaaaatcagaacaatttgactccctcgactgttttgaagagacggttttgctgacgtgatagtgttgacctggtttcgtcctacgtgatattgacgtgatgcttatgtgatattagaattaaaaaaatatgtgaaacccgtttatcattaataaaagaaatattatgggattcacatgtcatcctctctttatccttcccttcttcctcatgtctctctctttctctcccctttctctaccccttcgtccgtctatgggaagagctaaagcggtggcaacagaagtgcaagggattccagggcggcaatggtaccgcagtcaggcgtagggacgaaggcggtggactacgaggtggagcagcgggatggtggtcgcgtggtgaagaggaaggaggccggcctcacgagagggagccatggaggagtgccggtcgcaacatcaagtgttgggtgagtgctagtgtcgatcgcaataccaccaccgccgagatccggctcttgcccaccatcgtcctataatattccttctgtgaatgacaaatgagtcctacattttaaaaaaaattaacaccacgtcggacgaagaccaggtcaacaccgccacgtagttaccacgttagcgaaaccgtccttcaaaacaattgcaggagttaaattgtgtcggttttaatagttaggggttgagatatccggtattgtgatttagagataagaatcagattcggctattagttaagagagtcaaagtgattttattcctttgctagttgctgatactacttgcgggctgcggcacatagacagatcacttaacaccaaccaggcaggccagtctccaagagtccaagcccatagccttaggccgaggccaggatgattctaatgggccttgtgccacacatgggcttcacagggcccgaattcacacattgccttcttcttcctcttcttttaataatcgtattaattcacatacgtgctcagtcaaccggaacggggtcatttaacttaactgatgtgaattgagccattaacatgtggaccgtagtaaagtgagctcactggacagtaactcaactgcatgtgtagttatgggtgatctgtttcccagtcaacccatatgctcccccatgcactggcacataccccgtccagagattaatctgggcaaatgcttgttaagattcatgatcagatgttgaggttaagtccagaaatagtagaatactcatgcatgatccccacaaagaaaggagggagggagaagaacatgcatgtggtactagtcaactgtagatatatctgtaacggcatgaagctgcacatgagaagcagttatagttcgcactatttagagacctatagcttcggtggacatgccaacggcaacggtagaatcgggcactatcgatcggacagacgactctaactaatcctgtaccgtaatgagtgctactgaagattttagaatcatccactccaggcgagacatgcttgcagtttcagacatccaagcagagacaccatatgctcagctcaatgcggcgagcgttccaggtgatgatcatgatctacaaacaggcctcgcagcgacaatcatacagacccaggatgtgaacagaagataaaacagctcaaaagcaagcaggcttttctccttcaggccgggctaatcaatgcaatgcagcagcacggcgtctgcacacgcaatgcacaactctcgcgcagtcgcagaacgatctgaaatctgaatagagagcagaaacaacaacggagatcgatcgatcaatcgatcaccgatcaggtgaaggcgtgcataatttcagagattttgcaggagcaatccatctccaatatgttcggtcattcaccgacgctttcagaggaagcgagtgatcgatgagctgctgctgctgctcaactgcaggggaagctggcagacagggcagatggggaagtctcccaaccgcgagaactttatgtcgcccatgcttgttggcagctgatctctctgatgagcttgctctcacacccatccatcagctgcgccgtctcacatcatgcacatgaaccacccgacaccagcaaagatcacggcaagtgagagcattcaaggctcggtagctgcagcagccagcagcagctggtagtagtagcttggtccaaaccgatcagcccagtgagtgatgggttgccatgcctacctccctcccattcatgtgccatggccatggagttctgaatgctgctcagtgccgtttcttccgctgcagcttgcaccaaagctaacagaattcagatcgaagctgatagtacgtgctagtttgctaccaagttaacagcaatccaacagcacacacaacggggagggaaaaggggatattacactttggtcaaaagccatcttgcaggagcagcagcagccaaacatctttggccaaaaggaaacgggagtatgatgatggatgagaccttgagggcatcgaaagaatgaaagatcctctttgctaggcatcgccccagcacgcttaagttcgttcccttccccatgcaggcatgctctcgcgcgtttttttgagcaaccacatctccgtttctaccaaaagccatggagattgagatgagaacaatagggcattgcagatgctcttttgccaacatttccagtacaaggatggaagaactgcttctgaaaatgcaacgatcagagataaggaatttacacaggcttataccagtaaagagtaaaatgggagagatcgtgcaggtttctttaatctatgagtaaaacgcagaaatcgcaatgaatagcctggcccgagagaagaaatgcaagtactggtcacctgaacaatctgacataagctattatgaacagtaataaaccaatctgacagaacaacaatatgaacaattaactcctgatccggactagcacaacgcaagatgcaccccaggagaacaagatcatacaagctgcaatgctgcgttacaaacttttcatacgagacactatgcgaagctgcaaacaaaccactgtaaggcaatcttcatgcaaaatcagaactcaattaatacaccatgctcgcacttgagaatttcgacacaacttgaaccaaatctgccgaattgtctgaggcacgtccatatcagaaatcacgcctatagccaatacctaccccagatcatacatacataaatgcttcagactggcttcccgtgaacaaccacagggaaacactgtacttgtacgcaagacctattaagtaatgacaattactccactgatcacaaagatcacctttcaatacactgaatcactgattcacaaagatcaacttgaatagcaacaagatacgcaacaaaggaatccatccatccatctgcaccttgatagtatttgctttggtcaactgaccaacaatgaacatactgaaacctttgtgatgccattgttaaaaagaattaacaaatagaagtaacaccttaagacatcgttaatgaactcatccaataggctaatataatatccattatgtccagaaagactatgtacatctaagcacaccaagaactctagtcgcatatcatgaaggccaaaaccaaaactctaaacaaaagagagagagagaaaaagaatattataggtaaatactagagacaataacgaatccaactgacatattaacgcatattgacggactagacagagaaaattgccaaactcttttttagttttttaacccatcggcggcgaggttaagatactggcatgctgctcaggaaactgttggtttcaccgccaccggcttggctgggtcagtgccgagcacggtggccgccgccggcacgccgctgacagccgaagcatactgggggaggacgctggtgtagtagatggcgtggccattgctgtcatacgccacctgcggcgcgtaggcctgagcattcgacgcggcggcgggggaagggccattgccgctcgcattggcattgccattgtgctgcgcgacggcgtagacggcggggaaggaggtggcgccggggccagcggcggtggtgaagtagccatgcggcggcgcggggatgaagaagacgggggcatggtcagcgccagagccaggggcaacagatgtataccttcccggcaccggtaggaaggccgtcggcggtggagcggatgatggaggcggagcagcgggcttctcctggtacttgggcaagtagtactccggcgtggccgttggcggcgttggggtgacggtggcgggagggtaggcgcgggtgagggagtcgtcgctgccatttctcggtagggccgccggcggcggcgcggcggtagcgggagcaggtggtggtggtggttgctgcgcggcggtgtcggcgaactgtagcttctcgagcccctggatctggcgctggaactcgccgggagagacgaccggggagacaacgacgtggtcgcttacggggttggtggtgtggcggtcgtcgttcttggcggggatctcgacggggacgttgtccttcaccgtcggcgggtcaccggcggggtccttcaccttcaccgcgggcggcgggacgaagccgttgtcgaggccgaacaggtagtcggggcccgtcggcgctggcaacaccggcggcggctgcggcatcggcacaaccgctggtggtggcgactgcacggagaccgactcctgcttcggctgcggtggcgacggtggcggcggctgatggacggagttgagcgcgtcgacgaaccactggcgttgctcctgcttgggctcgaggaggccggacggctgcggcgggggcggtggcgtgggcgactggacggggaagaggaaaaccctgagcctgggcgtggaaccgccgcgggacgagccgccgccagatcccggcgcggggcggagcaggtggaggcggtcgtactcgaggacgaggtgctccagatcctcgtcgttggtgacggagacgagcgcgtcgaggtcctcgccggggagctggtacttgacgcagaagtcccccggagaacccgcgaggccggccaaccgcgcggcgaagtcggcgaagcggaggggcctctcgagcgacaggatcttcgtctcgccgttgacgtacgagagctggtggtcgtgcggccgcggctggatgcgccccccgtagctcaccatcaaccgcaccttcgccggcggcgccggtggcgggggcgccgcctgcgccgccgccgcctccgagccctcgtggtgcgcgtcgtcggtggccgcggcggagtgcggggacgagtcgccggagtcggccatggcggcggcggcggcgcgcgttagggttggggatgatatgatgggggagagcggggtgaggggagagggaggctgttataaggtaggtaggggtgggatgaacgggttttggtgcgattaagggtggtgattagcgatcttaattctgtgtttagtctctaaagaggggaggggattattgactgcggattttggcgggggtttggcatcgggagatgtgtggggacagttgggattgaggtgtctactgtggatatgtgtgcctgctgtggcgggcccggctttttccatttctttcttttttattatcctgcttcttttcgcgtgatctttttctcacctggagatacatgcacgataggatactttgcaaattctaatagtttggttttagtattactgattggattagcatccagcaatgttgaatcagaaatgtgacgccgttggacagatcgaaatgcacctggcgaattttttcgaattggaaaaaacggcagcatttaaattttctgttcgccgatgcctggtctattgtggaggggctttttttagctgctgtgcggagcgtcagggcgtgccgtgatggcgacaagcggacggaccgatcgaaggaagcattgggtgcgtctggttgcgctttacgacggcccaaactgcctcgccgtcgccggtgtcgccggtgccagcccgcacctgagaattcaccccattttacaagtttggaagaaggaaagcgggcgcaagtttcgatgcgtgggcgcgcacccacagtttccacttccaaccgacagggtgcactcgggcgcccgggtgtgtgcatgcgtcgcacgatcgcccaaggccccaaaggccaagaggggtggtgtgctggggccgacgtacgtccatgtgtcgcgggggtgctgccgctgacgacgcgcagtcgcaggcgcagggccatgtggatgtgtgggcgccgtcggagttaattttggcagcgtgttaggcagagaggccgcggcagccaccacaaaaccggtcgcttctcctggtcaaaacctccgcatctcaccgcagccgcacccacgggcgccaccacaccgctgcacctgcactgcccatgcgccccgcttcgcatacagaaacaactcgttccactgaaattctgacgcatggatcaataattttagtagaagtactgccctttcctggtgaaccggatttgtttccccaaaattatcctgccatgacaaatttgttcgacatcgatggtcacatttccacaggtactacttatggtgatgaatatgtgtacgttgtatttgaggttagatatttgccaggtagtatacgtgataggaggaagaaaaaaaaaacaaaatgataccaggagtacttatttgcactactattaaaatgaggatctgacattacggatacagccaaaccagccgtcaaacgagtgaccgcggaagatggcgagcacccgatgatccagctattgacctggccctcttttcggcgcgtcacagtttaacttagcatccctaaaaactgccacgatcacggatctagccagctgcttaatgacctgggagagtgattacactgagcagtgggtcccatcaccaatagaggtccgtgggcccacgtctattttttctgtgcagatttccttcattctctttttcagcacacacgaaatcgattttatctatcacaatatcttttcttaccaaactcagcgcgtgtgatcttcttttctggctgctttgtttgaagagaagtgcacgattacagtgacgtcgttagtatcgatcccagatgaaagccggatactatattatcgccattagattagactatttgtttcacaacgcatgtggcaagccagttggtagttagcaggcatgttagccggatggattctggcaggaagttgtgtggatggagtatattagtagcactccttgcacaaaagatatactattagtagcaccaaattaacaatgctggttaatccatccgggcaatgtaataatgtacacctttgtgtttccaaccaactaatgcatgtgtgatcgagtagcagggcctgtgtttttttaagcatgcaaagaaggttaaagaaatcattagaaacctgacaatcaaggtgtctaatgggcaaccaagcaaagcaagcgagtgaatcctgcatcaccgttgcatagctggaaaggataactgatgatcctacatttttaataactgatagaaagtggcgtgccgtgggtgacggcggccatgattagctgtgcataattaccactttacaagattgctaatcagcgaaatcatgctgtttttttccttaaataaaactgcagaaaatttacgtgcgtacgtgcactttaaagcccaatcagttttttttttcggatttactcggctacagtttctgtccatgagaccaggggagaggcattgaccgagcgtcatctccttaatgggcccacgtggcagtcacagcgaaatatgggcccaccaggccggggagtggggagggtgacgcggcatgcatttgagctggtggcgtacgagcggcgcggcccacccaacacgttgctgcatcatctctccacacatatgcgttcacaggtgtagtaaagttgactcggtaaaattgactaagtaattcttactgtaacttttttttagaaaaaaaagataaatttaataactgttggttacttcgtgttagtgtagtattttcacgattgataatgatataagccgacaatattattaaggatttaagggcgtgtgaaaagaatagtggacggaatggccgaataggttctccgccaaagaggagatgctgctgatcgcaaagaagaggagtacacgtacgctttgcctcaatgagatttagagagcgatgtgcatataatgtgggtctcgattagggatggcaaccggggacccataacccacaacccgatgggtttttactctattaggagacaaatatgttccaaatattacacccatggatctcttatcgggctaaaacgtcacccatcggttgggccgggtcctggaacgttctccatccacccgaacccattaacccgtgggttaaaaatacccataggcctcagcccagaaaatacaagtagcccaatgcccaacaacaaatctaagcatctaagtctaagtgtctaaccctagaaataaaaacccatttcctctctctctcactgattcacttctcctccctccccggtactgtgctgctgtagggtggccgccgccacaaaccctacggcgcctctcgcccgcgccggcgcacgcccacgccgcccgcgccacccgcgctgtcgcacgcctgcgccgtacggccgcacgcccccaccgcgctagccgccgccgcacgccagcgccgcgctcgccgcacgcccgcacgccacccgcccaccaccgcgctcgctgccgtacgcccccaccacgcgccgcacacaatacaggcctgcgcagctgtgtgttctgcacgcagcatggcagcggtctccggctccggcaacgacgacggcaagtgatcttcttccctctttattaactgttgcagctatatctaatgggtatgggtacccgtcacccgtgcgggtgtgggtatgggtgaatttttcacctgtgagcgggtgtgggtattggagcgggcatatttcattttaatgggtgtgggtatggtgtcggtgaatccaatgggtacgcaccgttgccatcgctagtctcaaatctgtaaagaagattagagtaggaattaacgcgtatatgtatagtatcagcgttccaattagacagcaactctttttttttttttggcttcaaattctactaaacgcaacctatgtaggagtagcacatgcacctccagcttactttggttgcacacacatgcgaatcgccttcccgaagttaagttgagtgtgttattcaaaccagctgcaattatggtcagtctacgcagtctctagtctcacaggtcctctttctttaatatgaaacggatagaactgaattagagcaggtataatagcaggctgtaagccagctgcaaacatattttaaggagataatgagaaaatagaaggataatgggctacagatttgtagccagctgtagcacggactttaagacgtagtgtgcgtatgacaggtgggaccatttattaatagtatagtatgtaagtattgtatgaataaactattagattggctatagataaattgaagttagtagtgggctatactattgaacttgctcttagggtgtacgtgatttagaagcaaacatctcgtcagactttcttgcctgcacacgatttagggattgtttagtttaagtcaaaattgaaagtttaattgaaattggaacgatgtgatgaaaaagttggaagtttatgtgtataaaaaagttctgatgtgatgtaaaagttagaagtttaaagaaaaaattaagaactaaaccaggcctcattccttctctctgtttgttttgttctggggctatgaagaaacagaagaaagtttcttgcggcgccacctcaacgaatatccttgttcgcccaaggcctggagttggactgaacaattctctggataacctcaacaagaccgattcgtttgtcatcatactacagtatcattaggatcagggttttcaatatctgaagatagcccttgacatgttcagctgattgcctgaaactgacaggtaattggtacttctagatgattttatttcagcttttgagccgggatatctacctggagaagattaccttaattaatttcttcaagtccgctaatgatatagtaggagtactatactagtatactggtactagatgatcaaaatggcaaccacctaaccgttaaaacataggagtagtaggaggagtagctacgtagcctgaaacctcggaagtgtagatggagacctcgcagctacacactactgaacaaacgaacggtccaaagccttttcacagagagcaacctccaaaccgggacaagcatctgctgccgtccatgcggcgccaagcaaagcccatcaccgtcgtgttggcaccatcccagccgtctgtccctctcagtctcacccatcatcatcatcatctcgcaagcgtcgtggacgcgaaagtgaagcttcatttgccgatgtactagcaaacttcagcctcagctacatcgtgggtacgctgcatctcctgctccatcggtcccaaaaacaagtatagttttacgcggttcatatctaacgtttaatcattcatcttattttaaaaatatttataattaatatttttatttttattaattgataaaatataaataatattttatgtgtgactatttttaaaattttttataaatttttaaataaaatggacgatcaaacgttaaatacggatactcatggctacatttattttacgacggaggttgtaccaattaacatgatctaaattgttcccatcaatcactatcacggccttaattaaaagagcaagttaattaaaccctctatttatggggctaccaaaaatatgatgatgggagcagatgcagagtactcggttaacttagctccgattgttaagctttaatcttcacatgcgtgcaagtaccagattgagctgttttgtgacttgtttagggtcgagagcctcgagtcccgagacacgtaggcaattaggcatgatgggtttaaccaagatacacatgggttagtgcaaatcaggattaaccaagtactctcacctgactagataaacatggaagctagtactacaagtcaccagccagagttaacaaacactgctctgggtcttgcgatccatgtgagctgaagtgtttgaagttccttccaaacgcattaacaaattctgccctgctttatcactgttataaccactcggcaatgtactgtaggagcagtagttagtggtacaggactatcggtaaactcgaattaggagtcgtggttgattgcattgacgagcgtaacacgagctggtgcagttggttggtacatctgcactcttcacccgtgtctgaatttctgctcgtctgctgtgctgtcgtcgtgctgcacagtctacaggaatagctagtggaccagtggagtaggaggatttacattttacaatctcgatatattgcctaggagaattgcgtgatgcatccacgaatagtactagttgctcgagatcgaggagggagacaaggattgtgtgctattttactggacttcgtgtatcctgtttctttcaccctttgctgctactgcctactagtactagtagtagtactagtttgcttgtgccttgcaagttgcaacatgttgtacgtatgcagttactcgctcagtcccaacaaaaaaaaaaaaaaaaaaaaaaaaaacataggtttctgtgccaactatccgtcttatataaaatttttttataattagtattttcattgttgttagatgataaaatatgattaatactttatacgtgacttatcttttttaatttttttcatagttttttcaaataagacggacggtaaacgttggacacggatttccactgctgcacttattttgggatggaggtaggggctgtttggtttaatgcttcaacttgccacaccacactttagactgccacacctccttagccttgtgtttggttcattaccttaattatgccaagccacactttcttaccatcttacccacatgtcatagactcaatcttttgcctaactttaccacaaatgtggcttacaatttgtaggccacaaaaagtgtggcaagccacacttacctaacattgtctaaagtgagttatgacaatgttagttaagaaccaaacatgctggtagtacttcaagaatttatctggcaggcaacatatgctactggacgctgatatttggcaccggattcagcccatctaattttgagcccaaccagatcttatcatatctgtcaaagtttattcggcccaactatatatcattacgaggcccaccagtggcagtgctcccctccctattggaccggagtacaacaaagcccaattgaagagacggcccaatgaatgggctgcagaacaaggcccacgccgcaattgctccgtggaacatagggaaggaaagcctcgcaagcagcaggcgaagaatcgaattgcggcctgcggcaatttgtcatcaaaactcaaagacatatttcagctacttgtcaatttgtcatcgcatacaaagcatcgtcttcttgtcatcagcaacttgtttgcgtacgattatgagctatgctttggcctacttccatcagcaagtgtgcaatacgttgagctagcatccagtggtcactggttagttagcagtagttgtgtactgccagtatagtagtagctaacaggaaggcacattcagtgtgtcagtcgacgagtccatactaagtcataacctggttgtccgttagctgcaggccggacccgatgcgtggaccaaaagagtatcggaattcagacacgccacatgattttattgatcggtacacgctgcaagtatggctgggctggtccaagcccaaaattattaagagcaatgacccggtttcagttgcaggcagcaaatggaagagaatacttgtagtatccaggaaaatcttcctctcaaaaactttgaaatatattagggcattgtttagttccaaactttttctttaaactttcaactttttcatcacatcaaaactttactatacacataaacttccaacttttccatcacatcgttccaatttcaaccaaacttccaattttagcgtgaactcaacacaccctagtatttgctgcagaactgtagagaaggattattagagcatgtaactgatgatgagaatgctgaattattgatgcaccaactcttcatccgggactgattcaaagggatttagtcgatttttctccctcgattaaatggaagacactggtcttctactctgttatcatctgttcaggaaacaggactggagtagccacatttaccatctgtaattataaatttataatatgctcatttgacagaaatgacatatatatcatccaatgcaatggaacatgagcagagagtagtaatctagagtaaatgcccatctgtttgtacattatcttaccaaggatttttatcaaatcctacctgaacgaaagcaaagccgaaaagaaaaaccatactaaaatagaagagagatcagggaacaatacacctaaactgcaagctgagagaagcagcactgaagaacaggacacgacatggatctatctatcatcatctattggaatctggattcgggccactcggaacctcatgcttgctgtcgtcgatgccggccgagttccacctccgtggccggaacctcctcgtcctcgccgccggcagcagaaggcgccgtccaccggccgggaccgacgtcgccgccgctggcaacgacgacgacctcacctttgcttcttcttcttcttcccccggaggaggagccagcgacacgacgagcataacggcgcagagaaacgcacagaggccgagaagcggcagcgcagcagctggtcttcttccatctccaatccatcgagctcttgccatgcaagaatcagcttgcagtaaagccttcgatctccccgatctcacaagccaccactaaccaaaactcccatgggcatctgccagaagacgagacgagagcttagctgaaatatcgctct

SEQ ID NO: 10076 - DNA, 4103 bp, Oryza sativa
ctcactctcactctctcagcgtgtgtgagctcagctagctcttgtaccgtggagacaatgcaagcaggcagctgttctattctttccaggattcacacatgggttggctacttggcttctctggagtctggaccaaaagtttgggtttcttgctttgcttgcttgcttgcaggtgaaatgggagatgaccatgtgtatgcaaaggcacggagcaggggtggctgcttcttatctactgcccgtgaagagaagcagctgagagagctttgtgtgatccatcgtgtatctgacagcatcatcaccatacatcgatggctttgtagacgcctcagcaagacatgcccctagattgtactgctactgtagctatatccattgcatgcatacgcatgctaattacttgcagtatggagtacgtagtactatgactgtatgagcgtgaatcaacatctgcattgtactacgtactgcagatgtatgattgcactcgctaggtgtgtgagaaatttacaattgcttcgagtatttacttttgtcggtcgcgagctcgcaggaaaaagttgatcatggaggacggagcagcaaaaggacgcaaaggacgcgatggaaaagacgtaagacggcatcaactgagagctttgctcatcttggtaaggctgtaaagctccaatccaacaaaatatttgacgctcattgacagtgttgctgatctttcattaactaatccatctcccttttaattctcatcttatttgtatatctgtcaagaacaaaatgatgggggtgctacgatgttagctctgccattcaacgtttccacaggctaagctagcaagcatgataaaaaggagaagattgtgaaagcctgaaaggagtagtagcatgcatgcatgcagtgcagccaggccaagccaaacaagaatgcttttccatggactgacgacaaacacaagctgcatctacacaaattcatgtccaaccctgtagcagacaggcaatgttctgcagttgtctcgtcacctcctctgtagggactcgctacagtcaccacacggaccttgcacatgaactcaggcaaatatatcatcacatgaactgtaaaagattgatctactagatggacaaacacaaacacttcactgttcgccatgtagatgctgccggatcgatcgagaatttgatttgccgtttttctcttcgagaggggacgagtggggcgcgcatgctggatgaaaaggttacacgaacttcaaagcgggcatggttaattatcatgggctctagagagggcaagagctgactgaaactggactaatctccacctatcgtctaatcacaactcattctgtcgccggccatgaatgcctcgtgattcgggatatatgcaaacggaggaagcatgcactgcacatcctgtatgctactggagtactattatcagcaggttacttttgtgcatctgaacgtggcaaaccgggcttcacgggagcaggcatcatcaagagccaaaacctcccactataattcttcttttcgactctattcttcaggcttttgtattaagcctgcagcaccctctcaatacttcaattacaataggatcggtgaccacagcttactaggttaggggacacaaatatataacttgtcccaagttaacatttgcattgtgcatctgcttttgtagcagtagtagtagccgtgctaatgcaattattgtggatggaacaattcatgtaacaatctcatgatttggatacccacggcggcaagcatgccggccgatcatcctagctactcgtaagtatcatttcagttgcatacagtacaatactccctccgacccaaaataagtgtagccatggttttctgcgtccaactttgaccattcgtcttatttgatttttttttttaaaaaaattaaaaacataagtaatgagtaaagtactattcatgttttatcatcttataacaacaaaaatgctaattataaaaaaatttcaaataagacggataatcaaagttggacgcggaaactcatggctgcacttattttgagacggagatagtagtattgtctgttcagttaggcttcgggaagtgtactaaaatattacaccaaaggttatcaaaagctggccttaaatacataataacttagcagcgcgttactactagagtactccagtatttaggaccctttaaatcacaggaataaaaaaaaatgaagaaataggaaaaacataagattttgacaagaatatagatgtaaaactgtagcgcccgttccgtcgtggcgcctagcgggaaaactatctcttaaaaaccctatttgcgaaatccgtttctttgcttgttgtctagtgtccgtgccatctcagatctcaaatccccgatctattgccgagttcaatcccgaatccaaatccttcccaattcaaatccctccgcaaaagtctatttcgcctccctcgggttcgatgggccgaatccctctcggcccatctccccctccctccctggctctctctctctctctccccgctctgccgtaagccgcgccgagccctccctcccgctctcacagccgcttcccgccgatgccgcccaaatcgccgcaccgcccgcgcgcgcgcgcgccgtggtggccgaccggccagtcgccgccgccgtcagcgcctgccgcgcctgccctgcgtctgccgcccgtgtcgccgctccactccaaaccgccccgccgtcatcgccgtcgtcatcgactcggccccgcctctccccgcgcgtccctccaagggacggaggctgagctccccccctctgccgcgtcgccctctctccctcccccttttccccaaagcggcaaggaggcaagccccctttctctcccccttttttttttctcttttccctcccgccggcgtcatctttccccccctcctgtcgccgttttggccgcgagcgccgagcgccagctcgctcccttgaccgcccaaggtcggtttccaaaccgacatcgccgccctataaacccaggcttcccccctttcctttcctctcccattcgcctccactccattgtcgccgcctcccgtgctctgttcgctgtcgccgttcgccgtcgcgcgtgtcggaggagccggcacgagcgaggacatggaagaggactccgggcgctcgccttcttcctcttccccggcccgaggccggagagatcactcctgtgccgtcggcctctcgtcacagcgccccgcctcatctcggtagtgcattcccccgttctccctcctcgatccatctcctccccttagttttcggtagtagcatgtgtagccttcccgtagctagctggcgccgccccgaccgttgccgccgctcgctgtgtgctcgccgccgtcgtcgcccgtgctccgtagcgcccgctcgtcgccggcctcgctcggcgtagctccgcccaatccgacgctagcaacggattcccgtagccgcgtagatgctctcaccgccgggaatcggcccctcatgacctcgtcgccgtttcccccttccctcgccgccggttgccgccgccgcaatccgcccccgtcgagctccctccggcgaatccgagccgttggctcatctcccctcgtcccatgcaaccccccggtgtgctcgctttcgcatgtatcgccgtggttcgctccaccaatcgccaccgccgtccgttgtccgttccggccggcgtcgtcgtctacctcccgccggcccgcgtggtagccacgtaggcgccacgtcggcgccacctcggccgcgaccgggtcaagcagaccccggtccgccgcttccctccgcccctcgcgcgcgcggtccaccgcgagccgtgaggctgcgcataggcccgccgcaccgcgtcctccgcgaaccgcgcgcatgcgccgcgcctccctccccaaaccctagcacgccccgcgtgcacctcgctcacggtgagctgagtcgccgacaagcgggtcccacccgggaccacgcgggttggacccggcccaccggctctctctctcccctccccgcccgcgcgcgcgcgttgggccgccttcttgggccggccggcccattaagctcgg

SEQ ID NO: 10077 - DNA, 103202 bp, Oryza sativa
  unsure (1)..(103202): unsure at all n locations
aaagccatgaatcccttttatgcatatctggatctggatcctgcagaacaaacatatcggatgagtagtatctgatataaatataatactcgagaaaaaatcaagtattttaaaatatttataaatatgtatttctcctcttatcaattgtgatttccccgagcagatgactctgtacatttaaacactctgtccgactagtcatagcccacaagcatcgggagtcggcctaggcatttcccaaacatgcatatgagtgatatgagttcgtcattaatggaacaaagtttcacggatcagaatttactactcgggtacttttgcaattattaagagcagaaaataaatttatctcgtctctatgcttttgatttattccgaataatacttagcaccttgcgttactcggtccatcgaacgagcccccgggtgctaggaatcggcccaaaggcaaccatccaatggcaaaccaaacggaaagcataggaagatagaactccataactcgataggtacttttgtactcagattatgtcgcaagcaatcaagataaatattataaaaaatatgatataacatctatagccctcgactcactactcaatggaagaccaattggtgtagtgaggcagaggaaaaggaaaaatatcatataaaaaataaaataaatgatgacttagctttgtaatattccccttggtgatggcagaagtgaccaatgtgggaacaaagtcgtccatcaataacaatgaagacaccagtcggcggcgacggaggcaggccggcggtgaagtcgtagacgcccaacagcggcggcataataggccagccgtgtaggcggaggcaccactcggcggcgacggaggcaggccggcggtgaagtcgtagacgcccaacagcggcggcataataggccagccgtgtaggcggaggcaccactcggcggcgacggaggcaagccggcggtgaagtcgtagacgcccaacagcggcggcataataggccagccgtgtaggcggaggcaccactcggcggcgacggaggcaagccggcggtgaagtcgtagacgcccaacagcggcggcataataggccagccgtgtaggcggaggcaccaatcggcggcgacggaggcaggccggcggtgaagtcgtagacgcccaacagcggcggcataataggccagccgtgcaggcgtaaacaccagtcggcggcggacgagacggccggtcggtgaagacgtagacgcccaacaacggtggtgtgaccaaccaaccatataggcgaagacaccagtcggcggcgacggaggcaggccggcggtgaagtcgtagacgcccaacagcggcggcataataggccagccgtgcaggcggaaacaccagtcggcggcggacgagacggccggtcggtgaagatgtagacgcccaacaacggtggtgtgaccaaccaaccatataggcgaagacaccactcggcggcgacggaggcaggccggcggtgaagtcgtagacgcccaacagcggcggcataataggccagccgtgtaggcggaggcaccaatcggcggcgacggaggcaggccggcggtgaagtcgtagacgcccaacagcggcggcataacaggccagccgtgtaggcggaggcaccaatcggcggcgacggaggcaggccggcggtgaagtcgtagacgcccaacagcggcggcataataggccagccgtgtaggcggaggcaccactcggcggcgacggaggcaggccggcggtgaagtcgtagacgcccaacagcggcggcataataggccagccgtgcaggcggaaacaccagtcggcggcggacgagacggccggtcggtgaagatgtagacgcccaacaacggtggtgtgaccaaccaaccatataggcgaagacaccagtcggcggcgacggaggcaggccggcggtgaagtcgtagacgcccaacaacggtggtgtgaccaaccaaccatataggcaaagacaccagtcggcggcgacggaggcaggccggcggtgaagtcgtagacgcccaacagcggcggcataataggccagccgtgtaggcggaggcaccaatcggcggcgacggaggcaggccggcggtgaagtcgtagacgcccaacagcggcggcataacaggccagccgtgtaggcggaggcaccaatcggcggcgacggaggcaggccggcggcgtgaagtcgtagacgcccaacagcggcggcataataggccagccgtgtaggcggaggcaccactcggcggcgacggaggcaggccggcggtgaagtcgtagacgcccaacagcggcggcataatagaccagccgtgtaggcggaggcaccaatcggcggcgacggaggcaagccagtggtgaagacgatgtcgctatcggcaacggcggcggcacacaccaaccgtggcagcgaggccgcaagcagtgaatgattgtttgatctcgactgccatccaatgcatgcgaacaaccatcgctccagcatacatgtagattaaatcgacgtatacacgtgcttgctcctggtggccgagtatattcctgtgtcctgtgccaatctagcagcacgtccatctgcatggaagggaagagaggagcactcggacacggcaagaggcacccgagtggccgagtaggcgacgatggcggccgtgtcgtgatctcaaccagcatgtgaaaaacaacaaaaattgccaggaaatcaaaacggccggcgattagggattaattaataatcaatctaataaaaattaaattggaacagccaacccaagttgtacggcgtggcttggatacgtcgtgcgcgtcgatcagcttgggtcgcaatgcctcgatcagcagtagccggcggaagccatcaacggccctgcgacctcggagagtcggcagcatgtagatgaccgaccggggcagctgtaaagcctaatgataacagctcggaggcgaccgactacggagacggtggagccggtcggcgctgacggatatagccggcagtagatacggccggcggtgtacatgcaagacagatagcaacaaaataattgctggttagaatcaactagtaaacagattaactctgtagatgtaatgtgcatgttggttggatcgtgcatgtatgttgatcagttgaatcaactcatgcagtgttttctcctggtaaactgtgcccagcgatggccaccacatgtccgccggcaaagcacgaagaaagtctcgatgcgtgagggcgtcgtcgacagcttcggcttgatctccgccgaccgacacaagatcgacacaggaaaatataccagaagattgatctatgatagaaaaaaaattaatctaataaaaaatagattggaacgacaaacccggtccaaagttcgagccatcgaattcggtgagattgatctcgccgtttcttctgaagtggattccatctcacttttcgacgggtaattcgacgcatcccctacctggcgcgccaactgtcgaaacatgaattcggcaataataaaagggggtagcggacgagacctaaagtggatggatgcagagacaaaggatttagacaggttcaggccctctcaatgagaggtaataccctactcctgtttggggatttgaatccgccgagtgtgtattgatctgacgatcaggttgtctcatgccccctagagggcctcctgcccaccttatataggatggggggcaggattacaagatagaaaccttaaccaatacggtatcggtttcctaaatctattttacaatattatcgaatcaggactttaggccgctccataatataaaaggaaacgtaatacccaagtcatgatcggttacatattccatagatatatgttatcccctattactagtcggataaccatgccgtgtgggtatggggtacccataatctccacagatatatttactagtaactttctgacaacaaagtccatggaaatgaacgtctatatatacttccatagattcaccgttcaattgagctcagtttggaagcacaaccttttgggactaatattgggcctttttcactaacaacagagaagcaaatcaggcccatatctgggcttgcaccgatcgtgggtgtgacggatcagagcgacccagtgatgggcctttttagtacccagggcccagtgttcgtctcaagaagagagctgaggcccatatttgagtttgagcttttagtaccacctcggagacgcagagctgaggcgcgcaaggcgctctgtatataagcaggcagggttgcacggagcaactcatacctttctcggccttttggctaagatcaagtgtagtatctgttcttatcagtttaatatctgatatatgggctatgtgcccacttcgatattaaatttattttttgtgggggagggtccactacagtggcttgccgctggggccctcacgcgtcgcccaggtgttgcactgctgcccgggcctggcgcaccccaaccaaaccaacgattaatttttaagtatgcagttgcgctgatagctagacggagtatcgatgcctgatgtgttcgtttgtgtgagatagggtgagaaaatacctcgttttccgcgcgcacgttttccaaactactatgcgtttttttaaaaattttctataggaaagttgctttaaaaaatcatattaatccatttttaaaatttaaaatagtttatactcaattaatcatgcgctaatggctcatctcgttttacatatcttctcaatcctctatatctcaaactcacccttagtgttcttgtatatagatgatatccaatttgatgttgatgtgtttaaagtttgatttcttcttggctaggctctgaattatgatcctctgcgccttttacattcacatcttcctgcaggaagagttgtcactgatgttcggtgtcgctaatttgctactacctccgtctcaaaataagtgcagccgtggatatccgtactcaacgtttgaccgttcgtcttatttgaaaaatttatgaaaaaaattaaaaatatataatcacacataaagcattatttatgttttatcatctaatagtaataaaaatactaatcataaaaaattttcaaataagacgaacggtcaaatgttgaacatgaatagtgcaaaactgcactaattttgggacggagggagtatgaaattggtgatccatgaatgttcggtgtcgctaatttgctatgaaattggtggtccatgaacacaaactctgcaagagttcggatagctctcgtcgtaaattcgctattatgaaattggtcacggacctgttgatctgtgaacaaaaactctgcaagagtgtcagaattcggatactatccaactctcatgattgatcagaatgtcagcgctcgctctacggttcagataccatcgatgacatcgtcagagttcagatacctgtccaaactatgaaaagtgtcgtcagactttagtgctctggagttcagataactctccaatttctgccgaaacactgtaaactcgacgtgatctgcacacacatttaacacttcaactccatgcgatctgcagggagagacatttaggttcggtactgcactgtatactaggaaattgcctcgcaaaataggaataaatacagtgccattcaaatttacatcctgaaacccagaatataaatggaatccatatttgcatttacaattccctccatgggaccttattgttcattacagaagggttttacatgtgtaacaacaaaatacaaatgcctactacacttactcaaataaacaatttcatactgaattctcagagcccttgtattttcttgttttttttttctccctgttgctctctgtttcccatcacaacagacaaatccgagtatttgtatctcgattataggtaagcacgttttggaacgggataaatcagaggcaggtgactcttctgctgcatgcataagaccgcctcatgcaaactcttcctcagtggagtgaattccaaccccaaatccttgagcctctggttcgagaacttgtacggcttcgccatcggcttcccgtcatcttcacacctgaaaaatccaagaaacacacgcatgaaaaatttgagatcgatcgattacatctcagaagactatttcagcaacgcacacaagcaaatcaatgtctaatagttgcgtactttgcagtggcagggtactgggggaagaggtccctgagcatccggaggagctcggcgcggtggagcacggtgccgatgcagaggtagcggccgcgtgcgtcggggcgctcgtagacgaggacgtgcgcgcgggcgacgtcgcggacgtcgacgtaggcggcgacggcgttggggtacgacttcttggtgcccatgaggtagcgggcgacgtggttgctgctgaagttgagcgtctgctgcagcatgggacccatcgtcatcgacggcaccaccaccgccagctccagccccctcttcgccgcctcctccgtcgccgtcatctctgccatcatcttggcgcagcagtacaggttctgcacgtacgacgagaaaattttgccgagatgatcaatttactgttcatgcaagcaacgcggttggagttggtagaaacgcagcagagtaatgtgcttacgtcggtttggcggcagaattcgtagtcgctccagcaggtctcgtcgaggacggcgtcggggctcctgctggggttcatgtgcacggcgccgtaggacgacgtgaacaccacgcgccgcacgcccatgtccgccgccgcgttgatcacgttcctcgtcccctccactgcaaccggaaccaggtcctgcagcacggagcagcgttagtaaaagttggaggaggttaaaggcgccattgtcgtctcttttgggctcaagaaccaggctagtgaacttacagggtcgttggacaccggggaggcgacatggaagacgccgtggcacccgctgaaggcggcgcggaggctggcggcgtcgaggacgtcggcacggcagagggagagcctctggtcggctccctccagctcaagcaggtgagcattcttgctgtcagctacagatacgcgcgtgcaagaaccgatcaataaatcaagcacaaaatgcagcaaattaatggtaacaccgtgaactactagttagtaacttaccaggatctctggctgttcccctgacgtggtagccacggatgaggagctccttcaccacccacgacccaatgaagccacctgctccggtcacacagaccagctgcttctcgccattgttgttgttggcctcaaaattggacgacatggtgagagacactgaccagttactgtcactagccaaatgctactctgaacttgtgagagaactttcactcgaactctgaatgttggttgtgtgagtctgccgtgtatggacatggccgctatttatacgcgagctgcgagcacctgcgccgccatgccacggagcacgaggaggacgacgacaagaggaagattgctagcgtagggtggtcatcgggtgaggggtgggggaggcgcaactgcgaccacgcgaaacggaatgccgtcgccttgtcgtccatttttgaggattcagcggcgcgcgcgcaaaaactgggcagcacaaggccgaattgccgatgggttgggcgtgcgcgtgggctcatctcacgggcgcgtacgagcagtagagtatattccattgcctttctggacgagaggatcacgaagccaactctggcacgtaaaccgtgcgaggttttcgctgaacctggcgaatcttctactgtactaggatgcaacttgtactaaacaattgcatctgctgctggaacgaccgacgattcgagtcagactggtacgatcgactaatgtctttttgaaaccttgacggaaatagtactatagtagtacgttcgagtgaatttgacgattttttacgctaagtcttatttagttcctaatttttttctttaaactttcaactttttcatcacatcaaaacttacctacacacaaactttcaacttttccatcacatcgtttcaattttaactaaacttttaattttagcgtgagctacacatgctaattatgattgtcttagagatacgagagaaaaccaatgaacaatggcaaattcggtatattgtggttacaagttccgcgattacaatttccaaaggtaagtaaaataccgacgtagtgcaaaatacgatactactaactgaaataggagaaaactggcacaaatcaacaacagtttatgacataattaatggaacgtgaaaatagcatataagaccgtaaaacaaacatatttatattaagatgctttgtttacttagaacacttagggcctgtttggcacagctccagctccaactccacccctcctggagctggagctcagccaaacagttttagctccaccaaaactaggagtggagttgggtggagctctctcacaaaatgtaatagagttgtggagctgggtttaggcagctccacaacttcactccagagttggagctgtgacaaacaggcccttaagctgaatccgccgtgctcaagtatcaaaactggagtacttaagtggactaaaccaaccgaagaattcagtcgggcgttgaaactaagatccggcgcgtgttggctgcacgactcgcggcttttgaaaccgaacggcacggcacggtcggagttaacagaacccacctggtatctgtttacgggaagccccatgtttgagactccaagggaggaggtgagcttggcaacgccaacctttttgacggctcgtgtcggctgctgcctgcttgcgtcacccggtgggcgagcgccagccgatcgggagcaactctaagagcaagtttaacagtatagcccactacaagctccaatttatctatagtcaatttaatagccaattcatataatagttgcttactatactattaatatatggtcccatctgtcatacacacaccgtctcttggagtctatgctgcagctacctacagatttgtagcccgctgcttttctctttcatcttttatatcattaaaatatgtttatagctagctaatagtctgctattgtacctgctctaatcccaacttcacccccaataccggctgaaccgacgggggcttatattcattctcttttcttttttttttaacttttaactcagatttacaaatttttaagttaagatttgaaaatttttaagttaaaaaatttaaaactttcaactcatatttaaaaactttcaagtgaaatcattaatatttaactcaaagacttaaaatttttaactaagatttaaaagctttcaactcagatttgaaaaaaaatccaagtgaaaatttgaaaacagtcaactcaggtttacaaactttcatctcaaaattcaaaacatttaactcaaatttaaaactttcaaccgaaattaaagatgaaagattcatttctttttttaaaaaaaaggtgaaagaaaaagtcccacgagggcgcagacccacgggtcacacaggtgtgtgcgccagcaagcgagttggcgtgtctccgccagttagtttttgtgttgtaccggtgcttgtattcacgctactcggttaagttatgcacttacgcgtacataagaaggaagtcgctgacacgtggttctcatttgttaacgagacaaccatggttaactggccacgtcaacaaaaaaatcattttcaaaaacaccgaagtagtttatttgtatcagtttttaaagatggaggagacgtgctatatcccgttctgtagccaagggagatattcattcaggatcaagaggacgagggagatcaaatagacttattcaaagagtgtggagtacataatacgtggggatttcattccagcccaattcgttgcaaacgtcctttgtacctatccggcccaactcaccaccgtcggctacggagacgacccggttctcctccgatgctactgctgccggagccggactcccaaaaccctcgccccatctccgcttggctttgagaccgctcatcgcggctgcagcagcgtcggcaggatccaccgccttgccgtcttcgatctacccggacgctcggcctccggcgacgactttaggcatgtccagcgccgtcacgggcctcgtccattaccatggtacgtcgtcgattcctcgtccactttgaccttctcactccctcccctttgccgctcgtccggctcaactaggccgcggtggcttccaatgttaggtagttgggaggaactgtgttgcagcctggcttgatgcagactaactgcttgctgtcttccgcatttcttgttgtttggagcataagtctcaaattattttcggtgatgatgtgatgaacaatccacaaacgtacatgccacctcttttggagcataagtaagcaagttatgggcttctaaactaatcatagtggtgttgaacttttgatggtcttccagccaattgatggatgttgagcaatcgtcgacaatggaattttgtgcttctataggtgtttgttttttttttttaaagaaacgcttccataggtgttgaggatgaagttttcacataaaaaaacaaactcaccgtagttaggcctgaccaactctaaaatttctcgggtctgctactattccagcccatgccattcaattgaaggcctaacactgaattttatccctgtttagcaccatcgtttaaatttgagaaccaattgattgctaattaaatggatcagagtttcataaactactctactcgaatatgtacacaataaatgtcatgcctacttcacctgcagtacaattgtactgcattttttcggagttactacctccgtttcacaatgtaagtcattctagcatttcccatatttatatgtaagtcattctagcatttcccatatttatattgatgttaatgaatatatatatatatatatatatatatatatatatatatatatatatatatatatatatatatgaatatgggaaatactagaatgacttacattgtaaaacggaggaagtagtcatcttgtcttattattgtaatctgtgatgccaatgccctcaatgcaaatttttagaagatgatatcgcatttataaaatctgaggcctctcagcttaatgttttattctaaaccaaagctggcgtgtgcaaaatggaacttgccgctaacttaagccttttatatccctagattcatgcagaggtgctagtgggaggagatagatattttacctgcttaatttacctgaagaactcaaggccaagatcaagacactgaaggatgctgacaaaaggtgttggttgaaagatttattggtttatcactatggccttgttaacagtgaaatttggtaagtccggagtagtcatcggtttagagtcagcatcggcttcgaagtcctgagattagccgatgagagttgtcaagtcatcagttgtcggattcttgctatattcggttaaggaaattgatctactaaataaaacttatccagaagagaccgagtttaaagagaatgcggcatgacaagttatctattaattaggaatagtttgttagtttccttttatctttaggaaattgtgtttagtgtctgacggagcgtggggctccttaccgggagaccgcgctggcccccctttgccggttcggccggggaccctgggtgagattctaagctctcaatctgtatgtggaaggttcgcgagacaggaagcacagaagacaccggcgatgtatacaggttcgggccgctgagaagcgtaataccctactcctgtgttttgggagatctgtgtatgaaagagctacaaagtatcagccagcctctcccttgttctgggttcctaatctggaaaggtccagtccaagaaaaagctctcttcctctctcagtgggcaaggtcctccttttatatcttaaggggataccacatgcaccatccccccttctcgctggggacttaccctaccttttcataaatggacggagatttgcatggttgccgtccgagtcaccttctgatgggacggcccacaactacctccactttcgccggaagcagacgcgtcgtggaattgtggccgcctgctgacgacatgaccggagtcagaccagtcacgtcggtcattcttgtccaccacgtgtcagcttagcaatcaaaatgttcgcccttcttcagacaacattttgcttgtaatggttaggatgaagcctggcatatatctggtcaggactaacgtgccatctctgggaggtaacacgctagctccagctggggacgagcgcctagaagccctcgtcctgacgggatggggcgaggcgtgcgtcagaccgcctgtcgccacctaacccgcgatctgaccggtctgtgactggtcacagaccggataaatgagtgcaatgcactacgttacatgcgtcgtgacacgctcagccaaaccgcaataaatgtggttaggtgagccccactgtgctcacctaccccatacacgcggagcgaaaacccacgaggggtcggggcgcctcggccctcggggccgaggggggtgcagcccgaccccctcggggggactaagaggagggcgaacacatcaccctcgggcccaacgtcccccgagggtgccaggccacgttggcgattatgtctgcctcaaacctctagtcatgatactcccgatcccatgtcaccgacagtagccctcggcgttatgccagggcgttcgccctccttaagggaagcggtcgggcgtgacgccactcctaaggcccggtgacaggtgggaccggtctccacaattgggcagaaacccaacggtcaaaaatcacgcacatcggcaatggtaactcggctgtcaataatgagcggtctcttcaagactgccacattactcgagtagcacacgaatctggacatggcgattcgtttcatctggagatatggtaacgtcgcttcggttggcgagcgtaattaacgcgcgcacgatatgatctacctcgactgccacaaccgcatatccacctcatgcgccgcaagcgggcgaatgggattagtggaagcgtgggcgcgagaaacgagggggcgaaatagtgggcgcgagaagcgaggagccgggcacagcgttggcaagggtataaaggcactgaggaagggatttgtttccttcctttcgccattattccccttgtcttcgccgcttgcgccctaactccttctttcctgcgccctaccctcgccacacgcgctcgctcttaatcttctcttcctccggcgtcatggcacggggctccgctctgctcgatggtagcgtgctgccgccttcccgcatcgtgagcgagaggcaggctgggctgccgcgccgcttcatgccggaatctgccaccggccgggagatagttacgctgggcgagggacgcccggcgccagactacccggggcggtccgtcttctttctcccctttgcaatggcagggctagttccgccattttcttctttcttcatggatgttctggagttctacgatctccagatggcgcacctcacccccaacgcggtgatgacattggccatcttcgcgcatctgtgcgagatgtttattggggtgcgcccatctcttcggctgttccggtggttcttcactgtgcagtcggtgtcgccgccatcggtagttggtggctgctacttccagccacgggggccggtgctgaaccgctacatcccctgcgccctccgcaagaagtgggacgactggaagagcgactggttctacactcccctcgccgacgaagcgcgcctcctacttccgagccagcccccggtgcaggcctccagctggcgggcgccggtagatctgggggatggctatgacgccgtcctcgaccgcctggcgggcctgcgatcccaggggctcacaggggccatggtgtatggcgactacctccgtcgtcggattgcgccgctccagcggcgcgctcggggcgcctgggagtacaccgggtccgaagacttcatgaggacccaccagggagtgtgatgggactgggctcctgaggacttcaagatattggtccaacgggtgctgaatctcaactccgtggaggcggccctcattccccaaggaatcctccccctctgcagcgatccagaccgcgcctccatcctgaccattatgatggcggtcggggcctcagaggagcgagctccaaagggccacgacggcgcaggcgggagccgccggggggaacaatctaccccgagagggggtcgtgcttctgggtcccgcgacaggggtccggggagcagccgccctgccaacacccgggggaagaggaagcagggaggaacacctcccccatctcctccccgagggggcggggcggcgcgtgccagcagcaggcgcccggagggggccgcgccaacatcgcagcccgagggggagcgcatgaagaagcggccccgcaagatgggggagacggaaccatctcggggaaacctcatttcccctccaaagtggtcgtttaaccgaccccctcgcaggttcgtctctcacccatcgtggctgtattcattctctcaacgcgagtttttactcacccatcttgttcgtcttctggtcttttcttttgttttagcgagatcccgtcgcgtccctcccgccattccaagtccggccagtctgaggccgaggatccggcggccgcagaggcccggaggcgggaatctgaccggcgagaggccgcagatcgcctacgggaagccgaggaggccgcccaggaggccgcccgggctcgccaggccgaggaaactgcttgggagggagccgcccgggcccgccaggccgaggaagctgctcgggaggaggccgcccgagcccaccaggccgaggaagccgctcgggaggaggctgtccgagcccacaaggccaaggaagccgctcgggaggaagccggatttcgccaggacgaggcgatggcgacttccgaggcagctcgcgacgaggccgcgggcgcgtcgctcgggcccactccctcgggcgacgctcaggcgacaacttccggggcagctggcgacgaggctgcgggcgtgtcgcttgggcccactccctcgggcgacgctcaggcgacaacttccggggcagctggcgacgaggctgcgggcgcgtcgcttgggcccactccctcgggcgacgctcaggaccaaacgggtccgggagacatccccgagtccggcacttccatcggcggcccgagccgcgtggcatcctttccaaggcggctcttccccacgccttctatcgccccactgaacacagagccccttctgcaggctttgaccgccgcaaacaccacgatgttggatgggttaagtgcctaggtggaggccctgcaggcagagcgggcggagctcgacgccgcgtgggcgcgtgtcgaagaggggcgacgctcggtggaggccatggtggaggtgggccgtaaggctcaccgccggcatgtctcggagcttgaaacccgtaagaaggtgctggcggagatcgccaaggaagtggaggaggagcggggggctgccctcattgccaccaccgtgatgaacgaggcgcaggacaccctccgccttcaatacgggagctgggaagtggagctagggaagaagctcgacgccgcccagggggtgcttgacgctgccgctgcccgagaacagcgggcggcagagaccgaagcggcgtcatggcggcgcgaagaggcccttgaggcgcgcgccatggcgctggaagagcacgcctgcgtcgtggagagggatctggcggaccgcgaggccgctgtcaccatccgggaagcaacgctggcggcgcacgaggctgcctgcgccgaagaagagatcgcgctccgcctccgcgaggacgcgctcaccgagcgggagcgagctctcgagggggccgaggccgcggcgcaacagctggcggacagcctgtccctccgcgaggcagcgcaggaggagcaggcgcgccgcaatctggaaggtgcccgcgccgagagggccgcactgaaccaacgggccgctgagctcgaggcgcgggcgaaggagctggacgcgagggcgcgcagcggcggggcggccgcgggcgaaagcgacttagccgcccgcctcgcagatgccgaacacaccatcgccgatctgcagggcgcgctggactcgtccgccggggaggtcgaagccctccgcttggcaggcgaggtcgggcccggcatgctttgggacgccgtctcccgcctagatcgcgccggtcggcaagtgggcctctggagagggcggaccgtaaagtacgccgacaaccagggaggcctcgcccagcacctctcgaagatggccggggctctccaacggctccccgaggagctcgagaagacaattaagtcatcctcgagggacctcgcccaaggagcggtggagctcgtcctggcgagttaccaggccagggaccccaatttctctccatggatggcgctggatgagttccctcctgggaccgaggaccgcgcgcgcgcgcaagtccgggatgccgccgactatatcgtcgacagcttcgagggctcggcccctcggcttgcgtttgcccccaactccgacgaggagggcaatgccggaggtgcagacgacaatgacgtcgaggccggctatccgggcgcatcggattgagcccccagacccccgccatccttctgttttttcttcttttctttcttctaaggccttcgggctttgtatagatcaacttaatctgtaatcaaaaatgaagaaatttttgtgttaatttcatcttgctgtaagtatgagatgaggatgatctgtgccgtggtccttttgtgtcttagcttgaataagggctcgtgcccaggttctggtcctcaaaaggcgcgggtcggggctagtgcctggggagatccacatgtcgagactggccaggccgggaacgtggtgaccgagggttatgggtgacccgattgtgggtttttgccgattcccccccggagttcaccacgccccggggcacggctcggttctgggccccgtttggcgattttagccgacccgagcccccgagggcaggattgagcgcgagtgacctatttcaagtcaagattcttcaaaaggaaaaaacagcacagatacaacctttaggaaattgaaactgcttttattgaaattctgaaataagagaaataagaaagtgcatgtgtggcagcccccggccaaccctgctcgcccgagggggtgcggggttggcccgagcccgaaacctgacacccgaccccccctcaggggtagaagcgacgaaggtgttcgatgttccacgggttaggcagctcagtgccgtcgcccgtggccagccgtatggagcccggccgggggacgccgaccactcgatacggaccctcccacattggtgagagcttgctcaatccagcacgcgtttggacgcggcgtaggacgaggtcgtcgacgcagagtgatcgggcccggacgtgacactgatggtagcgccgcaggctctgctggtagcgcgcggctcggagggccgcgcgccgccttcgctcttccaagtagtcgaggtcatctctgcgaagctgatcttgatcagcctcgcagtacatggtggcccgaggagacttcagggtgagctcagatgggagaaccacttccgcgccgtagacgaggaagaaaggtgtttccccggttgctcggcttggtgtagttcggtttgcccagagcaccgctggcaactcctcgatccatgaatcgccgtgcttcttgagtatgttaaaggtcttggttttaagacctttgaggatttccgcattggcgcgctccacttggccattgcttctggggtgggcaggtgaggcgaagcagagcttgatgcccatgtcttcgcagtagtcgccgaagagttcactagtgaattgggtgccattatccgtaataatacggttaggcactccaaaccgggccgtgatgcccttaatgaatttaagtgcggagtgcttatcgatcttgacgaccggataagcctcgggccacttagtgaacttatcgatcgcgacatacagatactcaaacccgcccggggcccgcctaaacggtcccaggatatcgagtccccagacagcaaatggccacgaaagtggtatggtctgcagggcctgggccggctgatggatttgcttggcgtggaattgacacgctctacatcggcggaccaggtcgaccgcatcattgagagctgtcggccaatagaaaccttggcgaaaagctttaccaaccaaggtgcgcgaggcggagtgggccccgcattcgccttcatggatatcggcaagaagcacaacgccttgttcccgaggaatgcacttcaggaggattccattagccgcgcgccgatagagggtcccttctaccagcacgtagcgtttggagatgcgatggacgcgttcactcccctcgcggtcctcgggtagagtcttatttctgaggtatgcttggatctcggcgatccaagcaatcaatctaagggagctgggagcactcccctcgggtcccgaggcctggactccgacgggcctcgggggccggtcaggcgcatccgtctcccctaaggggtcgggtcgcgccgacggctgggtaagcctttcttcaaaggcgcccggtggggtctgggctcgcgaggatgcgagccgtgagagttcgtcggccatgacgttatcccgtctgggcacgtgccgaagctcaatcccgtcaaaatggcgctccatacgccgtacttggcgcacgtaggcgtccatttgcgggtcagagcaccggtactccttaccgacttggttaacgaccagctgggagtcgcctaacaccaggaggcggcggatccccagtccagctgccactctgagtccggcaaggagtccctcgtactctgccatattattggtcgctcgaaagtcgaggcgaaccaagtatctgaggacgtctccactcggagaggtcaacgtgacccctgcaccggcgcccagaatgaccgacgtgactggtctgactccggtcatgtcgtcagcaggcggccacaattccacgacgcgtctgctcctggcgaaagtggaggtagttgtgggccgtcccatcagaaggtgactcggacggcaaccatgcaaatctccgtccatttatgaaaaggtagggtaagtccccagtgagaaggggggatggtgcatgtggtatccccttaagatataaaaggaggaccttgcccactgagagagggggagagctttttcttggactggacctttccagattaggaacccagaacaagggagaggctggctgatactttgtagctctttcatacacagatctcccaaaacacaggagtagggtattacgcttctcagcggcattccgttcggctcgggggcctcttctccctgctctctcctgggtcgaatcggcacagggttagcctcggggtcagagggcgataggtgcggccttcccgcagtggcctcggggctgtcctgggagtcgggggcacctgacaccgtctgacaagcggggagagggcctgctccggtcgtcgggggccttaggccaccgtccggctcgggggcctcttctccctgctctctcccgggccaagtctgcacaaggtgggggtgcgcggaatgaggattgtcctcatcgcgctccacgaccaacgccgcactaaccacttgcggggtcgccgctaagtagagtagcaagggttcatttggctccggggcgaccagaactggggggagagctgagatacgccttcaactgagtgagggcacgttcagcttcctccgtccaagtaaacggcccggagcgtttgaggagcttaaataagggtagcgccttctctcccagcctcgatatgaaccgacttagggcggccatacaaccggtgacgcattgcacatccctaagcttgctgggggggcgcatccgctctatagctcgtatcttctcggggttggcctcgatgcctcgggcagagaccaagaacccgagaagcttgcccgcaggtacaccgaacacgcacttatctgggttcagttttatgcgggcggagcggaggctctcaaaagtttccgctagatctgaaagtaacgtttcctggttgcgcgtctttacaaccaagtcatcgacataagcctcaacattacgtcctaattggctacccaaagaaattcgagtagtacgttgaaaagtaggacctgaattctttaacccgaagggcatcgtcgtataacaataagttcctatgggggtaatgaacgcagttttttcctcatcctccctagccatgcgaatctgatggtaaccagagtatgcatctagaaaacacaaaaggtcgcaccccgctgtggagtcgacaatctgatctatgcgaggcagggggtaaggatccttaggacatgccttgttaaggtcggtgtagtcgatgcacatccgaagcttgccgttcgccttgggaacgaccaccgggttcgccagccactccggatggatgacctcgcggatgaatccggcctccagaagtcgcgccacctcctcgcggatgaaggcttgacgttccggggcctggcgccgcactttctgccggaccggccttgcgcccggccgtacggcgagacggtgctcaatcacctccctggggaccccgggcatatccgccggtctccatgtgaagacgtcagcgtttgcccgcaggaaagagacgagcgcgccttcctatttgccgtccagaagaccaccaatccgtgtggtcttggacgggccgtcgcccagggcaacctccttgaccgggacctcatcgcacgtgactatccgctgcctcggggcggcgggggcggatgtgccaagcctctcgtcgccaccctcgggcttggacacgacggcgaggcggtccgcgcgctgctccatacaagcgagcgcgactttgaggtcgccatggacagagatggggccatcggggcccggcatcttcatctggaggtaggcgtagtggaccgccgccatgaacttcaccaacgcgggcctctccaggaccgcgttgtagggcagactgaggtccgccacatcgaagttcacccgctccgtgcggaaattggcgggtccaccgaaggtgaccgggaggtcgatatgacctagcggccaagtgtgccccggcgtcactccaatgatcggctgggacggccggagcatcatccccggggccttgatggcgtcaaaggctgcgggggaaaggatgttgagggctgctcctccatcaatgaggacacgccccagcttcacgttgcaaacagtgggggaaaccaccattgcgatctgtcctccccgggcaacgcacggtgggtggtcggtctggtcgaaggtgagggcaacctccgaccaccgcgcccggcgcgtcgcctcatgagtcggggccgcggccagaagctctcgcttcatggccttgaggctccggcgagaaacgtgagcacacgctcccccatcgacagtggcaatggtggccccaggctcttggaaacctaggtcatcatcgccgtcatcgatgtcctcagcgggggccttctgcttggcctcacttcgccgattgccggaaggaaccgccggggacttgccctctcggcgctcctgcctcctctcctcctcccacttcctcgtccgctcagccaaacttttgactgcacggcagtccgcgaggtcgtgaagggaagtgttgtggacggtgcaccacttgccggttgggcgctccctgctgggagcgccggcctccttctttttgtctcccgcaggcctcccctttcgggtggcccgcggagcgccctcgacggcgaggacatgaccctcgtcgtctgaatggactgacctcttcttcctcctcctgtcacgccgccctgtctgagcggcggatccgggggcggccgaagctgccacaccggaaccggaagggttccaagtccaggcctcctccttgcgagccactcggtccgcgagctgaaaaaactccgcggtagtctggggctccttggaggcgatcttttcgagcatgcggttgtgccgcacgccccccctgaacgcgtagattaccgcgtgtgcagggatgcatggtatggtgttgcggacttgacagaaccgctgaatgtacgagcgaagtgactcatcatcccttcgctgtactgcgtgtaagtccgcttcttcacctgggcgcggatatgagccctgaaagttcatggtgaactgttggcacaaatcctcccaggagtggactgacgcgggtggcaagttcattagccaaccccgcgcctgccccttcagggccatgggaaagaaattcgccatgaccctgtcgtcacccccggcggcctcaatcccggtcgtgtagacctggagaaactcggcggggttgacgctgccatcatatttttcggcgatggtgggccggaaccttgggggccaacggacattccgaagactcgccacaaaggctctacagccgacaccaccaaccgggggcacggagggctggtccccgcgtccgtgttgaggtgacactctagacgaggaagcgccctccgttgcgtgggcagcacgtcggtcattacgccggcgctcgatgctggcgcgggcgtccggccccccacgcagatcttcccgggtcgaaggagtcgacgaaggagtggcggccgaatggcgaacagcggctgccgctcgtcgtgccctccgtcttgacgacgcggagccggtggtagcagcaccagaggccttggtggcggaggaccgcccaccagtatctaggcgctgccgtgcagtcatgaccaatttggccacatcgtccagccaacgttgggctggagactccgggtcatgggcgacaggcgggtgacacaggagcgcacccgcagcttggagcgcgccctggggcgtgctgccgtcgccgtagacgaggaggcgacggtccccatctcgccgcccctttccacctcctgtggatgtcgaagtcgcggatccttcggccctctcgagcgcctccccctgcttaggactttggcgtggagggggcggtggagtacgagctcgacggcgtgggttcggctccccgtcgtcgccactcacactcggagagaggtcgtgcgcctttgcttgctcagccataaggctaaacaggaaaagcttggtgcacacgaaagagtgcaagagctcagaagatcactcgcagagtcccctacctggcgcgccagatgacggagcgtggggctcctcaccgggagaccgcgctggccctcctttgccggttcggccggggaccctgggtgagattctaagctctcaatctgtatgtggaaggttcgcgagacaggaagcacagaagacaccggcgatgtatacaggttcgggccgctgagaagcgtaataccctactcctgtgttttgggagatctgtgtatgaaagagctacaaagtatcagccagcctctcccttgttctgggttcctaatctggaaaggtccagtccaagaaaaagctctcttcctctctcagtgggcaaggtcctccttttatatcttaaggggataccacatgcaccatccccccttctcattggggacttaccctaccttttcataaatggacggagatttgcatggttgccgtccgagtcaccttctgatgggacggcccacaactacctccactttcgccgggagcagacgcgtcgtggaattgtggccgcctgctgacgacatgaccggagtcagaccagtcacgtcggtcattcttgtccaccacgtgtcagcttagcaatcaaaatgttcgcccttcttcagacaacattttgcttgtaatggttaggatgaagcctggcatatatctggtcaggactaacgtgccatctctgggaggtaacacgctagctccagctggggacgagcgcctagaagccctcgtcctgacgggatggggcgaggcgtgcgtcagaccgcctgtcgccacctaacccgcgatctgaccggtctgtgactggtcacagaccggataaatgagtgcaatgcactacgttacatgcgtcgtgacacgctcagccaaaccgcaataaatgtggttaggtgagccccactgtgctcacctaccccatacacgcggagcgaaaacccacgaggggtcggggcgcctcggccctcggggccgaggggggtgcagcccgaccccctcggggggactaagaggagggcgaacacatcaccctcgggcccgacgtcccccgagggtgccaggccacgtgggcgattgtatctgcctcaaacctctagtcatgatactcccgatcccatgtcaccgacagtgtcctataaggactttatcttttccttttatctttaggaaagtttctttcttgtccgacaaggacttgtatcaacccataggtataaatatgtacacccagggtctatgtaatctatcttcacgatcaatacaattcggcgcatcgccaccttttaccttttctactttattttatcgtccgacgggacttggcacctgacgtagggctgcatcggtgttcgatctccggcgaaggggtaagtccaatgttccgtcggcccaggcaattgtatcgtttacgtcggtgtcgttcaaggctgcatcagtgcattcgacctcttggattgctctggtttggatgatatatttgcctacctatttatcatatgtttatgttaatctagtcttagcatatcaatttagctctatcggctgcttctcgttttagggtttctgccggtatcggctaaatcgtgttgctaggttagattagcttagatatctaccaccctgaaaactcagtcaacggcttgattgtctagatattatgtttcttttcatacttagtgctgcatcagttgagtttgatctactaagtcgtgcttagaaccataatccctagcctgcttcttgattgccaataagggtttcatcggggtttcagccggtgagttatctggacgttgcatcggcttataaggatagcgtatacatataagttggatttagccgatgacaacaaaggtttcactgttcaatctaatcttgtggatttcatgacatcggacctccagctgatgtgtgctttaaccttcggatcgatgcttatttatcatataattatttgccgattggtttatattggattatattgttattttattacaccatcatcagccgattgcctttatatcattggacatatagccgattgctaaaaccctatcgctatcggctggtatcggcatcggctgagattgctccatcagcttgtcagccaatcggctattttgatatactatttgcatatcttatcagttgcaggatcaaactgactggcacgcccgcatctcaacaacctttggacctgcactggagctaagcagatctcccaggccggtgtgttcgattttttcgtcaacaggcccatgatgggaggcttgaattaggcatctgtcaaggaagttcattgcacacctctccaatttaaaggtacgtaaagaaatatttgtggaatatacgtgtgtgttttatgtttaatgcgccatgaatgcacaacttaccttcttatttagtcatatttaacttgactatctcattaaatatgtttattctagtggctgataaatctgaaatacatagagatggttttcaaatcccttatgttcttatttaaatgtatctattctagccttctacaaatggtcaggatttgtctttataccatgtctctttcaccttttttcttcaagaaagaatgtacatgtgccatttaacgttacacagttacatatcgtttgttggaatcacacaaggatcgttggaacacacacgaacgcgagagcaagtggcagagcttgaaatgcttgacaatggcaacaaatgccgccttttttgtatttaactcggtggccaacaatacgatgaacatgtgcttttataggcccagcgcgacgcacaacggagcacgaactccatccccgacctttgctcgcactacccgcacgacccggctccatgcgacgaacgcgttaacaacaaacacacacacacgacgcacgcgcggactgacctgacacacaaggtcaggtttatttcctaacatcgttggtctatatcattttgtgatttcctgcaatcttattacatcccacatgaatttctacatggttctttcattgcaatttattatgcatgggagctatattaattgtccaagaaagatttacatgttaagatttcatttgcaaactctttgtcctttctgcaatggccataaatttgctttttcatgttcatagaaaaagaagtcatatctgtgttgattgatttataaaacataattcaaaacagcgtgatctacatgctaaatgtatagttacggccttcttccaaatacaagacattttgttgctcgagttggtaatttgcattctgttgttccctgccgagcaagctctcaatctcctctgcattgtcttcagcttcagcccatgggtgctgctggtatctccttaacatctccagcctctcagcaacctctttcatcgttggccgttcttctccattcatgcttatgcatcgcatcaggaggtatgtgatctcttctagcatttcagcgctcatctcattccttacttggctatctagtagctcttgatggcgaccaactttcattgctgtggtgaagcatgacaccaggctcctgttttcctctggcccgtccaagtacaatgctttcttccttgtcagaagctctagcatgacgacaccaaaactgtaaacatcgctcttatcagtcaactggcatgtcataaggtattcggggtccaagtacccgcaagttccctgcaccaacgttgcaatctcggcctcatcagttggtgctagctttgatgccccaaaatcagaaactttggcgttaaacttgtcatcaagcaagatgtttgccgtcttgacatctccatggaggattgggggtgaagccgatgagtgcatgtaggagagtgcctcggctgactctgccgctatccgaagacgagtatcaagtggtatgtcagctttgggttccttgccatggatgtagtggtagagggtgccatttgagacgaattcatagaccaacatgggcacttcaacttcgaggcagcaaccaagcagcttgacgacattccgatggttgatttgggagaggatgaacatttctctcgcaaactccttggtctcggcctcctccatcatcttcgacttcttgatggccactactgtcttgtcttcgaggacgcccttatagacaacaccgtgaccaccacgacccagaacacggtcagaggcgaagttgtgggtcgccctcttgagttcttctgtcgagaatatcctgaacccatgggtgcctccgccggagtgcatctgctgccggaggatcactccaccgttatgctcgaagaacttctgcttcgttctgatgagcttcctcttctggagccccaagtagagccagaagcacatgaacactgacaagaagacaccgacgctaacccctgaacacgacgccattgtatacccaatattactccgttagatttccatttttgagactgaatgtaatttttcatgatggacgacagttataattttttttacctgtaactactttaagagctaaagggaagttgtcctttgggcggcaaccgttcctgtcggtccaatttccactagtcccaggagggcacacgcaagtgtgacttcctaacatgtttgtgcagtctccgtagcatccgtacttttccggacgtaagcactcgttgatatcttccattcacaaagcaattaatttcgtcatatttgatcatcagccaaattaatctatggaaattaattgacagagttaattaagatgactgctacctgtgcatccaccgtcgaggtaggggttgccctcgtagccctggcagcagttgcaccggtagccctggccgtcgatggtgtcgaagcactcactgttcgtgctccggcacgcgtagtccgtcgcgttgcgcttggcggcgctgcagttgtagacgttccggattgcccagtcgagcacgacgggcacggcctcgaagtcgctccggttgaaatccttcgtgtcgttgtacacggtgttgatccaggtgtgctccaccaggaacacgtacctgcacggcgtcgtgccgccgcggagctcgttgtccaccgccgccgtcccgttctcgaagttgaacatccgcggcacgtagaagttgagggtaggtggtatgatgctctggcagcaccgctcgccggtgcaccgccccggcaaccgcggcactgtatcattgcccagcgacgggcggcggcacgcggacatgcagccgctgacgtagttgccggagccgtcgacgatgtagccgaggttggggcagccgagcgcgacgaggcggttcttctccggcgagtagcggtaggtggtgctgccgttgatggacgtgtacgaggaggtggggacgtcggaggacctctcttctggaggagggtagcacttgctttccggtttgaggaggacccgggcctcgccatcggccagggacaggctgacgagctgcgggtgttgctcgaactgaagcgtgagtaggcgcggtggcgacgcgctgtcgtcgcagttgagctggaagccttcatcgcgggcgcagcgggcgccgatgccgaaggggtagggaacgttgatgtttccgcacttgtcgcggcagcctgtcagctgctgagccgacgctgctggtgtcaccggcgaaaggcgacagatgagcaagactgctgctaatgcaatcgcctgcaggtgcagggtattggtagccatttctgaaatggcttgcttaatgtccggatgctacaattttataagagttaattacattagcggtcattaaacttgcaacgaagtttcacttagatccacgaacttgcaaaacacgtatcgagattcttaaacttggtttaatgtatcatcccggtccaaagcctagtttaaccgtggtcttctctatgtgacatgccacgtggacgatgacatagctaaattttttcccttttttttcttcccatcttttttctccttcctcacctcgtgtggagaaaaatactgcggaagggagaggaaggaggcaaagtggagaaaaaaaagataagaagggggaaaaaagagggaagaaggaagaaaaaataaaaaaaattcatgtcatcgttcacgcagcatgtgtcacaccccaatccggcaccgccgtacaacggcacctgataggagcgtgtcgtaggaataacggcgcgaaccgcttcctacgaaaccgcgatctcgttaccagtcccaggacatagtgctggtacccacggtgacaaatatgaatcattgcaaatccttaaaataaatagaggacttatttaccttaacttaggttgcagcttagaacagcccgagaatgcaaccgacgtcacggacgaggaaacaccaacaacagcagcagcagcggaaccaagagcagcccgagaatgcaaccgacgtcacggatgaggaaacaccaacagcagcagcagtggaaccaacggactaacacccaacgccacaggcgacggctgggaaccaggacgaaaccctaatcttcacttcacttcatcttcacttcacgacggaggaactatatatacatatatagagcaagggtgagtactttcgtactcaacaagccacgggaatttaggtgtttaatgcaagcttggaagagaggcaaggttgttttgcaaatcttttatttgaaatccattttgaaaccactaagtgatttatttcttttcaggtttgggtcgaaaagagacttgcgtctcgattcaactttaagagatgtttttcaacaactcaattgataatgaccgacctcccgggtcagatcattacttctcggctcccagagccatttcacttgattaagcggctcccagagccttattcattttctcggactcccagagtccagctgcccagcagcacaacattccgcttccactcgggaagcctagtctatgatgcccgtagacatcccgaatcacacagattcgtttctgaccactcaggccatccatctgccacataggctgattctggttacgattcctatcccacaacaacttttcacaaagcacaggcaaacaaatctacgcaacgggaaccacctcacatccgcccatgaccgtgggcacggctgttcgaacagttagttaacctctgcagaggggtacactttacccacaagatacgaacttattccgaacacccgtcggtatcggaggttcgcaacaaagcctttcccaagccgacccagggatacctcatgccacatagaaggatcaaatcctcacataaatataggccattttagttttcacaaatcaaactccaaccacctcgatcggtaattcagcaagcttctctttcttgcttaccaggaacccggtttggctccaatcgaccccgccccggcgttcccaactattggcatgcgaggtttccctgaaccgactagttacttagccagggtgtcccattccaccttgtggttgcactttgttatgcttgatgagtttcccacaggaattggtccttatatgcaaatacgagacagtgccacataggcacggcacccgcatcgcgaattttcacaattcattttattttcaaacacaccgacaccacatgtcgggttttcaaggcttctcaaacccatttcccaaattttcgacaatcgacggtgtatgtggaatatttggtatacgcactcagagagcacgaataccgaagtaccacaaggatggagcgacaaggaatcagggtagtacaacctacaggaattagtgcgactactgggtaggtccgtcggtttgtcacgcaaaccgaggccaagcatgttatatgtgtgtgactctaaaaatgcaagttgcaaacaaaataataatgattttccaattataggagaaattgatcaaagggtgactttccttgctcaaggtcttcacgaagcttcacgaatctacgagaaatccctgatcgacgaaaatccggtaaccgcggctatacgcaaacaatcaaaacctaaacgaaagaccaaaagaaagaccctatttagactaattaatagtgccattaaatatatctcaattttacggcagtaccggaagttgaacggagtcaatcggagctacggattgagagatatgaattttggaagctcgaatgggattttccagactaggaaatgatttatcagaattttctggaatgtaaggaatggtttatggaatttatagaaataatattctcaagaatattattgacattcactgatgtgtgggaccaaaggaattgatttatggaatttcggaataataaggaattgatttatggaaaaggaaatggacgagggatgtatattagactttttcgggcggcaagggcgcagcccgagtgttgaaggaggctcggccgagccatttgggccggcgtgggcgcggggaaggcggcccattagggcgcgcggaagagagagggagcggtccggtggaccgagtgcacctcgcgggtcccaggtggggcccgcttgtcggtgacacggcccacggtgggatgggcgcacgtgagggcggcgctagggttcggtggggatggcgcacgggcggtgcgccggatggaccgagacgcgtcgggcccacgcgcagcctcacggctcgcggtggaccgcgcgcgcgagcgggagacggagggagcggcttaccggggtcagcttgacccggtccggccgagctggcgccgacgtggcgccttcgtggcagccacgcgggccggcgggaggaggaagaaggggaggccgagatggacggcggacggcggcgcggcgagatacttgttgttttgtgtaccctggctggtcctggacagggatttaatacacaaaatagtctggaaatttgggctaaatttctgggcgtgacaaagtggtatcagagccaactcgactgtaggttgagccaaatggtcaaaccctaaggacaagttttctgaaaaccctatttgcaaattgtctcctctcgcccttcggcaattctttgtcaaacagtttttcaaaattctcctcccagtctctccaattcttttagttgtcaaacctagaggaccagctgtcagcttcatgtctgttcggaagtcaagtcaattcgagcctcaagcttcgtgcaaggagcgagaagatcagttcagagtcgtcgttctgcgaagatcaagtgatgttttctcggagatgacctaaacccaatctttcccagaagagtagttccgttagctttctagatcgtgtgttgtttgcttgtgtgtaggggtatggtttgcatcattggtggggatgcgaccatactaggttgtttgcttaagcaacttgaagaataaaagtctactcacgacagatcagtaggcaagtggtttagtaccttatctttagcaacccctctcttcctcctctcttccgccctggcagaagatagtcagtgttagagagaagagcaacgacggtgtattaaagtcaccaatcaatggttcagttgaaagctacaaggtatcccagtgccagaagaaccctgctcgtgatcaacatttggtgtccaagattagatgatggatgtattgatgcgggagatgcaaagtccgatgcaacagatgcaacaacagtgtctccaacaacaagtacaagctcagatgcaagccggaatcaggatcagagcgatagtcagtttgttttcaaagaggaagcacccgcaacctcagatagtacgccaccaagtcctcagcaaatcagcacagctaagccaccaccaatcccaggagtaatatatgctacctattgtggttatggttttcaagcgcagtttttgcaaagtgtccatggaagatgtatgacagggcacatcttagagggttgttccccggtaagacgtcagcgtcatcacatccctaactcctcaagttgtgtcagttccaatgcagagtcgatcagttcagttttgaggaatcaactatgcaactcgacaccgaagtcaagctagaagcaggacagtcatgccagtagttagaacttatgggaaagttagtcaagagtcaatgtgtccctgagctaaatgagagtcacttttatgtggaatctcccatcagcaactgaggattaagttccaaatcttgctgggatgaaagtgcgccgtcattactctattttgatgaatcggtgaagtttcagttttcaaagtgagggcctttgtaagcaagagaagtgttggttatttttcaaggacaatagtccaattgttcctagtcaggagaaagtaagactactccctgtaagggggtaggtctcggagatgagttttggctcacttcgtcgctgttttagttgaaggttcaacccagtgcaacaatccgggtagtacttgaagaagccagttgcaaggtgtcagcagagtcaccccaatctcaggtcgacaggttcgattctaaggtacacctgtgaagcatgtcaacagtttagcttagaaaagcaacagcgaggacagttgtagtacagacgaaaggcaggtcaagcaggttttcctggaattacttgtcatttgaattgggaccagtcgaagcggacatagggtaaatgatttacaaatgccagattcaattttcatcctcttatagccagcgtggtgaattctaccaaaattgccaacctcaacagttcagtccaagataagtaagtttcaggagcatccgcagtcctagtctgggtcagttcaagcagaaccagtcggtccagttttggcaaagcaaaggaacagaaaggtcgaatccagccagttcaatcgtgcaggtttgatcaaccagtcaatcaatcagttcgaagcaggatgtggcagttcaatgtgcagatcagtcagaccgccgaccagcaccagctttctttctagccatcccagaatctcgggacgagattcctgtaaggggggtagatttgtaacgccccgattttcgttcgggattaaaaatcattaaataatgcattttctagaaattaaataaaagttaaatcaatttatccaagtgaaataatgggagaattaaaattttcccttaaaaatcattggccgggaatattttgcaatattctttgtgccctaaaatactctccggaattttccgtgaattttcggagctcgagaaatagttttaaagtcacaaagatcatttaaccaattaaataaaaagaaaacaaatttaattctcctttcttccccttcctccctttcgggctcggcccaaattcctccccctccttccttctctcctcgggccgccggcccagcgcgcctcccctccccaagtctgctttgcgtccctgcgcgcctcctccctcccctcaggccgacaagtggggccgtgggacccgcttgtcagacccttcctctacctccagcctccctcatccaaaccgctgtgccgccattgccgcccacgtcgcccacgattccggcctcttccgctcgcgccctcgcgcccaaaccgcatgaaatcggttcccatccacctcctctacactctccccatgtttcccccaaaaattgtgccgggatcgagctccacttcgcccacgatgtcacccacgtcgcgggtcattgccgccccaaatccgccacgcccggcaacggttttccctccccgagcttataaaatccatccccgggctcccttctctcgtttcccctcctcgccggcgcttccctcgccttctcccgctctccccacgccgctcccgcgcgccgccgctctccggcgagctccggtcgcctctagccgccgccctctgtggtcggtcgggccagccctggctgtgcccgtgccctgccaccactcccctcagctgcccgatcggcttggcccgatctgggccgtccatcccgtggaccggcggtggaccgtccttgtggtcccggtccacggtgcaccgagctccttgacccgctgacgtgtggggcccgcgtgtcggcgccggctgccccttgctgacgtcagcgaggtcctttttcctttgtaaaaataattaataattgcgcaataaatcgagtttaattctagaaattcatttaaatggctcaaaacttctaaaattcatatctaattcattcgaactccgaattgagccattcaacttgcaaaattcatctaaaattgagctctacatgtttgtttactttttatgtactgtttccttggtttttattagagtttttcctcgttttgcgtgccagcgtgtagtttccgtcgtttcggaagtccgcggtcgcgaggaaaagagttcggaagatcaaagtgaagaagcaaggcaagtcacacattccccttgagcatgttgatcccaatttataaatgttttaccgtttacaaataaatatgcatgttttgctaattacatgggatccgggtattacctatctgctcgcttgtgccatgtttacttgatatctatcctttgtcaaccttgggtaataaattgactagcttgtgttacttatgtgacctagctagaactatatgcttagccatgcttaattaccactagctcagtcgatgggataattgcagtattagacattctagtatcttgttgagccgcgtgctcgagacatctggccatgttttatggtcgtaattatccaactaaaatgcgactgaatggtgggctgtgggtgcatggttttgtgagtcgcacccatggcaattaaggaccggttcacgggaaaccctggaagacttacagtgcttaccacaagcgggaatgggtaactgcttgatctgaagtatagctcgaccctttcctaggcaccggtggcgagggtgggcgtgatggagttgggtcggccggggtgtccggttgtccagctgccggattcaccgcggcgcaagaggggaccgcccactgccttttgaggggtgggggtgaaaccttagcgtggtgtggatggttaggggagggttatgcgaagggtctcgtcacaatcactcgacatggtgacgtgtgcatcatgggcacatgatgacgcggtgacatgtcggtgggttgtgtcttgtgggtacagttgtgcacctctggccagagtaaaactattcgaatagccgtgcccgcggttatgggcgatcgaccagattcaccgtgattagtctcacccctaataaatcgacccaatgcactgtagttcaggtgggttggttgggcctgttcaacgtggtgtagcgttgatcagtggagatttaatgttactttaattactcaacagttttactgttttgctcaataaaatgttttacaaccgcctttatgcaaatagccacaaaccatccttggatccccttgcacgtctgcatcgttggtgtggcttgctgagtacggtggttgtactcaatcttgctattattccccctttttcagaagcgtagtgcttctgggctgaagacgaagttagaggaccaaggctcagaccccagttgagttttgcctgtggagtggagctgaagccccgctgctgctgcttttgtttcggtgtgaggactaagcgcctcttctgtaagtattttacgctttatttacgtttggaactgtatattacttgtcgttttgtgtaccctggctggtcctggacagggatttaatacacaaaatagtctggaaatttgggctaaatttctgggcgtgacacatattaaaccaagtttagagatctcgatgcacgttttgcaagttcgtggacctaagtgaaacttcgttacaagtttaagtaccgctagtgtaatttactcattttataaatagactatagctggcaggtgaaatatctaggattttttttctcaaaatgaaaatgacgtatctagatttgtacacgctcataattaattaattgattggagatttttctttgggaggggggaggggggttaaaaattgcatgctaggtgctttcgttgaagaggttgtttgtttgagttttgacgcacgcgcttcgtcgacaaataagatgcttagcagggtgtatactattggttgactactaaattttgagttccattgataacacagttttcgacaaatttcgaccggtttttgataaattttgactgaatttcgaccaaatttactgtttacccttcgaaattccaatcgaaaattaattccgagccatgtcaaaacgtcgaaatttcgtagaattcgaccggttttcgttggaattgtgaaccctgatgcttagttttccaataaaagttgcgtgctgggcactgtttgtatcagtcatcaacagatcgatcttatagcacaaaacaatcttatagcacacagcatacagcaacacgaacatcagaataacaaaacaagcacacatacaagacttcctataaagcatacgtacttcacaacccggtgtccacagtcaacggaagaaatcaacctttgagcctttcaaaaccaaactagtctgctctacatcagcctctacagatggacatcaacgaacaatttatatggaaaaactcggcactccccaaggtccaattttttgcttggctactgacaaaggataggctacccacatgcaagaaccttcacaagaaaacaatcatccaattgccgttgtgcgctatttgtcagtctgctgatgaaacttcaagccacctttgcttcctatgcccgtttgtggtcagcttctggaattcaatccacagatatcctggaggcgtgcacactcatgacctgcacttgattgctctaccaaacaatctgccgcaggcacatttcaaaaccttctatctgctttgcctatggagtactctctccgtccttaaaaaaaaaaaagacaaaccctggtttccgtgcccaacgtttgactgtccgtcttatttgaaaaaaatatgaaaaaaattaaaaagacaagtcacgcataaaatattaatcatgttttatcatctaacaacaataaaaatacgaattataaaaaatttcatataagacggacagtcaaagttggatacggaaacccatggtttgtcttttttttttgagacggagggagtatttggaatcaccgacaagaagttgtcttctctgaccagcaatcatccttacatcggcttcttctccgctgtaaggatgagactactctgtggacagaacgacttcttctgcgcgacgatcgcctagttgctataacctggaaatgtattttcaacatcgcaattaattctctacacatgtaatgcgtgccgctggttacgtctgaactctatacttgtaaacctcttcaaatggtaatggaaattcaggtgggaacctctccctcctgtgattattccaaaaaaattgcgtcaaatttttttttacgtaaacaaaaaaacccaaactagtactgtacaaaatcgtacacgcttcgtactagtttctctggtggaaggtcatcagggcctcggttcctttcaaaaggcttattcgtttcaaacgaattgtaaaggaaaagtgcaggactatgcaatcctttgaaatgaacactgtattgacatttgtttcaaagaaatgcaccaaagaaaaaagggaacatatcctaagcacataaaaaaattttcgtgcacaccaactagcaaatgtcacaaaaaattctagaaaaaaaaactaaagatgtactcttaatagtattacacatatctacaaactctcatatttaaatttattatattttagccgtgacaaaaaagacaaaattctgacaaattttatctcttaggccttctttatttaggtttaagttttattggcttagacttttaagtcaacttattggcttatataatttataagccggtggatttaatgtcctaaatttagtggtggagtcatacatctatctcatataagtcaaaaattaaagcttctccaatatagcttttggcttaatagtgttagagtggtttatggcttcaaaaagccaaacgaaaaagctgcttgtttgtttaggcttagattttttggcttataagcctaaactaagagggccttaaaactgtcagattttcacttatttgttacggctaaaatataatgaatttgaatatgagactttgtagatagtgtaatactattaggagtacatctctaattttttctagaattttttttatgatatttgctagttgatgtgcacggagtgtgcatataaagcttgtatgcataggatatgttcctaagaaaaaaatttttatccctccacttttagagggaaaacaaaggaaagaataatccactccaattcaatgttttcaatcctttggattgtttgctacacaaccatagggaagtttcctatgttttcaatccttaggttacacatgtattcccatactattcctccattttccctatttctacgttttgaaaatcctacaaaccaaagaagtctttgcaacaggctttcacttttcctcgctcctcgagttgaattaagcttcatccaacaacatatgtactccctccgtctctaaatatttgacaccgttgacttttttaaacatgttttaccgtttattttattttaaaaaattaagtaatcattaattcttttcctatcatttgattcattgataaatatacttttatgtatacatatagttttacatatttcataaaatttttgaataagatttatggtcaaacatatgcttaaaaaataatgttgtcaaaatatttaggggagagggagtaccatgtaaagcaacgttgctctctggatggattgacggtttcgtggttgaaagatgaaagccagaagattatacaagcgcggtcttcggttagtgcagtaatgcttgtgtccttgtaagctattgtttcgttccaatgtttcagcagcgatgaaaattcgtgttcaccccaaaaatgaaatttttttattgtcctaccgaaaacctaccttgcgtaaattgacatggcaagttgtgttgtgtattgaggactatcggacgaagacaaaatgtagagcaaaggatccgctagattaggttagagaagaccaaacacaaagctgcgttgacgatgacgaccgcacgaactcgcgctataccggccggcccgcaaatgcgggagctcggcccaactactcgcgtacgtacatacgtatacggcccaactagacgcgcacgcaatcccgtcccggcccaactcgagaactgctcggctgccagcccacgtccccgcggcgcacggcgaaattgctcccctcccatgccggaatcccaaaaccctcgccaaaatcgccgcctccgcctattcgcgcggcggcggggacgcagctgcggaagtgcgggggggtcaccgcctcggccgccggcgcgacgacctccacatcctcgtccattgccatggtacggcgtcgccagctccaccttctcccccctctccttcgctgctgtttgcggttaggaacatacaaatgcggaggggccgcggcggtgtccaattttagttaggttttcgaaatttcaatccctggtaggcgcctgtttagtagcactagtcaatagttctgtagattgtgaaattttgaagggaccctgtgttccttacttagtaagggctataattgggctttcgtagaggaagaactgtgttgcagcagcttggtctcttcttttgtgctaccatagggccataggtggttgatgacagagatttcgccgaaaaaatcactgtagttaagcttggtctacctcacaaaactattggatctgccactattccagcttgtgcctttcaactgagcagtttaatgacaatgttgcattgtagtccttaacaacagagaattgtatccccatgcgtttaacatcgtggtttgtattcaacagcaaatttgttaaatggatcagtttcgcaaactatcacatccgagtatgtatgcaattcatggcacgctaatctcatctgccataccattttactgcctctgtttttggtgagctagtccatttctcttatccttttgatgccatgtactgtttaatttccctcaatccacattttttggatctgttagaaccctgccagctttatgttttgcaatttatgtgataccaaagctggctttgcatagtggaactgtcagccattttcagtcctgattttctcatgtgaaatttaattgttgttcacccatttcttcttcttgtcagtaaatgtgttgtcttgaattgggatcatttactcgctgaatcatgaatacatgcagaactatatacgttatactgtacatatattgcagatgaacagatgggcaacattgattgtcttgtaatctttaagcccatcacatgcgtctattcaggatccaccactaccttgtcgggtggagttcatttcgtagtatgtttctttctcacttgcgacttgtctgaattgaaggtaattgagggcatgtgtggtaatttgacttgtacgagataactctatactagactttctttttccttctactatcaaatggcccagttattacattgaattatcacaagttgcttttgtgcgtgcatcaatttggtctttttttgcatgcaaaccttgacctgaacttttgaccagtttgatccaaagttttctttgtaagcatgcaattttctgttcaatttaccagtattatgtgtattttccattacccaacaagcttcatagaaagtaataactaatgtacagtgatttttctgtccaggtgtttctggctgagcaatacacaccaacatcatagatattgcaggttccctccagaagcttgtttcctgagtaaatcaccaatgctgggttcaatgaatgcatctttggtatgttgtgccaacccaagcaataataggccaaggaattcagatatatcgaggcaacaaaaagatggcctgctttttgggaaaaaaaaagctttaccaagaaatatatatgactgtgagaacatttatgattttgattgttatatagtgttctccaaaggtggtccagccatctctgtcctctggggcaagcaattcacgcccgctggcaacatcaactccagggataaggtagaagattgtagagctatttgaaatgatccaggcacaactgtgagcgaggtcaacatccggagcacaaaaggcctgaacctacagaagatcagtgggagaggggcagtgttgatccaatccttaatttgctaaggaaacactcatggaactcaaaaggaagatcaacgatgggaaagaactgagttctgatgaaacgtggagaggcaatgattctgggaattaacagaactcaaggatctttggtgtgaaaaatgacatttaggaagagcgaacgtcctactgcatacaaggccaactccaaattgcaggcgaaggtctcttgttcgtggagtgaggttccagcctgttgttaccaatggcgatatgcagttgcagatgccaagtctatcacagatagcatggttgataatgacaagtctgtcgcagatagcatgattgattattgcaatggttgattgacaatggcaatgattgaaaatcacagatagcatggttgatgctgatctaaaaggtaagatatcaccaggcatgtttttccatacgaaatatgaccagaaaacatgtctttggatgactttggcattattccagatgatgattaatctgattcttcggatactaaaccttacgatggaactttctgatgttactggtagcaatgtatctcatgataagatcatggaattttcttgtgcagaagctctgatataaataagctctttcaaggttctggagctaagagaacttgcgaaatcttgaggaatcaagggctattaaaaaacgagtaaaaataaattggttgaactgttgagcaacatggtctgcttctgatccattaacgacagagtctgaccttgtatttgagccattctgctcaactatgtcctggacatgtgtgccacgtttgttttgtcaataccaatccatttagatagattaacaatgtaaattagtaagtttaacaactttacgctgttctgtgttgatcatgtgcagacctacttttttctaccaatttaagcttcttaatgaaacagctgcatttcttgtcttccctctactgtagtgctgttgacccttgattgcattgttttacttggcgaacttgtaaagctagctctattaacctgggaggtcctgcttacattgttctgatctgttggtgctctatctgtcaggtttgcgccattttctttaccaatacaaaaagatatatgaatggtatcgcctaatattctttttctataatgcaggcaaataaaggtgtatctatacagttctgttattgactgcggctgcagctttgctcgtgaagcgaagaatgaaagcggcccagtggattgcagacggcagaattcctggctgcattattgttcggcctctgtcttctcgtccagtccaagagctttgcttgtgtgttgcatcctgctgctaatcaatctctcgtgatccacgcacgcggcgtctcttggccgtggccggggccctcccctcttgatttctgggagccgtcagatctgagcgattggacggttagttcccccgtctcacgtgcctctgcccctgctgtcctcctcccctggccctctttgcctgcctgtatattgtctgttggaaccctgattaaagctgcatcccctcgttcgttttgatacgattgcagatcagtactagcaacaaatttccagtcgcgactctttcagaaaaagaaaaaggattcagtcatcaatcactagagagaagtaaaaagaaaaaataaaggtaatcctctactcctctcctctcgaacttgtgtagaactactttctttgtctggtcgcctcacttttgcagccactcgatcagcatgcatacctatataacttttatgcatagcttgctttctttcttttgctttccgtcatcactagtaattaattaaacttctagtaattcttttttttgcgcaaattcatggccttccaaaggaaggcctaattaaatagattgttaattagggctgttttggtttgatgccaaaattttccctaccaaatagttggcactttaaatagtaccttgtagatatttggtttgatgccaaaatttaccaacggtaatataattcctataaaccaactttaccaaaatattggtagtgccaaatattatccatgatttagcactactaatgatttggtagggcatcaaaccaaatgagcccttaataaacatgaatactgatcatatgcacatgccgtaggcacgagtcacacgattagaagtctagaacagaagcaagatacaaatgtaggtgcatggctgttggcatgtactccgtagggatagtagaagcgcagctggtccatgtatatgcatggagatgaagaagtgaactgttcgaactcggcttggaagttggaattaaagcacgacgaggccaggctagcaagctagcttctagctgggttactggaacccggccaatactgttcgtataggtcagtgccagtgcacgagtcagccatgctgccatggcgtcgtcgtcgcatgccaatggcttgcatgcatacagacagttcaaaactgaggatgaccagtccacatcatacagcgcccgtgcatatatatgtacgtggaccttagaccatacacatggagtttgtgaatttttggtgagcttatttcctgcttacatcacactttgcacatgtgacggagagagataacatgaaaatataagagctggctatcatgcaagagctatcttagcatgtgctcttagaaaaacaaattaaatagatatgtgagattaagacaaaatggtaaagtgtgtatacaccttgtagctccaaaaagttaagtagatatcataggtatattttaatattataaagacaaaatggtaaagtgagtggattatagctatatatgtgattacatatagctactagttgatatatcgatttactatatctatttcatattataagtcactttgattttttctaagttaaatttatttagttttgactaaatttatagaaaaatatgacaatattttcaacataaaacataacaactatcaaaatatattcatttttagatttaataaaattaatttggtgctacaaatgttgctgtatttttctataaatttggttaaatttttaagaagtttgactttagaaaagtcaaagagatttataatacagaaggtagggagtattaaacttgttccaaaatgttgtgccatgctcataatcttctcccatcctaacgagcatgctctcttcttctgttagttgctagattataattttagaatcagggcttagaactcgatcatgtagtagattgcgactcataaaataggatgcaatcataatgtttgtggaagtaagtattgatatatcataacaaacgacatgcatgttttcattccgggagcacacacacatgcacgtcctacgatatgtagtcacgtgtagtttttacatgcaatccaagctagaaagttccaaacattgtactgtgagatggtaaaactgaacaagattgacggccggtgtggatcgaacaggaaaagaagctagaagatggggagggcgtctatctgggagctgaggtcgccgtcaagattccactatcagtggatgtagaaatacacaggtacgtacgctgtacctatcgatctctttctcaagctaggacaaaagcttagctagctagctagttgcattactactggaatgcatatagatgagatgtgcaggtgcagctggctagtcccacgttgcgtgcatcgtatgcagggagcaaccagtccatgtacagggccgctccctcgttgctgaccggcggccggcatgccggattcccggccgctgccttaatcctgggccccgccggccggcgtatcgccggtggggcacccggccgcgcgcccgcgtgccttcccccacatacaccgaccgaccatcaccggtgtgtgtgcatgcatggccccggcctcggccccgatgtacatatgtaagcatatactccattctctaaatgttttacgccgttaacttttctaaacatatttgtccgtttgtcttattcaaaaacttttataaaatatgtaaaactatatatatacataaaagtatatttaaccatgaatcaaataattaataattatttaaatttttaaataagacaaacggtcaaatatgtttaaaaaagtcaatagcgtcaaatatttagggacggatggagggagtatgtgctagctagtacagtgtttgcacgcattgcatgcttagttaatgtgcatatttgatcatggtctcgaccaaaaccacggccttttgaccgccctagctatatatgagcatgtagcatataaaccatcatatcatgcccgcctgtctcgatcgatcgatcgagcgatctagtagtagtggcagtatagtatgtgtgtcgttcgatctagtgatgagatagaccgtgcaattgctgtcaagtcatgagaatcagaatctgaatcagagatggtgctgttgcatgccatgaaccaggcagcagcagctgcacatatgcagtgctgctagctaagcttagctagctgatcgctgtacgtacatgtgtccacacagtgtcaatcagctggcccttctgcctaccttatgtgtgcctgactgcctctcggtcctcgggcatgcagtaacgtagtaccagaggcgtacagctccctcgttttcgtcgttgcagcggcagcgatgaggggggcagcgtacttgcatatattcaccaatgtgcataggttctgagggtactttaccctgctcccagcccacggaacgacgattgggaagcctactttgtactagcgcactgcgccccatttccatgtagccatagagatttattgtatgtagttgatgggtgctggtcaatgtgcccagggcataaactgtagatgcacatatacaatcctccttctttccgcaccatatgcatgcatttgtgctatagctaggagtactaattaatattatcaccaattagaagcctccatctaacccatcacacacaaaatgcagccaagaaccagctagctgttactgttaatatatagacatgcagtgttgcatgcatgcaatacaatgcaaatgcagatcgatcgagaaaatgcgcatgcagtgcacaggattcgtggtgatcacaatatacaggagcagtacatgttagatcacggttcagtgtgcccaagctttacttcaggcaatgcaccagccaaaactccaaaattttgcgaatgaccattggttcgtatgcttgcagatgatgcatgatatagctagctagcaagaccacacacagcaggcaagggtaactagcaaccccctttagtctacagtcttcttctcagtctcgcactttagctgccttcctttatttggacagacattctatggctcccctaactccactgctcatttatcatcatcctctcctcgatccctctgcatgcccatgttcatcttatagctagctagcagccaccgatccatgtgtatgctcatccatctaatttctagttagttcctcatttctatgtcattttcgtatgcccaaaacatatattctaataataattttggcaaagttaacttattttgactatacagattctagaacgacacttatttgtgaacgaattgaagggagctagcagttggcatctagtttagacttaaaaaatttcccgttaaaatttttgccatagtcacatggtcgtaggagtgaaaactgatcggatattatctgatccgctctgaatttgatcggatatggtataggtttttagaaatctagtgaatatggatgcggttgcggatatgatatctctaaaatcctacggacgtggattgtccaacatttctgctagattatccgataggtcgtttcccggataattcgaaattattaacccatataaccactctatctgttgcatataacatgagatggcgcatctaatggcctaatttaccaattaacctaaatttcttagtttgaggctttcaccatctatatcacacttgtttagttgtatttttatattatgaatatcatgtattcatattgtttggtacttaagtacataattattaagatgggtcgttcattgattattgcattgttgtcccttgcattactaactcgatggtgtattttttgcatacacacataacatccgataaatttaatctgtttccaaaccgagtccacaccaactccgcaccattttggacatccgaaacaatcagctctgcatccgcatccactccaaattcgcttaaaaaatgctttaggatttggtatgaccactatccatccgaatctgttccgttttcacccgtacaaggtcgtgtactaatgtagcatgcattatgcagatttggttgtcccatgatggtgtgttacaaatagcttttattaatattaattctatagatatatgtagctgaaaactaaattttaacccaacactttcttttaagaaaaaggacaaacgaaatgtacatatatcatcacctgtactgcagtccaagctacgcgagtactctctccgtcccaaaataagttaatctagtagatagtaccataaatctaaataggagaaataagttaatctatactggatatgacacattaattttactatgaatttggataacttcaaattcatagtattaaaatgtgtcacgctcgctattagattaatttattatgaccaggggtagtattgattattctctagtagcactcaggcaaattttagtacatttatgttctgaggcaaggacgagtacaatcatgatcgaccggtgcgcgcgcctctttggccgaggcgactgtcgtgcatccatgtcgatcgttctgacatttaattgtttgcccaccggccttgatagtaatcggtcagctggttatagttgagtgttggatgttgcactggagatggagagattagcaagcagtttctgtttatgagctgacgtatgcacggagatattgatggtaggtagcactacacgaaccgtccgaatcagccatatacactgattgaatgtgtgtatgtacgtacgtagtcacgtacaagcgcttgcagcctcgcatacatcatatctactcgaggtgtctacttcatccctttggatagtgatgtaggccttgtcattgtgtcaataatttgtatatggagttatatacggctctgatcggtcgagcagtcgagctgctacgtttgacaagtcaaattatgaagaaagcaaccaaagttaatacataagtataaatttaagttttaaaatttaaattttgactgtcgataagccaataagatgaggagaacctatattcgggcttaggtttattggattaaactcgtaagcaactattttttcttatatggtttatgagctggtggcttttaagccctcaagtgtaatggcgctacttaaaaaaagatttttgtatgtggtcagaattgatcttcgcaagtggctggcggaccgcatgcacgcaaatgtctgcggaaatcagcattttcgcatgcgggaggcccaactgcttggggagattcattgttgcaggccgatgagctatgtgagctggttaagtcactgaagtgttcattcttaaatgtaaatattacatttctcagctccttagcaaattcttgatatagtgtatcaaaggtcttccactaaagagcattggtggattgtcgaatcataccatatgtcttgcggttttctcgatactatctcatcaactcatcgtcattaggatttgagaacaagcgcttcatgacatctttcactggcagataccatatcaccatggtcggaatatttttctttgtatgcaccgatgaatcaaggtcgacaacctctctattagaggacccattacctgttctgtaccgactagccccacaggttaggtaactgttcaagtctacatattccttgtagtacaatacacaatgatttacacatgtatgtatcttttggacatatgagtttcttcgcttgatacgtgttagatggcaattagttaggtttaggaagcaaaacacttaagagacccaacaaaccattgaagctactatcggatcatttgtgtctggtcttcaatctgagaagttcaagcatcgaaggcaatatcgtaaaatctttctcacatcccttggattcgtcgtaaagaagatccttcgctgactaaactaacgtctcctaattatctaatcctctcgctgaacccattagcacctttggtttagcgtgacgtggcatatcccccagaccagaaagagctttaaaatcatcaatacgagtagaactgttctcgtccatctgtaaataatcatcaatatgatgaatgaattcttcgcatctcgtacatccatgtctgatccatctgtaaataatcacgacacgaataaaattaaactataggtgttttccaccaaaacatgaaaaatacacgcatctcctcgaaaataatgcaccattacattgaactagcatgaaaactagtgcttacaatagtaattttgctcatctaaatattctattatagttaaaatttgcaaaaatagctcataagagtcgtcttctaaaactgcaaaattctccgcattgcaccgatgaaatattttttaaaaaaatggcggcaaatggaggaggtaaggaagtatataaccttgtatatcaatttaaagttcaaaacctcccccaccctatttgttgcttgttttgaagagataaacttttggttgaaatggggttagctcgggttgggatcaaatatatgggcatatcatcgcgggcaggactcttaagggcccgcttgcaataaccgcattatcgcaagcggccctttaagatgccctcatgtgataatgcacccattatcgcaggcgggtctcttaaggggggccctgtgataatgtgttaccacagacgggccttaaactaccccgataaagtgatttttacatgcggaggcagttacggcctgtctgtagcctggaaagggcattgtccgcaaaaatcaaatctatagcattgtggtggtgtcacttttccactttatacaagcgaaaaaaaagttactccaacttagttttagcttaacagtataagggtgacttgtgcctttataaaagctaaacgaaaaatttgcctatttatttaggtttggacttttttcttataagttaccttgtaatatatcgtgcctgaaaaaaaagagggcagctagggacaaagctagctagtagcaagctcgagaggtggtgaacagagaagaattcaatcccctttgtaatagtttgaatcttaatggttggagttgtatgtatactatttatgtaccaaaacgcgtgtatgggtaaggtagtaagaaatataggattgagacgaacgttgcccatgcttgctctcgatcgatcactttctctttctttctagagcagctatgtgcaagttgtagtatcacattatcttgtccatctctacccatctagcttaaatattgccactctcgaattctcatcagtagccaatagccggtcgatgggaactaatgattttcctcagcgatctgcagggctttttgactgattaggacgtgtcgtcgccgtcgttgcactgcgttatcgatcgattgatcatccgagcatctcgcgctcgcgggcccctcgtgcgggcgcaacagtgccatcgattgctccctctcatggctgcataagaattgcagtgaagtacactacccatcctaaaatataaggatttctgagttttataagtaattataaaagtagataaaattaaattaattatgcttagacggttagattaagatgagagatgattacgatcgtttgtaatgaaaaggtagatggagaagttgctatatcatggaacaaattttagacaatacaaattgctattttttaggatggagggaaaagtcatttttctgtatattattgtttggttctgcgtcttccacccatgattaatttgatcgatggcgacgctctgaaaatgacattaatatacaatcgatcagttccttaccgtaatatgctacatgctcgcttttttacttcaaaaggtgaatcatgtgtgtgcaccaggacttataggtcaaaagtagatccaacaaacaaacagttcaccaatagtattacgctccacattcatagaaactagcgatctgtattttatggatctgaggaagagaagagaaaaaaggcgaacttcgttggagggggagtatcgaaaatccgatggtccttgagggaggcagcaacatgagattgtgatatgttggcggcggcgtaccgcaagctatggcatagtaggaggcgacgaaatagaagcgggaggtatagtgaggcataaggcagagggaagtgtcggatttcggcattccttgaggtggtagcgatggggatcacggtagtagcacatcgtcccgaaatctcatagggcctgggaggtggcgtgcggcagtgacggacgtggtagtggtgggacgaacgttgtgctgtccgccagccgcactttgctaccggtcgccgctcgacactggccaccaagtcttccactcactttttggtagtagcggtgggtgtaggtggttgttaccgttgcagttgtgttgtctttcaagtactaatatcggtgacgcctatgggagtcacaccttcctataagcgttgccgcgatgcccttcccggtggacatccatgctatgcgatgaactgtcccggtggagatgatgttctagatgtctgaaatagcgatggtgatatttaagatgtcgcaaccttcttgaagtcatagcattggaggtttcttgttagtgtgatgtccttatgatggtgtccccgtcgattcgtatacgatggtaattgtggtggtaatctgggcggatgattgttaactactctttgatgttgacttcctctttggtttgacgttagtttgctgatagcgatgggagcgaaattcaatcaacaaatgatgttgtttttatggtttgataaagacatgaactaatacaagccgttggtagaaacaacggttatttatacttggacctttttagggtgctattgttgtttctaatcaagccataattgtaattcataattattcatcgtgtagactctataatagttggttgtaacttctatggagtaatgggaaaaaataatgctattataaaaaaaaaattacactccaccttcataacccgtattatggcatgatgtttcatagaagcatggcgatatatatgtgcatatagcagccgtaaaccctttttttttaccaaaaagcggtcctaaattttgacgattgatctgtgtaaaaggtttaacatgtagttaccgtggtttaaatgtatggtttacctgtccaacctattcaaaatctccattatatttcggacaaattagctactacacatgggtcttacagttggcaaccactaatgggcccgggtattataaatgcatatgtacattctttgaaagttcccctaaatgcttagcccctccagatgggacgagccatgcacatatgcatatgcatcatgcatagaagctaacctgaggttttgttcttgcttttttctacaaggttttgactctagaaactttatgctttgagacgtgaacgattatatggtctgcacactgcgaatgtggtgtttaaacttggagtgttatcgtttaaacgatgtgctcgaatgttgatgctatgctagtaccatttgtagtgaaacatatggcctcaaaggtcgatgcaagccaagacatgggtaggccatgaacgtcttgtgtcgtgtgccgcgctatagggccacgtacagtaaatggtgcccatttagcaagagtcgatactctgttaccacttgtaacacaccatgcgacaaccaaaaataatccacactgatcgtgtcaattgtggtacaccgcgcgacaataaaatccacacaatgtctaaacacccatgtggaacatctgtgtatgggtaaaatctcacctggattctacttatttagaagaaggagagagagagagagagagagagagtccatttttctactttaaacttttgagtctaaaaacccctcaaaatttgaaaccggatactattcaataacgtaaacaaagaaatccgtcactcccaaattcacctatattttgagtttttttgtgtcaattggcaatttaattatgtggctcaaaccgaaaaacaattttagttcaattgataacttacaagattttgcaagttttctcgtttgcaccacaaaaaacaatgtttcaaattaaacaaaataatctttagtggaataattgcaatccattcaacactatatataatttatctagcctgttgatactgctatatatatgtaacttttctttagcaatttcttgagtgcacttaataagttttataactcaaaagcattatttgaatttagaaaattaataaatggctttgaacaattctagaatttttttaaaggtggacgttgatgtatttataaaatttatcgatccacaaaatatttgtgtacttcctccgtttcatattataagactttctagcattgcccacattcatatatatgctaatgaatctagacatatatgtgtggctagattcattaatatctatataaatgttagcaatgctagaaagtcttaattataacctgaaatgaaggtagtattaaactatattttctgcattccgattgtaataaatttatccaaagttacaaatatgctgatagcagatatatttttataatttttgttaagacctctagctagggcgatcaagtagctattcttgcacggcatgaattaattagatgtttattatttctagtatttattttaagactgttcttgctagtaaatcgtgccgtactgcaattaatacatgcaatctgcaacactgattactgtcactgcatgtgatttactttccccgtcccataaaaaaccaatctaactagataaataccccgcacaatgttgcaggagaattgtgtgataatagaaggcacaaccacccttaacacaaacaccaagaaataattattatcatcttgtagtttgaatcatccgagttagagaatgtgagagtggaggatttaaaaaagtagtaatttaatggaaaatatatcatagttaatggtatgcatgcatgcatgacttatattattgaacataaaaaaaagtggttgtaccttatattatggaatggaggtagtatatatgagttctaaaattttcttccttatctactatacggtttttttcatgtgtttatctattttttatacttttatcaattattcaaatgttataaataattgggttgtatggtatgccttttgggggaaaagatgcaatttatacccttgatgaatcatccaaaggctaaaaacaattaaggtgatgtggctttatgagagaggagagaattagcattaactacacttactcgggatgaactttatagatctatataggatactggatgtgacacatcctagctagtactatgaatctagatatatctttattcagatttgtgttctagatttgttttatttgggacggagggagtaggcgccaaggtatcccaaaccactggggccggagttatcgcgccccggcggtaagcacggttaccgcgcggtaaccacggtaaccgtggcaaaccgtacgaaaccgtgtaaaatttatcaaaatttcaaattactttttaaatttatttgaatttaaggaggttaccgtggttttctttttaccgtacccccacagtaagcgtggtaaccgcggttaccggcggttttgtaaaccctggtaggcgccaatgccatatatgaattgtgtcgaattaattaattagcttgtgggtaagtagctgcatggagcattaagggggtgcttgaagaaaggattagggtttcgtaaattgcaatgagtgggatgccagatctatgatctatctcctcataggcttatatatatgtttgcaagtactagagcgccctgtactctgcgttgtgttgatttccgaaaagaaaaaaaaattaccatatgcaaactaactttcactacttgtcactgtcgtcctcctacctcagctccttctccatcgtcgctccaaacaactttaatttcaaactcttccttctgaaaaggcactgttcatgcatgctacaccccttcactctctctaaaaagttcgtgtgtttgtacatgggttgtgggcgcgtacattcatggccctactgtgccgaatcgaagagagacggtggccgttgtgaagcagccagcgacctgttcaattaatttccttgcctggtataaatttcttttatgttctgcaaccatgcacggctacacggagcctaatcattgataattcaaaatagtaatatctaatcgttcatttaaggacactgcggtaaagaaattttactatctataagagataaaaataattggtatcttatagtatctgagatacttgagagctatctatcaaaatttagatttcaaagagtgtgatacctctcagtattatccacttaacattgccacataaatgatcatccatgtcgcctcatcattgtcggttcagtgtgaaccgacagcgatagcgtatcattgtcgatccaccgtgatttatggtccaaactgatcacataatccagcagttatactgagtattattgtcggcttttatcacaaactgatagtgtttgtatcattgccagcttatgccatgaaccgatagagaaaactggttgaccaacatttgaccagagctaggagaggttaaaaatttcctaaggctccacggctgaaaacataagttgttggtagcctatcagtcgccacccaccccaccccaccccacgtcaacaaaatcccctcttcttctctcatagtttccctcttcttccttccctcctaatctgaccatggtgccaaccgcaccacgctagctctcttcctccctgtgtacctctcccttccctatatcgagccctctccccctcccccttctctccctttctctctcccaagtccaggttgaggtctatcttccctccctctcccatgtcgtaggcagctggtgtggtaagtgaggaggataggagacagctggcgaggtggggtctagatccagtgaccccgagctaggagtggccaaattcggcccacgggatggcagcggctcacgtggcatgatgacttgtaatctctgtgggatcctttgaaacaaaggttttattaaaggaattttgtagatatgaatcctttggaatattttcctatatatatgctcctttggataaatggaatggaccctttcaaattcctggaatatggccaagttcataaggattttggaggaaatctaacatgagctctaattaagctcttggaaaattaactttatgccatcctctctctaaattcatatattgtttttatatgaagtatccaaacaatacaattgagcaattccttgggatcacattggcatgccactccaattcctatattgttattattcctatgtttctcaattcctacgttttaaaggagccctcaggagctttgtacaagaccagctaccatatcgggggtccacacattttatgataactagtttcatgtcgtatatgtcctctaatagttctggatcaccccattagggattagcatgaagtacaaacccagtaacggttgcatatatcttatggaatcgttatatatcacttgatttcaaacggtttctgtgagaatcgttagagattagttgtcgaagattaattggctagctattttctagttgtgtacattctagcttagtattattgggcatgcatgtctgtactgtacatgctcaatcagtactgagcattcatatgcgcttgtctcctgcatgtatgtgctcaaagctaatttactattcgatcccccatttttttggccagatcgatgcacacaaatggactcgattctgccacaagatatgttcggctatatatctcttataaatcttttttagaataacaataagcagatctaacttatatatatgtttattggtcatatccagacaaaatataggagaaaacgtaatttttgatattggctaaactagctagtcataaattttgaaaaaaaaattgatcttttatggttaacatgcatccataacttaatttgatcactatatttttaatattatgtatcagtatactagctatcaaattataatattgagagattaattaaagcattttatgaagagtttactcctatcattttcatatagccaaacatactttctaggcaagttttggttagagcacattttgactgcacacatattgcaggcaatatataataaatttcccctgcatgtatctcatttttatttcaatacctaaacacgatatatttgcaaaaaaaagtcagatacgatatagtttctcaaataataaattttcccttgatatgtttctcattttttaatacttattaaacgctagtatttgcgggaaaaaataaaattcagatacgacatagtttcccgaattaagcagatatagataatctaggaaacaatttatacggtatatatgaaaaataattaagggcaggggcatatcatgcatgagagagagagagagagagagagagagagagagagagaggatgattcagcattcaggtggatgggaacatgcagccctgaccacaccagtcaatggtctacagcaaaacactacacctacaatacgtgtacatataagggatgcacatatataataagcatccaacaatatatttgtgcaccacataccatatttcatgtcgtctacagtagtaacataagtggcctgttcactctagctacatagtgtgcatatttttctatcagttgtgtgcccgtgcaacaccgatgcacccatccatcccatcatatgatcctatccggcggccacactgcaaatctgcaaaatgatagaatttaaaaacacaaaaaacaagttagggtcggtcaaaaatcgacaagaaaagcagcagcaggagagaaacaagaggccatcccctccagattatcctgcagtcatgtcatgcttctcccctccctgcaggcctcaaggcatggaaggaattgcaaagataatattattgctagtacatggatggaatatatacttgaaaatgaaatatatttatacaaacatcctaactttatattgttcaaactttggaattaagagagtgaaaggtaaatgggataaaacaaaaaagaaacatctttaactggtaggtgacatcaccaatagtgagacactttgtgacttcagcaatctcaagacatattagctgtaatttctggtaagtgtgtatggtgagtttgtatattacacctcccagaaagctagctataaatatgcacacacccaccatacacactttacagaaattatggctaacatgtctgaaattgccgaagtcacagagtatgtacagacgacgacgtgtgcatctgtattgtatttcgaatattaatttctctttaattaactttcctgtcattttctcaccccctgagtagctagcaccaagctgtctagccttcctataccctactaggctctactacacccatttctacctcacacacctagctagcaagtaggctctctcactccacacccacactactcctcccaggctgcctgcctaaaaggctagacctatccatctcttccccccactcctccagcatcgccatcatccactgttcatccactccatctctctctctctctctctctctctctctctccatcgatccctgcaggttcttgctgctgctgctgctgccttgcttgctgtcaagcatggcttgaccacctgagagcgaggagagcatagcgtagtacttggctagctgctgttcaattcctcatggatgattggaggatcgctagctaggtcgcccggatccacggacacctctcctcgtctcgtgctcgtgcatgccaagatcgatcgatcccagctgctgctgcgagtggagcagtggaggaggagatcggctgctacctgacctagatcgggaagcagattcatccggtacatgttatatatagatatagatcgttgcttaggttcttctcttcttgtttgatttcgtcggagcaagaaatgatgcttgcttcttgtgattcaggttgcattacggcggcgaggcgagggcgaggatggatcgtcaccatcaccaccaccaccaccaccaccatcacatgatgtcgggcggcgggcaagacccggcggcgggggacggcggcgccggcggcgccacgcaggacagcttcttcctcggcccggccgcggccgccatgttctccggcgccgggtcgtcgtcgtcgggcgcggggacgtcggcgggaggcggcggcggcgggccatcgccgtccagctcgtcgccgtcgctgagccggtacgagtcgcagaagcggcgggactggaacacgttcgggcagtacctgcggaaccaccggccgccgctgtccctgtcgcggtgcagcggcgcgcacgtgctggagttcctcaagtacatggaccagttcgggaagacgaaggtgcacacgccggtgtgccccttctacggccaccccaacccgccggcgccatgcccgtgcccgctccgccaagcctggggctccctcgacgcgctcatcggccgcctccgcgccgcctacgaggagaacggcggcacgccggagatgaaccccttcggcgcccgcgccgtccgcctctacctgcgcgaggtgcgcgagacgcaggccagggcgagggggatcagctacgagaagaagaagcgcaagaagccctcgtccgccggcgccggagccgggccctcgtccgaggggagcccgccgccacccggcggctcggccagcggcggcggcgacacgtcggcgtcgccgcagttcatcatcccgtgagttcttctcgatccccatcgccatctccgcatctccattgatcgatcgagcctcgcagcaagaaattccaatctccttggcagaaatgccatcttgctttgccagtacaaggcatcatatctcttctttcctcctgaattggtttcgatctctcccattttgcaaaaaaagatttctcctctttttaatttcatctctgtctcgctttctaagctaggacgaaggtcatgcatgagtgagtacttagtttaattcttgtttttttccttagctttgggacgtcaattaattggtagctgctgtcttcgatcgatctcgtcccgtttggtttaattattttgatgcaagaactggagtaaatttgatgagaatctcaagctagctagcctaattaggagttgtaatatttgttttagtctgggggatttgcaagaacaaaagtagcagaagctgtaggcatagcaagctagctagtgttagtatctgtagaatttgttcttgtaatagcttgtcgccaagctagccaagtgcagtggcgtcagcaatgcttccttctatctatcatgtactagtgatgatgtcttggtcttcctttcttggttgagcaaaagggcaaaaagggagagatcgactagctgatgagatgatgagtgatttcaattggtagcttaattaagacagaaacaacatgtgttatgtgtacttgtcctgggaacagattccatatatatgccaaatgctttaatttgggctatgatctgtgtgcaatgcaatgttcttgatatattcatgatcaagtgctccctttggtcatcatgtgtgtgctggtagctagactttatacaaaaatatgttgcttttgttctttgctttgaacaatgttttgttgtgtagtgccagtttttgaatggtttacagtactggatactaccttctttcacttttacaatatgtgcaaagtggtaacagatgaagaaacaaacaaaccaaacaaaagaagaaagaaagataggagtcttttcaaaaaaggagagaaaagaaggcagccaggcaccaaaaatatataaagggttcaattgggtgtgcactagtacgattgggtgatccctatttttgcccatgctttgatgcttctgattcctttccttgttcaagtttgaattgctggatttgacttgatttaatttgtcttcacttgtttattattcctgatgatgagtatatatagtagaactgacctgcacatatatatatgtttctgtaacaactcaaatgatcaatgatcagaggttttttcaaaaaaagagaaagaagggagaatgcatgttcaggtagctagcagacagcagtaaaactacaattctctttgtggttaaagttagtttaccacctttgttagaacctgatcagatcattctttttgcatgaaaactattcacttctaaagtcttttgtgtccctatcaatgcaacagtgccacacacatgttctttcacttcatctctgctgtccccatgtatatatatgtatactatatgatatggcattgctaccagcttagcaggagggcattcaagttcctgttttcacacagttgatgcatctatcactatcttagattttgcttgtcctttcaatgcatatatatgtgtagttgagaaaactttttctttcatatatatatggaacagacaaattaaagtcgactgttctatgtattgcttctatttaatttattcgacaactttgcgtgcaactcaatctgcttctcttttttgggggattcaaaagaatttttagcacatggccggcttcaatctttatgtgagtgatatgtctgattgatatatatgtactgactgactctctgtagccacagcttgcttgattgtggttgcataccttgcatgcatgcgtgatgagtttttctacctaattgagctagtatatatactgtatattgattaggtatcacagtatcgtcagtgttttatttgacccctaggcctcctttggaatacgacaattactaaatttccttcgttgcattgcctatatatatgtgcgctccacttagtttgatcaatacatttttatgagtgcttatattcatgaaaacaagccacaatattggctctaattttatacatttggtttctgcaaaggtgtataaaaatatgttttagcttatatatgtgtgtgataaaatttatgctcttttaatgcaatatgattgttttttgtttctttgattccaaatatataggtaataacaaatactaaacattgtgttgtctaaatgcaaatatagttatccacataatgtctattgaaaaaaataatatcaatatcaatggtaaacagttactcaccataaaacaccatattaggtgtgtgtttttcatcattgtttattttcttaagcttaattttatgttttttcattatattctattttccagcatttgcccttaaaccgctcatagatatgaaaacttgtccatgaattttttttcttacttcatttattttttttcgtgatttatcagccatatagctcaaacaatcataacccatttaactatagcaacaataaatgttaaaaaaatatgttgattacatgcacctttaattttatcccaaaactgcattatacatcacaaaaaccattcatgtaggtttcctgaaaataaaagggggcactcatgcttttatctatccatggttttcttaattttcagcagctaacaacccatagaattatgtcaaatttcttaactaaacataagcatggacacttcctcccaacatagtgtcttaaaaaatgtcaatcaacaagacatctaatacatttattataaattagaaaattatttcgttcattttttttgctacaagtcaagtaatcaactaatttaatacaacacttgatagataaaggtggtatttaaatgtaaaggctagtttaatttcacactttcgacacgcatcacactcacaacacgtatggatgtttttttaccgtcattttgggaggtattgagagatagatgtttatcatagctagcgttaatcatgacgtacacaccaggattaattatcacaaaagaactatatatatgacataaaagacatgttatccatgcatagattagcatccacaaataaatttagcagatcatggcgatggaacattttcttaattgtagtttagattgttgttgctgaaactccttggattaatgcatgggaacctgatcaacgacaagtgttttgttgtccctcaattaaattccttactatgcctccatgaacttcttgatcaattaatcatctcggtataccttgttgtaactagtatagggtttaaagcgatctttagtcctcccttggatgcatgtatgcttaattttggcctttaattcccatatcttctgttgaagtgaatattggccatggcacatctcttgtccacattattatagaaaatgaaatataagaatagatctaatacaagcatatatatccatgtgcatgaattgtacatgaaaaatgaaggtacctgaaacctctactagtcattctagttattcatatcttatattttgcggggtatatatatatatacacacacacgatcgatgctgaccaaattaacacacaccttggagcaattaacagggatttattcttacattgcatatagcgatagagctatatatgcattatactactttggcttctacttcaaataagacggacaataatcaaacgttggatacagatacacacagctgcgtttaaaatgggaggcagggagtagaagtatttaagcatggggatctgttcattgaaagaagtagatagaaactggaacgggtgggcgccaaaatttggcgaaacaaattcccccctaataaatgaaaaatccctggctcgcgttctattggttcatgttgcctgctctactgatactactttgcatgtacccatgattgacgaagagtacgtctagctagtgcagggccgaagaggctactgaaattaaggtggcccaatcgcacagaagaacaaactcgcacgtacgctgatgtgtcgtaatctgagaggagaaatgtatatctagcagcagcagcagcaactcagtttgcaggctcctttgcagcttctgatgcatgcagctgagactgataggtgagaggcatcaactagggacgagtttagtttcaaattttttcttcaaactttcaacttttccatcacatcaaaacttgtctatacacacaaatttccaacttttccgtcacatcgttccaatttcaacaaaacttttaattttgacgtgtgaacgaaacacaccctagctctgaatcgctctgatcagcaatgcgaaggaggaagaagaagaagaagaaagagagtgtagaaaaaatactactacactgctagctagctgctgctcgatcgatcgtagaaaactccatgagagtaatcgtccatggatcagaaaaatttagccgcgggatagatctgtggcgtttgtgtccaggacaaagggccactgttggcgatgtcattcaattcatttccaccgtactgtacctaccccgctctcccttcatttactccgatcctaacgtacagtatactgcagtcgtgtatgtgtactccactacgggaacacggcttaattttacccacacgcagtgtaccaaagtgcaccgtacgtatttcatcaatcttactactatattggttcagtgctttagtttagggcaatcacaattaatttttgttcttcattcgtcatcactgctttgtacgtaccaggtacgtacttctggtatctaggagtttcggtttagaaaatgtcaagatatgtactatgtttaacacatgcatggtagactatatagtacatacgtcctcgttccaaaatatagaaaaaataggatttaaatcttatgctataatacaaggatttttagcactattcacagtattacttttcccatcaatcatttaccattaaaatttctttccatcttaccccctaactaacctcccaccgctattcgttacaaatttattgagatacatcgaagcctttcttttcttaaccttaatatctactaaataatctagaaatgcttcttgggggagtatcttcacccttctcagcgtaggtgccctagcctaccaaccagaggggactctgaaggaggcccggttgaggccttggtaaggcctccaggaaggacctagtctagaatggcaccatcctcgaggtggctccggcaaaatgcgacttcacgaagcatctatgacgagaagacgggccatttagggtgcattcaatgaacccaaccatcaatgacgtatccgcggcgagagcaagcaggaatgccgaggcgcctcgatagcgtgcctcggcctcgagctgtctatcccgagattcgtcggaaccccgtgatggggggtttaatggaggcagcccctttctggtcgcctagagttttaccttcttgctctcgaggccaagcctgccagccagcctccacgtagtgggcggaggccaaagggccccttcgtaacttcccatataatctctagggatatataattgtaattcgctcctcgaaagagggcaatggagacaacgatagagaaatcgcgttgtttccttggtagactctcaatccctgttggattttattccaacaatgcttacagtttggatcggatagagcaaaacatttctgacttagttaaaatgctcatggttgaccttagaaggtcttttcggttgtgttgctgtagcttgccttctacgacaagtgccaagtagctagacacagggtagaccagaatgagacagaagacccgtgtgacagcaacaaaagaattattattgtggccctgtttttccagctaccagattattgtcatggattatttgctccgttccttccataatatatttttttagagaaaaatctttattctaatgcattacctagatatcttgttatggactattaatttcaaaatatttaatttatgtcaaaaaagtgtaactataattcactgcaataataacatggttaataattcgttttaaactactaggccttatagcgtttcaccaaatcgttttcgtttcttccaaagatctgcgtggtacaaccgtacaaagcaaccctagtagtcaatttggtcaggaggagcagcagcagcagaagctggaccagtgggctgcaccggtgacttggtgagcagtgctgctgctgattcaggccagggaacagatctgcctgcgtggggcctacatctacagtaatcatatgccattttgggccgggatcaatccgtcaggcaggccggccgttcgattggttcgtttagcgaagagttgaatccagacggcccataatctgttgcatgggcctagcaaaattgaagttagagctaagcccaggcccacagtcagatgaatagccaagcccattagtgagattccctgtgatcctgccatactgggccatacttttcggcttttcctttggcccaacttaagaggcaggcccacggtcaatcagtcactccagctggttaggtgatcttactggaaaaacgtaattaaccactgtagtaagaaaagtattcctaccagctggtcaaaaaaggtaaaaagtaggctgacatgcaagcaaagcatatgcatattgcatggagtacatgggcatgcaaggttgggcggtggtcaagccaacaaaagctggccgcttttgctaacactgacttggacccatccatatgccaggctgcttgctgcctgcctagcttcaacccttcaagcatgctgcaccacacagcagatcgatcgccgatatatgccgcattgtcgcgatggatggctaaaaaaaaagggttggaaggagagatgcccggccctccgaacattttcaaagaagaaattacgaacgggttaagaattaaacacgaaacctcaagattaaaatcatacaccccatgtccccatatcactgtattatcaagcgtaacatcgataatataacctagagctgatcaaaccggtaatacgaagtactataactacaacagtccatgaattggacaacgcttgccaccagcaagagattagaaaaaagagtccattctctcatctctatcctatttacggtatgaaaaatttagaagaaaagaaatcatatatagtgttagaaaacttgcaacgaatttttagcagcgaaagttaaggaggatgctaattaaaacctgagccctagcaaaagcaaaattactctcaaaacttatcctttagctttgtttatcttatttttctctggtatatttaacaatattttggtgcactttagatactgggttgttaaaaacaaaagaaagcaaaaatgtaacactatatttgccatgccatccccccatgcatgtatggaaaaaactctacgatcgagtgcagcgtacgtttgatcgcggctgtgtaagcttagaagcgaactaaacgttttgtttgtttttcctctgaaaatgggtaagccgaagagcagtgaagcaaactataattaacaccaaatgataacacactagatttgttgccgatcgatcgagattcgagcgtcagatcctttgcttggtttggcaaccaaaatcatatctttggcttagatttattctttctgcttctgtccaaacgcctagcaacgactacgctgcttaattaaattacgtgcagcgagacgcaacaaattgggacatgtgtcacttttatactcagtactgtaggtacacatgaacagtaccttctagttaaacaaatcttgatcccgacaggaacagtgagcaaagtactacatttatattagggtgacatgctaattaacaacagggctttgcaaggtcccaatcctcttgttctggcttagcattactgtatatattttgctattaattattattttttcgccgggctggtattaattattctctctgattttagataatatagatgataccgttgactttaaataagtttgattattggtattattcaaatacgcaaaacgtttgaccattcatctcgttaaaaagttttgtataaatatgtaaaaatataaatcgtagttaagaacctttagtgataaattaaacaagtactcacagaaaaataaatattaatcaagtaaaaagattaaaaagaagaatcctcaaatgtatatcaaaattgattgcgtcattcattaaaaaccgatagtacgtccaaactcgatctttctatcagtacaaaattttctatcagtataaattaaaatgctccaaaggatctcagcaaaagttagatagcttttgtatggccgccatctgtataggagcaatagcttaattaattaattactacctagttaaacctaccttttatatagatcatatcacgttacgtagtcagtgtgctagttcggtactactatccaattaaggcactgctcatcagtctaccacacctatggtgattcaacatataataaaactaaactagctttatcatattaaactacattgcttcataatttatatgtaaactacaactacggtatgaaggattgatggtaactaattaagccaggtagcatcgatcaagtagaaattaaaactgtcgacacagatcagaatgacgtagttacgtgtaaacagcagctatccacacaccaacttgttttccagcagctagctagctagctagaattcatcctcatcctcagcatgcatatacatacgcatgcataccggccaaattcaatctggccagaacttgattttaacggtaaatagtatagtaattaacatatataagaaagctatcccaaactagtgaagctttagcaatgggcaaaataattaagcaacaggggatgacacatgcatatggcctgatctgcatgcatgcacctactgcatgctggacattctgtcggcatttttgtattactatgctaatttaataatttatatggaactatggaagggattgaatacttaattacaaattaactcatcactgcaatatagtataagtacactatatatatccagtgtgctcagattagttgcttctaatcaaacatctcggttaattgttatattgaaaggacacttgcgctatagctaatacattcggaacagcatgtacctaggctgataaactaattaattagctagctagctaggtcatgcatgcatacacacatatatatacatggtcgatcattagagcttgcaattgtcaattaagctagaagcaagcaagttggggataaataattaatcatcaagtaaacgcggtatattagtcggtccattagctgcatgttttaattactttacaatatcgtctctgatggaattagttaggtaaatattaacaatatatgcacatgccatttgaatatatatacatgtatgcatcacgtactcgatatagctcatgtacgtattgtacgtaataacactgtgtacgcattttcaagctagatagcaaattctcttttagtttccttcgtggattaattttctcttctactttaggtcaacatatttgccacacttttggaattgatcgtcaaggacctttttatccactttggataacaggattctaatacagttcatacttatgcttttgtacttaacgtaatatttatatatatacataatttatatgctcctactttgtacattttttttatctcatggccggggacgggttttatttcttactgagattattttttttaactcaaactagctttatggttgtgtgtatcctacattcaaagatagaggatataactatatcttccttatcttaaaatggtcaaggggatcccatgttatatatctatcagttagaggccacgtaaccgaccaaactttgctgctgttaatttagtaaccggatgacgtaaccaatcgacacagccaatgatcagcaagacagcaactaatctgcaattagtattagattagctatgctctgcgtgtcttgcgtatactgtttgtgtaatatatcatttagaaatgatatgtggtcatgtccatagataatttgttctttcttaagtgcatgcgaccagatttcgatcaacagtacaggtctgcatgcatgaactcgtcacatgcacacagcaaattggttgctgcagagacgacaaattaaattgaaccgaacaaatcgatattgcaatccacccgttttgctaattaaacacacatatatattgcaatccatccgatatatccatatctcaaaaccaatcagtttacaatcatgcacagagtcaacatcaggaccagtacttctgattgtgaataaacataaagctgcacactcttcatgatgcatatatgcctcaagaagattccataaagatcagtggtctaattattccttgatgaaaaacaaatgttttttttctgatgcatacatgtatgcttgcattagtatagtgtgtggtcctacccaatctatacatgatatatatgtaagaaattaagcagcaaacgatcaatgtgtaggggaacacacatgcatgatcgttcagaaaaaaaaagttagtagtggtcctgcctgctctagatgctatgctatttattatgaccatagaaattaagctagcagaagcactgtttgacatgcaattaatcaatttgcatgtacttaattttcagtgcacaatgcacaattaggcagcatctgatggatgatgagatccctgtgcccttagcttagctaactgccaaaacaagcattcagaaagcgtggtgatggatggacgttgcgagataggggccccggcgccgatggaggacaagacatcagatcatatcacagaaattaacgagaaagagaacaaacgaacctagacgacaatggccggcttgggtcgttgtgtgtgcttcgttcagtactactgttgtgtgacatacaagaggcagcctgcacccacatgcatgcagcagcaagactgatatgattctcctgacttagcagcttgcatactgttgctccttcgatgattgttgtttattttctttatcagcttaagcttttaagttgaattagttagtgtacgtaactcaatatgttagcgagaccgaaaatctgaagttcaaatcatgtcagatgcacaattaaatcaataattgtagctcatttctatttcagtctcgtctcgaggtttgagggaacctcgcgtagaggtgagtgttggcatataagccggttgaagtaatgaataggttgtgtttgttcacatgatattgagaggagaagatttacctcatacattttcttttccgaactaataaatgatgtgttgttcttaaaaactttcaatagaaatgttgctttaaaaatcatattaatccatttttaaaattaaaataattaactatttaattaattatacgctaatatggttcatcttattttgtgtatcttctcaatcttccacttttccctcctctcaactccttcctaacagtgtttaattaccttgctggggttgtcagtcaattgtgggttagatcctatattaatggccactgcatatttacagcagtatgttgggcaaattgttgatgattctacaattacgtgtataaaactagctggctctcttatgtaggatggttaagttcctctgttaatttgtgtggatcagttagttaagtttgaaaattccacacagatacagcaatgaactaaaactagctctcttatgtactaggatatataattaactaaaaccaggtagctaatattaactacctgcagctgttaatttgtatggatcagttagtgaagtttgaagcttccacactgatacagactgaaagatacagcaaaggactagaaaaagggttccaaattaagtactccattaatatatccacccatcaacagaaactgatcattcatacattatatgtacacatgcatgacgacgtctgctactactgcaatctcaatcaaattaaaggctaagatatataatttacctccaaacaatgcaacagcgctatacgacgtaccactataccctatacacaggtgcgcatgtttgcatgcacaatcaacgaaatctgcacaagctgatcgatggaatcgatcaccacgaaacaaatcagatcaaacaatcgaggtgaaaagaggttattaataataaacgctagctagctgcgctgcagaactgcagctagctagcagctgggagtgtgtgtaagctagctaagctagcactagcagcaccgacacctatggtggatcgtcacatcggcatcaggccgttgtaattgtagtgctcctcgagccctagctccatcagaccgcactgctcgccgccgtcgaccctcgatcccgccgccgacgccgacgccgccacggcgccgccgtcgagatgctggctgaagtcgaagatgctgctgtacagcgccatgctggtggtggggatgaactcgttgagggagccgccgccgccgccggtgacgggcatgtggtggtggtggtggtgatcgggaggcggcggtgggtggctgctgtagtggtggctgctgctgcaggcggcgagcgacgccgggaatggcgggggcgagtgatggccggcggcggctgggtcgtgagacgaggaggagttggagtagcatccacccgccttgatggccgcggcgctccgtgccatggcgatcaccgcctcctgctcgttctccatgctgtacgacgactccgtctccgtctccgccttcttcttgtagaacactctgcacaacacccaatcctcctgcatacacatatgcaaaattaaacacacaaactcaagctcttgattaaccaaaagttactactatactccttcaggttataacacgttttaactctaataaagtcaaactatttcaagtttaactaattttatagataaatatagtaatatttatgatactaaattagtttatcaaatcaataattgaattaattttcttaataaatttgtcatgggttaaaaatattattattttttctacaaacttggttaaacttaaaacagtttgactaaacaggtcttaccataacccgtgctggattttatttatttgaggatgaaaggagtaaggaaattattggagaaattagttggattgtgaggactaaccttgggaggggtgtgagggttttccatgcgaaattcgtgcatgacccagttggttttgacgccgttgggggcgcggccgcggtagaagacaagggtcttgcgcatgccgacgatggaggcgcggcggtgggcggcggcgtgcagcttggggttgtggatgacgcggtccttgccggtggccttccagtagccggacttggtggcgcggttcgtgcggagccccgtcgcgtacttgcggtcgcggaagctgaagaagtaccactcgttcgtgctcagcttcgccacatctgcatgcacaccataattaatttttcacatcacaactcgattaatctagactaatctgagatcaaccgtaatatattcagtatgtggtataatactagctacttgattaattgttcgatatgattctgattaaacttgttcctgcagttttgtaaagaaataccgttaattattcagaaattttggaaagcagatcgatttgattgagggaaattaaacaaaccggttaatttaatctttttcaatattatgtatatttttattgttctcagtttttttttttttgagaataggatgggccggcgcgcggggaaattaaggagagtttatgcacacatatagtagtatgtcctgaagaaaatgttgatatggaatgaaataagttaaattttaaacatgtataaaaattgatgggaaatttgatcgtaatcgtaagagacaaagagaacaagctatagctagagcttagatagcccacttgcagtcataaagaaataaattatagatataggtatatgtatgcttgcaccagaagcaatatataacacactgttgcacatacgcgcacagagatatacgtgatggatcgacccgtgccttgttggttaattaacaagggggaagaataacgacaatcctaattggagccaataaagcgtggttgcgtgcgtaattaatcattccatggaaacggaggaaccatctacgatttaattaaccataatcatgcagaagaggggagagagagggcgcgtggctaagagcaggtacaatagcaagctataagccagctataaacatattttaaaaagataaaggaagagagagaagagcaggagactataggtatatagtcagctgtagcacggactctaagacgtaatatgtgtatgacaggtaggaccaggtattaatagtacagtaagcaactattgtatgaattgactattacattagctataaatgatttggagctagtgagagggtcgcttgtgggagaggaaaaaggagtagtaattaattaattaattttgattgagtaagtgattacctggtagctcccacggctcgtgggtgtggaggtccacctcgaccatggtgccgccgccggcggcggcggctcctccaactccggcgaagcgatgctggttcaccaccttgttatgaaggtagtggcagacaagctcctcgtcgctcgggtagaaccggaaccccggaggcagcgtcagctcgatgtccctcaaccccatgtggctatcacctgctaaatttctttgatgatctctctgtctatagcaatctagctatatctatatgtgattgatctctgtggagtattttggaagtggtagctagctatatgtacatagctaagaattaagctgcagattgatgcagagaagaagaagaggaggagagaaattgataggtaggaacttggaagtagctagcacatatatctgtataggttggcgattgtgtgagctcgggaagaaggcaggaggcaaatatatatagcttggcgagggaataattatatgcgcagctagcagctgagagagagaagtgtagggaagcaagcaacaaagcagcagcaggagcaaagggtactactatactatggctagcaatagcaatagctatagctccgatctctatctctgtgtgtagtacgtcggtatgtaagtatcatgtatatggcagtgagcaatcgatcaatcggtcgagagctctatctgcagtaatactgttgcgcctgctgcttgctagctgctgcaagcaggagatggcgctgtcacgtacgcagcgcgcgggaggaggcggaggacgcgggagaggacgcgtgcgcggacgacgtcgcattcactgacgacctctctctctctctctctggagagaagaggaggaggagggcaggtggggttggggaggaagaggaatcaaggaagaagaaggacagagagagagagagagagaggagatccagggtcgcaagaaagatcatcgccacggccggcccacttgatgatggacgatcgatatgtacatatcccccaagtgcagcgacaacggcaacatacatggcactatcaatagagacgcatttggggaaaaaacgcgagctcgatcgatctctagctgcccattatcattgtgtttgtgtgcatatcaattcaaccgcgtgcaagatcggggagccatcgtttcggttattcgtggtacaagtaaaacggcatatttgtaaatgaaaaataatttttaaataaaatttttataatattcttagcgatcaaaaatcaaaggctaaaaaataaactttgataaaaaaaacctcaaaaccagatccaaatttaagattaaaaatttaaattttgactgacaagtataagcgaaaagatgaggacatacgtatatgacacagcttagctaggcttaattattgatccgtcctacgtacagcatctcctcctcgatcccggcctctagtatgcatctctacatgtctctctgtctgtctatgctctaagcttgttaaatttgcttacaagtaagtgcatctatgtgtgtgtactgtgtttgtacagtgcaggtacatacatgggtacacagtgtactgtataggacggtgattaattatgcaaaatgcaagccaacaaaaatatcgagacggaggataaaacaaggatcagcgcccctgaatatatcaatccgcctacacttgctagcttgcgtatactgtacattcagagaagttatcgagcatgttgatcaaagaaatatcatggataacaagtctaggtattaaacctgtgtgtgcgtgtcgtcttccgtgtaattgaaaagagaaattaacggcacgattaataaggtagtctacatccacatacaacttgcgaaccgcctatgtaggtgtatggctaaataaaatggttcaaactaacataagagaccacatcagttacaacttgataattattaatttcagaattcggagttgttataatagtaaaatcgagagatcaagacgaatacaatcacatattaagtaatgaaaaccatttcgctggactaccccctcaaattatttctttctttctaaaaccccttcaaactatttcagcggagcacttagcccctcaaaaaaaatctcattcgcaccgccaaaccatcaaaaatgtttcactttacttcctaacatatttctcttttctttctccctatataagtcgtattttgtaaataaaaaaatgttaggatgatgaccgatgtattgcaacttacgtctcaatatattttttatttttatcactgttttcatagggctgaagcacctaaggctgatttaagcatcaagattctaaaaccaagcaaacaatcatgaagaaaattaaaaatacttttgaactttcatagtggtgttatctatggcactataaaattgcaacttaaaatataacttatataaaaataaaaaaaagagaaatgttattagggagtaaagtgaaccagtttagtagtttaggccaaatatgagaaaaaatattttttcagggagggattaaacgatccataaaatagttcgagcttgtaaaatagaattatttgtttgtttgttttaaattttaaagatattaaaccattaaaataggaataataaattttggactacgactacaaactaaatacaactttgtatttattaattcgaatttcaagattatttggaaaaaaagaagcaaatttaacatgtatatgcaaacaaatgtcccgtgcattctcaacttgtggagattattactagctaacagtacgtgcatcttaagcaaggtatacgtatcttagcttgattaccgataattagcagggagagaggctgtcaggaactagctgcaggtaatcaccgtacgctgcttcaccgcttgatcgatcgatcatgcattttgatgcgaatttaatcatgagagaatcggaaattatttcttctactccaagaccagaaagcgacgagagagatgattatattaaacaaacggtagaggtagtacaggcatgtcgaaagaaaaggaacgacggagataatgtcagaaataatgtctgttcagcctgcatcgatctctgtacttctctgtagtctgtacactgtactgccgattaaattgaatcagatgataatgatatcacgacggcaaaacgttctctaattgaagtagtagcagtgcataatgtacaggtgtattgttgatgatcaattcaagttcttcatcatcatcaatcgagaaatgcgaggtacaatcattgtgtacatgtataataatactttatacgtatatttgccgtgtttgtcgtgtgctctctggcgtataaaaactgacgaactcctgcagtagtactgtacgtgtgtgtgtcattagggcacatgcgtatatacgcagctagagctatatatacgttacatattaattaattatagctaagtacctattccaaaacagtgggatgcgacttatgcgacggaataaaaggaggatatgtacagtacgtgtacaagtacagtacgtgtaattttttttgagatgaaaaaaagtacagtacgggtattcgtgatcagtatatatcaaaagtacatgtaccatatgctagctgcgtcgtacatgcatatggttgttgcggcttaattatccaaaaattaattaagttattacatccctcccctgatcatcaattaataatctactcttctcattaataatctctatatagctaagtaccttgtgcagaaaaaatatccatctcgatctaggctatacacagcaagaataattaataaaagcggcatgtatgtttaattaattactatatacttgagtatgagtatgagcctatgcaaaagtatatatgttgggaattaaagtagacgatggtcggcgatagatttgatcgatgcaggactacaggtaggtaggcacaagcaaatacatgggcgatggtaaaaaaaaaagagagagagatatggatattgtttctgtgtgatatagcagtattctttgtgcgagttgcagttaactaaaatgattggcttagagataaatactccaggtcaggacaggattgatgagagcatgcatgcaatgcaatttcatggcagttggaggcaggatagataaactaacttggggagatgattgagtgacgtcatgcaattaacaccaaggaacagggcataggacggaattaaaaaagaggcgatcattggctttaaaaaacgtgggaattaatcgtggggaatttttcgcgaacgctgaataatcatggggaataattagcattaactgcttgaattgatcaccctgatgtgtatgtatgtatgtatacgtatagtactccctccgtcctaaatgtttgattccatttactttttaaacatatttgattgttcatcttatttaaaaaatttaagtaattattaattctttttcctatcatttgatttattgttaaatatatttttatgtatacatatagttttgcatattttataaaagtttttgaataaaatgaacagtcaaatatattttaaaaaattaacggtgttaaatatttagaaaatgatggagtatatattaactgaggacgagatggatgctgcgcttaagccggcgactcgatctggaaggtgtccaatcccaatcacccaatgacagcgatacctctgcagctgggacctagaacaagctaacctagccagagtatttagctgctacaagctgctcctcccgtttcatattataaatcatttaaatcttttactaatcaattttttaaaaaaattaattaaatttataaaaaatataatagcattttcaacacaaaataaatatattatcgaaatatatttaatgttaggtatagtgaaactaatttaatattttagatattgctaaattttataaacttagtcaaatttaataaaatttgactataaaaatattaaacaacttataatataaaacaaaacggagggattactaattaacgggagctaggatattacatagtagatttagctcagaaaagattagccaggagggaacaccgattcagacatctcctgcttagctgctggtactggctagctaactggactttttctattttcttcagagcctgaaatcgttggcatcttactccaaaagggcagtggaaaagagaaaagaacaagaccggtaaagtactacataaagtacttgctactacatattctgacttgttatgaatgatgcaaacaggagattaaaatcccaatttgttaagctatggctgatgatgagtcgtagcgaaatgaaagaagcaaccaaaaataatttataaataaatctcttatatctatactattcatggcttaaaaataaggctgaaaaaaagatgctactacggtgaaaaaaaatcataacataacttttaaaattaaattttgtttgtggctgataagccagcaaacagacgatgcatgagatctgtttgcagtgcagtgtgcacgacggacatatgtctgagaaaattaaaactgattagcagcagctagatattgtcgcacaagtgcagcagagtcgaaaatccagcaagaaaggtatggttcaggcagggagagaatcagagaatcgatctggtccagaaacagtctcagtgaccatgctgcatggatgtagctacatgtctgaggaacaagtcagtcatggggtgccatcgagtgcacgcggaaaagcaaacgcggcatccagtggagatggagagcattagagcactgtgcagtgcttatgtggagtgctagcttgtgtaatccaaactttccaaagtgtcaatcaggtctacagaaatgttaattatgctttgttcgttgtcaatgcacagtacattaccatcccattatcggataaaaacacacagtatattatccatttcttgatagtactaattgattgatcctgctgcagcttgctatcaaggattcagtgaaaagctcctgtccaaatgtttggtggtagagttgttcttgtacaggtaaaaggtgctggaaaaaaggaacagtcaagattgtgatttattttctcaccaacaattcatgagtttccacttaagtaggccctatatataatgccaagatatgcatatataaatgaattgtttatgctacttctggaggcatcttaaatttgtgagttgatcccctgtccttctctgaacagaaacagagaaaagacagacgacgttgtgatcgtttctgctcttaatcggaagccaatggaggagatagggatccctaattaagaatactactgccacaacacaactaaaaagcataaccacatttgcttagttattaattactactaataagcttcttaaatggaactggcccttatccctttctctagaaaagaatataacggacacaatcatcatgagctgatggcattctgtacatatttttataattattcagagatttcttttttgtccctgctggagtttttctagggttgtttataggaagagtgacggctccatactccatttcttccaccaattccttcctactaatcagactcaacactaacagtgccctttttcaaatcctaagaaagcgacagaaaccaaaagagcacccccaaaattctcgcttttaaactagttttctctcgagtagtagtatatctcaaagtctacatgaacattccattgaagcattgactcacggaattaaaacatgtaattgcaactagtattatattgtcatgagggcagggttaaggctaaagcaaagtacgtacgcatgcaaccgaagctgcatatgtaatctgccatcaatttgcacattaagaacaaaataaaaacactaccctccatatctctcaactctagctgcttggatgatgttgaatacagtatatatgtttgtacgtagggagtatatatggaagtaagtaactgtaggaacctaattaatactgtaacattatacagacagcgacagactgacagtgtcggattaatcaagttggctagctattgcagtgcagcatctaccagcctgatgcttggtttttggctgcgtactgaaaatttatgcgagatcaagagctcaatcaagctttcctccccaagaaagaaaaagcttcgcttatccttcctctgtctcttttccttgctaccattaggatccaaattacacgaaatcatcaaatgtcccatcgatggtatatgcatgatgtgcaaaacggccatgcatatattttttttttctatgtgcagtgcttgcattgggctcctctgatctccaagaggaattatgcaacacaaaaaacatatatgtactgtggtgatattgagtgggctgtgtgtctccatttcaggaatggcctgtgcactatgcatggacagcattagttatgcttaatcgttgagtcattttcaacgtcgcatatacaccctcctaagctagcccagctctctgaaggccagccaactgctgcatgaaccatgcatccactgcatgttgaggtaggttaatttcattttgttcaggaattaatgaaagcaaatatatatctgtataacaagtagtcagtctgatctttcaggaggtagtagtagtaactaaggctgtgtttagttccagcggtgaaaagttttggcgtgtcacattggatatacggacacacatttaaagtattaaatatagactaataacaaaacaaattatagattccgcctgtaaactgcgagacgaatttattaaacctaattaattcatcattagcaaaatgtttactgtagcaccacattgtcagatcataaagtaattaggcttaaaatatttgtctcgtaaattagtcgtaatctgtgcaattatttattttttaacttatatttaatacttcatgcatatattgaaacattcgatgtgacatagcgaaaatttttatcaggagatgtaaacagaccctaagttaacctgagaggtttaaacttgtgccatctgccatggatgcagaagtagcaagaggagacgaggacgcggccgggcggggagcagaggcggtggtgaaggagaggtcggaggaggcgtgcggcgaggccgtgtggcaggcagccgcaatgattgatacgactcgtcgtcagcaaatattccctcctagacagcgacctcgtactatactacactttgcagcaaggcacgcgtcctaatgttaacccgtatgcatgcatacagattagcacgcttaattagagcaaggataatgtgagctactccctccgtctaaaaaaactcaatctcaaataatgtgacccctcctaaaacaacaaatctagataaaagatagttatactaggagcggtcaaatcctctcctagattgagttttttttttggaacggagggagtataaacctactgtaagctacttcctccgtttcatattataagactttctagcattatcaacattcatatatatgttaatgaatctagacatatatgtatgtctagattcattaatatctatatgaatgtgggtaatgctagaaagtcttataacctgaaacggaggtagtagcttacgtggaggagaggtgtaaaaaaattaaggatgttagctctcatacaagagctagcttaatataagcttgaagacaaatatatcaaatgtataagtaagagatagaaagaggagaaaaaaaattatagcaaaccttatagctaatctctattatatatgttagctttaagataaactaatgaactctactattattcttgctcttaatattttctctattataaaataagtgcaccataaataagtgcatccgtatattttaaatttgaactacatttaagtcagagagagtattattactagccaattaccattgtgactacgtttaccgtggtatttattggtagcattttattatccgtatatatattattaggataaataacctttaattgttaatgtatgagttagtatatgatagaaaattaaagttacttctctatggtactgtggcagtataaatagaggagtgaatttaaactctcgacgggggcatttcctctttatttatatgtcatttaaatagttataagataatttgaaaagatgaattaatatgtgatagatcacttcacaaacatgcaagttaaaaatgtaagttgagaaaaaaaatatagctagctaacatatattcacagtcaaattcatttttttattacatgtttgtgaagtgatatattacatattaatctatctagttgatttgttttctaaataaattataagcatttagattacatgcaaataacaagagaaatattctcttgaaagtttagaatagtaaacgtatattgaattaaattaggaaagatgaattgtactacaactcatcatcgcacatgttatatacgtatacgtatatgccgagtagtggatacgaggcagagagagggtagagcgtatcgcatacacatacagagatacagggaggtggtggcatatgcatgggggtgggggggtgggtagcttgacggggtgggaaaacggttgtctgcaagtaagctccggtggatcatccgatcgttggatggcaccgcacatatggcatgcctagcttccaggcctggacactgacccctccacctgtccgcctcccattggtcgcctgcctcttccttgattcatttctcttcctattctctcatcgatcgatcgatcgatctcttcctcgtgaaaatcaaggctccttcgacatcgcctcgcgacaaacctcgcctccctatcacggccgatctatcagcacactaatccatcatgtagatttttattagtatcaattctgtttcagctaactcgtcagtctgtctgccaagccgcgcgtcgagcatgcacgcccccctgctttgcccatgatatattaatttaattaactaattaattggtattctatccgtcttgaaatataaaaatctagtattacacgagacatatcatagaaattctatcaagatttgcagaattagaatgtactccatatctcatttcttactccatattttcggataaaggtagtactatcagttaattaaaccttggatgcacgaggaataagttgatttgatcgatcttggtgaccctttttgccctgtattgaatgctaatttgctttcaagaaacccccaaaactgacgcggccgatcgatccatcgatcgatctcgccgccgaaaaggagggaaaggagaatgacaccaactgcaagagaagagattaaatgtggagaggttgacagcatctgatcccctccactaattagccagaccgcgagctgatcgatcgagcgagctcagtcacagcgatcgctccagcgacaaacgtgtgggggatttgatgcttccatctccgtcgatcgccctaaagctcaagatcgatccaaatccagctcctaattaagattaattagctatggatgttaagggagaaagagacgtccatggcgatcatccatcaccgacgcaatctcgatttcctatctatctatctaggtccagatccatctgcatgcccatgcggcactaacagtacaaaacagtatcattactgttaaactaatctttgcgataatccaaaacgaccactcttgggaaagagtcaagagctaagatagcagctagcctgcaagatcacacactggatcatgctccatccacagataccaacaaacggttcacgggtcgatccaaactgaacctgccattcgattcagagttcagaaaatggccaaaaggccttgctgtgtttctgatcacagattctaatatagatacagccaggtgcaagtgcaatgccgatggggatggaatcatcctcgccgatctgtccggcgaactgccggctcggcgttgcaaacggacatgctcgtcactgtggactgaatactgaactaatctctgaataatatgcggcggcagctgagcactcgatttcagaagggagggaaggggctgagacccaggtagatatatgcaggaaaaacggtaggtgaactaccctacaataatgccgacagcaactcgatctcgattcgattgatagatcgatcgatcacacagatggtagcacatcgatcaacagcgaatcaaggagaaaatgatgctctctctctctgtggtccagggacatctacttcagctctctattggccgataagaatcaaaaacgctatctttcagtttggtcggttcagtacctcccagtagaagcaactgctggttcagagctcgtggtgaaagtgaaatcgatgacatttggatgccagttttattttatttttttgaaagttcagtaattagcaagaaacacatatttgcatatccaattaagctacaaattcagcattgaattgctgcatctatgtcatatgtatacagagcccacaggttcagtagaaacgagttaccgatcacagaggaaaggaacaaggcaccagctgaccagcatctacacacaaatacacaatctcttccgagtgtaacagtggcgatgagtggaatgcaacaggtgtcaggcactcaggctatcagagtgcagcaagacgtaaagggtggatgcaagtggcccacttcaattttcatatatgtgctgaatgatttctaatccaaagtgttgcaggagatgtactgctagatggatactgtgaacagagaatatatttgaaagaacaggatagaccactgtttctgaaagttccttttcttcttgggaataatctgtttctgaaaattctgaaacttgctactgtatctgaggtggatgccacttaagcagccccactataattggtgtaaatgtcatgttaatgtagcagatgtatatgtatgtttgcacgaaaatgaccaagcatggacaaaagattataatatgtggaataatgtggaatgaagatatttacagttcagaggcttgccccaggatggtgtattgtcattgttggcaatgaagaagacaaatgacaaatcttctttgtttcatagatggtaatattctctcattttactgaaaattaagtttctccgtccttgatcaccaaggtgcagacaaactgaacatagaatgcaaccagatacctatctagcatcttctatatttgttttcgtcatgtctccatctacaggacccgaaatgatgaactggcatttttaaattgagaggagttacaatatggagtagtcaattagtgatcactatgatcggtatttctgaaataatacaaataagtataaaataaaactaatacacggtgcaacacaaaaagaagatactgtaaaaaagagagagaatttacaaatgcacacagaggcagcttggtagagtactagagtacactgaaatataaacttactgagggcaaatgtggggaaaggtaagcccaagaggcatgtggaccaggcgtggaaaaaaggcccatatggcccgtgatggaagcaagaagcccatatggtcggcttgcggatgaactgatcggcccgaggcccaacttgacccattataacattagtatacagtacaacgtgacaggccgtcacttgttttctcggcccaactctacattacatatacaaactctaacgccacaaaaataagtacaaaataaaggaataaatgatgtagaaaaatcagaaaagaaaagagaaaggcccatataaattcttcctagttgatggcttctcctgcaagcagcccggagtctagacgaaaacctcaaatacaaattcgaaatcctccccccatatgtttcgtgcttgccacgccaaaaaaaaaaaaaaaatcagcaacgagagagcgatcgcgcgttgcagcgtcgcctcagaagcacttgtcgccgtcgtcatcccccgccgcggccggcctcgccgccgcggaggggccgccgccgccgcctaccgacgacgacttggaccgccccgacgaggtgccccccgacgccctcgccttcctccgccgctgcttcggcgccgcccccgcggcggcttctccctcgcagttgttctcccccacctccgtcttcggcggccgccgcgacccctcgctgcctccgtcgcgccgctctttgccccgccccgcccgccgcggccgctccgcctggtccgctctgccgccgcctcctccttggttctcctccgcctcgccgccttccgtgccccccgccgttggcttgaactcgttcatctgcgaccagtgatcggagcagttagagacatgggagatggcgcgatcgggggggaggagcaaggcggcggcgatcacccagctgggcgcggtgacggaggcgttgtcccagccgatgtgcgcgacgtgcttcacgtccgtcgggttcccgatctgcatctccggctccttcacgctcggatctgcaagcaaccaaccccacaacaccagcgtgcgcgggcatgcgcgtgttcgtcagacaaggtacacaatctctcacaacgccatcccgtaatgcattttgattttcgttgtgtggatgaatgatgatgaattatcaatgtgtggcatgaacaatgttgaggtgaattggattggggaattggggaatagggattcgttagacttggaaattgatggtgttcgaggcgtaccgaaaatttgtgagatgtatcggaggcccttgagaaggcccttcatcttaaccggttccacaggcggctgcccgcccgcggtgctctgcgaggaatccaccacttatatgtttgtcctccaccccttgtcccttgatctagccttcacaagtaagcaataacattacaaatttttcgccgggccaatatcatttaaaaaacaaaagtaagaactaacaattctatgaaatgggatacaacctattgaccataagcttgattttacaaatatgaaataccaccgtgaacagagataaaaaaaacgagaaaagccatctgaatgtttcgtcaaaatacaatgttgataatgctataggtgttggggtgagatttacatctaccgaccacgtagcattgaaaacaaaacaactattgtggtctatcgtaatatgatttgctggaagatgaagattcagcaatgtatatatttgttcttttcaacattctgaagttcagtttctatttgacacacacaaatttgtggcgcctaattgaatcagactcacataccttgcaaagcagatttaagagggtgatgaagcatgatctaccgaatttcatcttctttatgacatcttcattgtgtctgcagcaattctcttcacctattgctgtttgatctatcacaatttagtggaattgcaatcccttccaaagctcaaacaggaacaagcatagattctctcttccaagttggagaaatggaagggcagaaagtttgttgcctcgatctatttatggttccctatttttggtctaggctccttttggttgaagttcattttgacatacagcagtttgtgaggccctggttttgcttaactggtctgcagcgcaaatggcggggatggacaactcagaacatgaaaaaggggtcatttagctaacaagccaatctgcctcttattttgacaatttccgatcatatcccatatcctttcgtaggtagttaacgaagcttgcattggagcttgagttcagcagcgcaaaatgatctaatacttgattcaatcagtatggagtgtccggtggaaaacaacggataaagtatcggtgcaaatgttttgatatatagtatgattatcgtaggtttcttagctttttcgatcaagactttcaagcggcctggtcatgtttcttaatgtagccaaattgttttgccacttccgtctctagtccactggaagctacaacaaagaaaatgaaaaataatcctttaaacaatatttacacacatggtcggaatccaacaagttgattttctttttcctaactcactgtattcttaagaaatagtgaacaaatttattgcagtgtcaagaacagtaggaaagaagaatcatgacgatgttattgcagcataattccaccgataccaaacatttcgtgatgtacctttacaggattggcgttcctttcttttgtagtattacaaagaaaatcaaagaattgtataatacacacacgtatcaaaaatggggaaaaattgcgatgtagctgcttctccagttcacaaaaagcccaatcgaatatcgtcacttaagatgtattaataaggatctgtaaatgctactatcatgcttttacctgcagtttaggaaagtagagagttattttagttttgactcctgactcctgagtgcgtctaaggccatataattatacaaatggattaacagaaatcttactgtggttaggtatctctcatgaatcttcagtgcccctctgcatgccttctttgcatccagacttccagtgatatcgtttaatatctgtttgcaggggacaagcacataaacaacataatcgtgtatagctttctacaatcatcatctcatgacacacacatggagagagagagagagagagagaccttcacgacatcgtctagaccttttgcatcagtcagtatctgcttgtttctagcctctatgacactagccacaatgaacacagatagaggtatctgctcttcctttttagccgcctgtaagtttttctgttcgaattttccacactgctttaaggcattttcatcttttgtgtttgcttgagatgtactgttatcactctccaacatagaaaagagacctggattgtactccatagaccacatgagctgcaacatttgtaaatcaaggaaacagccttataaaccttccacagtacaaatcaatacttgattgtaagtagaaaccacattttgattatgctttattaggataatcatgagataataattgaaaagtcaagaaaattcttatggtgcagggaactaatcaacacacctaaaaggttaaattatgcgaccttgttgggaagcttacctcccaaaggtacattgtgtctacaaaagagaactcccttcggaaaagaaccatcagcatacggaaggcaaataagtattcccctccatcaagattttctgcaaaaataatcttttgatcatggaataaatcacgctacttatagttcaataattcagaaagaaaaggcattgttcctttggccattctaatgaacaatatttggctccaaacaactctacctaaatgctcatgtagcttcggatcaacggctttcattacggatgacaatatggtcagttgagatcgaactccaatggaggttgaactactcacgaaatttcctcgctgcagagttagcatgtacaatatcaatctctcagtatctgtagaaaaattaacagagacagataacacatgcagcaaaaccactataatcaatcttaggggtttttttcccatataatgttcattagttcatatcaatatcaattattgttttgataggccatgctaagttgcaaaaatatttccagaaaacggttctgcatattacagcgaccatattgaccttttaagtttactgtaacattactgcagttgtgcacaacttttaattaacatcatatatcggaagtataaattgtacccttagcagcggcggagtcaaggcccagccagccatggcaaatgcccaggctccgcctaagatgctgcagtagattagcaattcattaatcatgcaaagttagcatattttttaattaattaccttaatgaatgctagattagttgagaaaattagcaaagcatataattaaggctcacaccatcacatgtttgcagtctatcagccccatctttttgcttatgcttatgcttattagccaaaatttgaattttcaatcttaaatttagagttgattttgaggtttttttatcaaagtttatttttcagcctttgcttttgggtcgctaagagcacgtatattaaagttgtattcataaattatttttcgtttgtaaatatgttgtttggcttattcttataataagccaaacgatggagccctataggccatcacagcttatatactgcaactcgtactgttaattttacttgtgtcaatggtaaaatggtctgtagagttgtacaagttcattttcatttgtacagtactgccagtggcttgcccggggtcaataaaatttctagatccgccactgacccttagggtaaaggatctggatatttcttagtgaataaaaggctacatgtgtaaaggtgcttaccaccctgcgcataagtcgctcaaagcaccaaaacgcatccgcttcgtgttccaagaggatcgacattggtgagcaaagatcactcattcctgcttacaaacaagaggattttatgggggggaacagcaaaatttacataacatgacatttagcaagctaacatggttaagtgttccttttccttttactatgactggatttgcaaaaggatcagttttgcttctgtaacgcaccttgacaataaccgatgtccttgtcaacccatgaataaactgcaagaatgtcccacaacctggccaagttctcttggctctcataatagactagttgacgatctgtacgattaacatcaagacctatagttgaatagtggaataatcagaccaatgaaagtataaaaaaatataacaatatgtgcccagtgaactctctcttttttttaaaaaaaaacataaaacggattgagggatgctgaaaagagaggattagtactcaccaatctggtgcagagttagcttccattgaattacttcctttggtaggggtgtgtcactagcttgttgttctgcatcaactgagttaggatcctgtataggctggccatcttctgttatgacaggcatagtaattacccttccgctaccgactgccgtgtccatttctcggcactttgttttcagtttctcatattctaacctataaaaaattagaatgagatattagaatgaatatacatgatcaaacaataaaggtgcaattaagaatgaaccttcgctgttgtcttaattggctcttttgttcagtattgcttttagggtcataacaacccagcaaaaactcccaaacttctcctttgatatttgggtgggtaccctgtttagccaaccaaaataaacaaggccttagtgtgaggtcatgattcatgaatgcaggaagaaaatgaggaattcctgatgtcccatcatgtttggatcatctgtcaaccattgtctcattgacatacggacctaggcttgtgttgttagtgagaaggaatttttgcaaatatctatatattactaaattattaaaacaaggcaaatattagcctccacatttgcacttcatcaggctacaatttaccatgttaattggagaaaaataaatagttcatagttcacattgttgattgtgtaacagatccatattagtgtagattaaaatgaagagtcaacatcaatacaatgtaggataactgaaaatctcagaataataaaaaaaactagttatttgatttctaagcatataacagtataattctactttctgaaaaagtataatttagcctggcgctgtggtgcaatcacggcgtaaattcagctagttcggagcatgcaagggattaatcgaaaagtatagctcaccccacgctgcactcttttgatcattccagctatgtctaggacaccttcttcattgtgaagcagcttccatctccttggacttagagtgaggccaggctgccaaaaggaagaggaaacagcacacaacgagtcaatgcacttcataatcaaatacatggctggcactaatctcgctagtcagaatcctcgatgcttccgctcggcaaatcgatctgagacaacaaaattctaccttcaaactaaatgccctcatcatcttgcaagatcaatcgattggccatctgagcctaattcagctcatccaggtaacagtaacagttaagataaaaaaaaaggtaacagtaacagttgataattagatactagatccaatccagcgcaagatgggcactgtcaaaatggggacgggggcataggggacgcggaattagattaaaacggagaattagaaatggatagaatgaatcaattaccctgggcttgaatcgcgtcttggcggcgtcttcgcggcactcggggcggatggggtagaccgtgtccggatcgatgagcatgtccggatcgttgtagcagcacgccatgaacatcatcctgttcatcttgaccgcccaaatcgagccgcggccaaagaggcaggagggatcgagacgagaagacgccggccgctgctggtgatcagctggaaccacacggacgggggggcagtgcgcagtgaggacgaatcaagatttgttcttcactccctcctttcctctcctttcttccttcctttcctgatttgtttgatgatgtgccttctctgtgattgagatccttggccgtagagagagagagagagaggagagagaacggaaggtggtgtaacggctaaatttggggggtcgggaggagagagacggggagacnnnnnnnnnnnnnnnnnnnnnctgcttggtttgtatcagggcttcgtcgctgagatggacggtccgagcttgagctggtcgtatatttctctttcgaaactgatgagttttcttgattgttccgttttatataagcgttctaggacttgtttgttagtagttgccgtttctgttggctgattgagggaatgaactgttgaggatacactatttaaagatttttgttagattattcaattagtaaaccgttggttcgaagagaaaatcattagttagataatctggaattcttccgttaataatcgtaaacacgagtgcacaacaacttcttggatcttgggtttcggaatatctgctatctctctcctgacttggatagacgtgcgtgcttgcttgactaccgaacaatattcggttgaagttttccacaccaatctctgaatggatcgtccaacatgcaactaaggtcaatcaagcataaagaagcaatgtactagtaactgggggtcagtacgaaattgtcaatgcaagcttcaggaccgctaatcaggcccaatgtttatagtatgtactatcatatagtgtagtatcatatgataaaacccacagaaaaatgtcgctgctaactctatcgcaattgtttacctaatgcatgtgcaagccaagttctggcttagactggagatgctaaggctccaacctcccaaaaggccaaagaaacgaactgcatttcagcgagtaccaaacaaatcatgcacgtacatgcgcaagccaagttcttgtcttaaactttcgaagctaatagctcgcatgatataatgtcgcttaacgatgtgaagcaaccagatgccgacactggcacgatgttgaaaataggaaccccatcaggtgtgcaggaaccaacaccaccttcttcaagctcggcgaatgcctcagaaaatacacgggacatcacatccgcagtcactgggtgctctactgaatagtagaatcttaacatctgcagatttcagcccagagatgatggttagagttcgggaaaaggcagatgcaaaatgattacaggacagatacgtaccgttaggttgtcccaggaaaagccattatctatcagaatcttagcaagctggaatgcacaaaatctagccaaagctttcaaatgctcctccgagtggtatagttgttcagttgtagaacagattttcaatgcaatatcatttgtgactgaaacaacagcagagcaaattttcccaccgattgtgtgcacctggcagcatgaatcatccaggtcagagtattgtgcgctccaggcactaaaagcttcgcttgatgctggcaatgaccctccagcctcctgttctctggttgggactccatcatcattagtgggactggggacatacaatattggttttatctccacgtatgctctgaaaaaatgaggaaaagtctatcttaacttaagaagagcacttgacattgtggtgcttcaagtatgagagtccagacagcactaaagcatttctctgagaaatagaatgacggatatccttacccttttggaagatctgatgcaaatacatagagaatggtgggatatgatccggtatttgagcaatccaaactggtgatgtacgaactacgaagtgtatgttcaacttgttctttttcactggacgtcaagtgtgcagaacagtacaccagaaagtgtattgccgaagaaaaaatggagcaaccaaaggcattagcaacagcttcactgtttcgtaatgcgaattctagttcagccgttgggcccccaggacagagcttcatcgtagggggatcaagccccagctgaccagccatatagagaatctctccatgaagtgttgcctaagcaaaattcaaaaaactttaacactgagaatgtacaactgaggagaaaaaagaactggtagatttggctagcaactaatctacaggaaccttgcttatgaattctatgtagaatattgtatagaagcatacaactttcaacatacccatgacatataaccacatagtgcttctcttacctggctataaggtccgatgcaactaggagcccagcatgaaatgctttgtacatgtagaactctcttgacttgctcctttgtaactagaacttccacatatgcatggcctaaaccaacctgaactagtggcaattcaactgtactacgtgaaggaacacccagagggcatttttgttcagtaataaagctcacataaacttcattggccaatccaaattccttcatgcttgaaatgaagaggtgaacatacagaacattcatccaacctaacccttcttccttgagctgattctcgattctgctcaaaactgctactagatctgtcttcaggcctatagacataaggagatattaaatggacgtttcccacaaatgaagatgcaaaagaaaggagatattcctgtcaggcgggactatggtcaatttaatgttacacagaacaataaggcacaagagcatgcaccttctgaagtaccacagggatcctgaatccaacaaccaatggagaacaactttttgccagtctttgagatgcataggtctatatttgtgcaagcatcaacagttgtaactggactcaaggtctcttgtttcttttcgacatcactgtgtgcaatagctccatctacttcatacaaataactagaattctcttgggcaatagcactatcaccaacggtgccaaaagaatttggcttgtgttcaagatgaaattttaacgggtgaagaattcctactggagcgatggaatcaggcgagtggagtataacttcaaaatcatcaagaacaattcttgcattctgcagtacaagaaactcatcagttccatcttggtaacaaaatgcttctgctgcacatagcacataatagtagtataaattatgaaatgcttcagaaatctgataagcatgctcagaatatagtcaatagccaagttacagcgtttcattgaatgtgattcatgcttaaggactggtccacatgttcagacaagtggcatcagattattcacattcagctcttatctccttaaacttacacggaatagagggcagtcaagagttagtgtttcatattcgccaccttcaccacagacattgattccataactcctagtgggatatagaaaaacaaaaggagaaattacaagctgcacagatgcaagtgactagtattgaccattagtaagaaaatcatgagaacagacataaagagagcgatatgttgtgatatgtttcttggaaaccactccctcattgatcactacgagaagctaaggcctgggtcattaacccacaagttataacaggatacaaggtcttctaatacatgaaacctccaagaggaaaatggctaaatgggatctatgtaggcagtggggaacatactcattcagttggagcagatgacacttaagttcagccagttctttccctaagtgagcagaaggtttgagccccattgcggcaacctataaagtccaaacatcagatattccatgtgataaacagttaaatacatacttgcaaggaagttaaaaaaaattatgtaccaagagaacaaatgcatgagtgtgctgtatataccttgacgattatagctactatgccccttcttatctgcaaacattaataaccaaaacagaactagtaatttgagtaaacagtttctgatatgccagacaatatgcagaagaagaaaaaatgaaattgaagttaccatttcatcaagaagcaaagtctgatcctgcttccacaaatacgccagcgataccaggcccaaccttgagcagacactctcaacacgaagcctctgataatcagacgcaatggcgcctgaagacactgcagtgatggatgggatttgccttttaacctcgctcaagagcgcaaacatatcctccacttcatcgcctgtggtaacattatatttaagaccctgctccctacaagcaagtccaatcaatgaaattgcatcaaatttcatctagataagaacagtagcagcatataacaacaataaagacaatccctgcacagatgccttgccttgaggatccacggatgcgcctccggaacagaggcaagcccatgcatttcgcataactcacgacaatctggtgcccaacctgaagcctccagccacatcaacaataggcatagcaatcagcgaatttgacagaataccagcaacgaatggccacagcccagcgctagaagcagctgctaatcagctaacgatgagtgaagagaggagtgcatacagtttgatacatgtagctgtcgagctcgtcgacggcgtcatcttcggggatgaggttggccagcgcaacaatctgcaagcattagcatgtcaatgaaaaacggatgatagaatagaactgggtgattgggttgcgctgcggttcgttgccttgccttgtggccatagtccaggcatcgcatcatggcgaagcagctgtccttgccgccgctgacgagcgccaccacctccatctccgccgccgccgcctcgcacctcctagggttggagctcgttttgttcaatttcttcttccggtcaaaacgctactggattccccccttcttcttcttctcctactggatttggggcggagcgaggtttgtgtaggcggctgcgcgcggcggagcaggacggagcagggcgcggcggacggtgcggcgagtccacggcggcggcgcggtgtgtggactgtggaggaggcgtgaagcgtgaggtggtgcgagctcgaggctaccgaggcccagagaccgagcccaatgttttggaaaattttgtggcccatcagaagatttaccggcccacgtaagtgcgttcttggagcccaggccaaaaatatttcctcattaactccggaaaaagaatgttaacacaaacagaaagatgtgtgaactacaaacttcatcataacgcttacacaagaaggaaggtgtgccaactttctttgccataaccaccgacaagccacgttgccgcaacaatgagactgggagctttgcacaggggagatcctttttatcaacttctgttgaataagcaaatccagagttgaataagaagggggggatacacgaatacttgtctctcaggaaaagttgccaagtccagggggggtaaggtaaagaaacataaatatgttgaatcttgaccacctctaaattaatcatcacaaagctaggacttggccctaacgcaacagcgaacacacacaacaaaaacaaattattgctatctatgaagcaatgatacaacagggccggagcaccatgaaattatgggatgctcctggtgaactgttgacaaataggtgataatcctgtcatttacagagtcgcaaacagcgtttcttcctttctctttccgttgtggagattcctctttctcttgccatattatttcctcttaccgccaccaagggacagcagctccaggctgcggtggagaggctcgtcgcgggaccctcttgcaacggctgctcgtgagagagaagtggcccttgtctctccaaccgatggattaaccctctgcgtgctggaaggacggcttccactgcttgagaacaacctgcttgtccggctgtattgctgctccattggttccaccgatgaacctggcctgctgcttgacgcaaccgctctccttgatgcactgcctgtacgggaggatgtacggggtctttccacggtcctttcgccggaccggtcggtgctatgcatctgagaaggtgaaccatttcatgatcgtcaaattacacgtaggagagatacacaaggggaagacattatacagcataggaactggactcctatctcaagttcatgcggggacggattcaacttacgatttcctttagtgacattgacggccgttgtgcataattgtcactctgattcaaagaaccagtaggattccttctgccagatgcttcacctgcttaaaataagatgttcttacgggctgtattgtttgtattatagttttgttaggcgtctttcatgggtggaagaacagacctggggccttttccatcttctccatagaaggtcccgcagctccactggttctttcacttggctgaatcaacaagaagaacaaagtcaaatcaagtgtatcaaacaggagagcattgtccaataattataacagcagaatgcataccctcatcagtggtttggagcctatctggggatatttcaaaatggtccagtcaaatacataatcaaattgatatcctgtatcaatgatgccattagaaatgtgcagaacttatcctcagtttaaaaaaaacactgagggaagatggaaagaagtacaatttatgatcatgaggtaaggatttatgtttaagagaacataccctcccggataaagagatcacggaatagcctctttaagtaagaataatctggcttgtcttcaaacctcaatgaacggcagtagtggaagtaagaaatgaattctgatgggtaagatttgcaaagaacctagctcaaaaaacaatataaaagtgtcagtttgatgcagtttgatctttgaaaaaaacaagagcagataccaaaagtatatatcatgaattacctccacaggagtaagcatctttttctcacttattttgtcgtacttctgcttcttagtgcctgctttcagcccctgccatggtaggctgttggaagttgaatgatagcaaatatttagcattgtttacagaaaatgatgtcaaaaacattacaagaaaaccagatgtctgcaatgctgaatatcacaaaccaacctgcctctaaggaagtacataaggacataaccaagagattctagatcatctcttctgctttgctctgtatgaacataaaacttaaattaggcaaaagctcttatcaaatgtactccatcagctagaagacacagtaaactcaccaacaccaagatgggtattgacacttgcataccgagctgttccagtgaggttcttgttctctctgcataatgaacatgacatcaacataaaaaaggtgaaaagagaagtgcattgagatatttgccaatgtccttataacattatacaattttgtgctggataacaaataaaacaacagcatatgcagtaggcataggcgtaatttaaagttgtacaccaacctgtatgggatgtgcttgtgagtctgaaggtccctatatttcttcgcaagcccataatctattatatatacctgaaacaaggtcaaaaatagtcaaaattaactggattcaagatttgctaaccaaatcttgtttctttctatcccacaagttatctacaattattattaacagaccacagttgtattttaactaaattcaccagatatcagagcattaatttagggcctgttcactttgatgccaaaaaaaccttaccaaattt

SEQ ID NO: 10078 - DNA, 58158 bp, Oryza sativa
tttggtaggatttcttatatagttatcaaaatttggtagaaaactaaatgtagctacttttttggtaactttaccaaaatttggtaaggttgaaaatggcatcaaagtgaacaggcccttaaaacccaagccatatcattctactggaacatctttttggaccttcatagcaatgaagagcaccaagttacgaaaaatttaaggcgttagggcaccactgtatcaaatggaataccatgaaactattgatgtggttaaacatgcagaaacacaaaatggtaatagccaggtaggaacgcaaacctgattggctttcctaccaagccccataaggaaattatcaggcttgatatcacggtgaagaaatcccttctgatgcatgtactcaactcgattgatctggataacgaacaaatggtgttacgtcaggaatctatatagggcaagatacagataccagtttgattctacaacgattaacaaattagaatatatggattgaggaaatttgaaaataaagcatcagtgtcctcaccatctgatcagcaagcatgaggacagtctttaacgagaatttcctactgcaatagttgaataggtcctcaaggcttggcccaagaagatcgatcaccatcacattgtactctccctccacgccaaaccacttcaagtgcggaataccagctttagccaagaaaaaaggaaggtcaactcaatcataacagtcatagaaggcgataacaaagtaacatttcaacaaaacggatacgctaacaggctctaggcgcaaacttacttcctccctgcagaagcatgtacagcttcgactcataatgaagctgtgggtgcttcgtcttaacattttcctgtgagaccaaagcaaacaggtcagcaacaccaatgtctgaaaggtttcactataaccaaattcccaatagtaccaaaatagtaccaaaggaccaacattcgacacaaacattttactacactgttcattcccatcccatgatctcacggtaaataagaaattttatcaaattattcttcccccaaagaaaaagaactcttctaggtgcatcgaaaatggaggacagaatccaataccaatttgacggcgacttcctctccagtctgcacattaacagctgcaaacaaaaaagaaaacatcaacaaagtgagcatcttccatttccaaacataataataacatgttcttcagaaaagataaacatgagaaagatatagactactgaccaaggaagagctccccgaaggatccactcccgatcttctttccaagcttgaacttgcccccgactacatgatccatctccttgctgctccgatggtctcaaccaaacgaatcaactgccccccccccccctttcccctctaatcccaccccgagatccaaacccgtcgaggcgagcggcgccgcgccgaggcgaatcgaatcgggattcgggcacgagggcctctaggacgccagatccaggcaaaccaccaagaaatccggtcgaccaaactcttccctccccccacaatcgaacgaataaaaaggcaaacaaagggaaaaaaataaaaaaaacgaatatgaacaaatcaaagaagaatcggcggattaacaggaggtgtgcggatccggagaaacggatacaaaaaggggatttctcctaataaaattccctgcgccctctcggcgaattcgccgcgagaggtagagagagaggggaagcggcggaacaaaggggaggagagagagagagagagagagagagagagagggtggaggaggagaagacgaagacggagaccagcaagagaaaaagagtgaaggagaggggacgattagtaaatagacaccacccgattaaagaaactgattaactgggagcaggttgtttgtttttttttttcgtttttacaagtaattgacaggtgcggccatcttggtttgttgctcttttcttttccttcttcttttctctctttttctggcactttattgtttcttgtttgttatggtgatgggtgtagtacgcatatagtagcagcagtttgtttggtccccttttccttacaatgcctcaaaacaaaacaccaacaaattgtttagctttaaaagaaaggggagggtcaaaaatagttgcttcaaacaaggggagtatctttagttgtagacttgtagtagtggttgaacgtaccatgcttgttgtgctcttaaaacaaggaagtgatgtacacgttcggggcttttcgtggtaacaaaaactaatgcttgtgttccttctcattttgattatgatatatgggaaaaataagttcagaaacacgagttaatagcgtagcatcttgtgataattaccttcctttcaaaattatcttatgatgatttcgtgttatactaaatgatactgctttatataagtttatgacggagctaggagctaccgaggattttctatatggcctacaaaatatgttgttgtgtatatatcataatactaaggatggaattgagagtgcagtagcggtagcacaaacccgactcaaaaggataattgttctatgtttgtgacatagcaatttgtgatttgaattactatcttttgattgtagcattaaaaacattaaaagtatgggaatcttttttttacgaaacttatagagtattatacttgaactctatctattttgcacttttgataaaaggagtgcatttgtgtctctaaacaaatcaaaatcataatatcctactccttcgaatgccttgtacggtgagaattgaaactcgcgcgtgtaaatatgttatcatatgagtatttaggtggcttctaaaggtaggatagggcattcttaggataagggttgacgtgcgtatagatctcaaaatgggatacgacatgatctggttccacgtcatataatatttattctataactgttttgtttgactcgttttaattgctccgctaaacgacatcattccttttggttggttggatgttatgctcacggacattgtctttttttttccgcctatgccttcagtggttctggagtaggaccaatgtctagaaccctagcaccgagatagatggtggccatgtcataggcggatgaaaacatgtccttatagtgtcgaccttgtacatacgtaggcggataagccattttggtgacgacgatgcaatcacgagcatggtaaggactctctgtaattgatgaaactggcgatgagagtgctcatgtcaatgtatcaaggacgggatcagattttacgaatagtagagaaaaaattgtctaggggcaacaactcctaataaaatacaagaagttatggcatgattgattgtgatggaactcgccatatttgaagagtgaaactcatggcggagatgatggaccattttaatttagattactaagtgaattattgtctcggattatctacttgactatagagataaactaaatatttttttaaaaaataaatttgatagataatttaaaataggtgatctaaataaataatacagtagaagaaagttttttaaggaagcatattttccgaagcgtaaaataaataatccgatttataatatgaaatgaacatgatcaatgattgtgcacaattgtgtcttcatcttatggtatttgcaggatcattccattcctactacccaatctcaccacatcgttcaaaacaacaatatgccatcctcccatcacataataattttacagccaatctaaaaaaatataaaacctttcatttagttatgggcccggaaatctttctactatttactctgttttaaaatataattattttgagaatttaaactttgtaccaaaatatttagcatttatagaacattaaaatataagtatttcaaactaatcagaagcttgagaagagaatacaaaattcaaatttgaactaacgagacgattaaaaaatatttcttaaaacaacctaaatttttctattttaaaaggaagtagtaccacaaaggctgttcccaattcacatcgtgctgaaaaagaatcccacatcttttccacttcccataaacacaaaagttgagatagcttaggggcattttgcgtgcggataatgctaccgtccatcgagccctcgaccctgactagacaggaaaaccagccgaaatgacgtggccaataattaaagatggccaattttataaaaagcgacttgaaaaaggaaaaaaaataaaagagagagaagagggaggccaatgttgcaagtagcagagcagtgtatctttttttcccagcctttttaccggataaaacgctgtctcgtggtgggccccgctacggtaggtagaggccgacacgtcttggcccccccccccccccccctttccccccagcgactccgcacgggaataactacgcggatagcggcccatctcggccgttgatcctccgtgtccgacggctgagatagcgacaggttacggacgtggaggagcaaagctggcgcctgggtggagtacggctgatctgggccgtccatccgcctactggcctctttggaatggacggtgctgcgcgacagttgaccgctgacggacgcggcgatcgtatggcggagtacggcattttcacggttgcttcccttccatgccaaactcgttcttctcgtcgcctttttttttcttttttaccgaaacgaaacaagtcacacgccaacgattccaaacatattttcctcgtgacgctttgataaaaatatataatcagatactttgacatggagtaattaacaagcctcagttatcgatgcacaaatgaatctatccatcttctgaaaaaaaattcactaaacgtgggttacctggtccgacgaccagggaattgaagtttgaacttggaacaggtctgtgtaccacggagctcaaactccagaaatattaagtcccacgttggaattaggtaacttctgaactttatatagattcaatccttgcaaaatcccgtacggctcatgtactcgactcaagcaggcatcacgtattaatagtttcgagttaaccagcgaggggagaatgcatctatctgtacacgagcttagtacgtaagtacagggtcacagaaaattcagaaatgctggtgcatatgctggaattgtctgcacaggtttgattaccaacccagtgatgattatcactaatgagtcaatggtagacactactagacagcatggcctgagagcagttagctatacggggatcagacatgattgccaacataagcatgttgataaaagacaatgcctgcctactgactgcatagtgtccaaatgatcatctggaacacattacggattagattaacaaataagaatgtgcaaacctgagaacctggcaagtggcaagagaccgagcaatgggtcacagccagagataccgcatcctgtcatcctccacaagttgatgcttatcatgcggcttccttccaggagtgcacatgtaatgtaatgcaatactacatgcaaaggaaagcaacaattaaagcaatagctggtagccaaagttgaccagatagcaaaggagaaaaggttaccatacctgatcagctcgtacaagcctcctaagctgttttatatattcatataagcagtgaagttgctagtacttgagaagacaggtacacattactttctcgtgataaatggggccatttcttaatgtacatcaagcctttctaaagaatgacagggactgaattcatgtagtattagattatcagaaagaagtacagaaatgaacttgatgggtactcactgctcatcggcacaagggtaagttcgctttatttatatattaggtacaatgccgtagaaagggatgagaaacagaacagaaacaaattgtggaagtatgattaattagcaccagaataggtgtagaggtgggaacaatcatcaacggtagtaggccatgtggcgtgaagatcggaacggtgaagcatcaaatggagaggagcgcctgggctgggtctcaggacggggatgttctttcttagggagtttggtctcagatcgcagccatgactcgacaactgacagcaagtttttggcactctttagctcctcaacgtcagagtattttgctgattttctcaattcaccttcttggatgtatgcaatgtcagtagcccatgattccaatccatcaaatatatgagtggcatagacaatggttgcttctctctgcagtgccgaaaccttccatgttatgcaatgagaagcataacagacagaagagatagaaagaacaaaaactgtacctgttcacactcttccttaaagaagtcaaggagatccattctagtcacaacatcaagatcaacggtgatttcatcaagcaagagtacctgtattgatctcaggtgtcatagtttcatagcagtctttggcactacactaacacaaatttaaccatgagaatacctctagccaaacataaggtagtttttctatctttaaactaaaatgatgtgttgggtgaattctcagaatagtctaggcaataatgctattacccttttgggggcacaataccattatcatatcagggagcactcagcccagcaatgagccaataactatggcgtactacaaatgtatgatggagcactcaagagttattatgtctgtgagtcactcttagggtgctacatatgaaataaaagaaacaacagaaaactaggaacacggtatcaccttgtatggatgaagaagacccatgcagatttgtaccctgcggcgttgtccatctgagactttatgcatgcgccattgcagatcaatatctagtagatcaacaagcttctctcgcctaacaggatcaaccccatcaactgctcatgtttcagggtagagaaagaaaaggcatgcttacatctaccacaccagcatgaactgctaaaagcatttttactatagtaaggttgacttcattaattaagcttgactaaactgaataacaaatctaggagcagcatctatttaaacaaaaaaagaagaaagaaacatgcaagcagaaagttaactgaaagaaaggattgaaacctccagggttttcaaataattcaaggaccactgagtatgtgaggcacatcattgctttcatcccataagaacccaagaatgacaatgggatatgaggagcattattgtgcatacagtacctccaaaaatcatgtgttcagcagagaagtcgccttgcagaggaacgtcaccctgagaaagttacatgggtgttatatgcatataaattgcactgagaaaccaggcaaacgcaagaatgaattgtcaatgtgtagtctactattgtcatgccatttactgttatcaaactccacacatatgtaataaaaaaatcaattaagtaaacatgaatcttctaataattattttggacagcacataaaccatttcagagtcaaagacccctaaaatctaagaaagtaaaacagaatgaaccaaagttacaaataactattcagctaacattggtgaaaagtagggaatggcttccatgaatttcttggaaaaagcacgttagcaagaaatgcacttgtacaaacattgatcatgaagaaatataaatcaatgatgaactaatttctatttcttatagaaagtaaacagaaaggaaaacttacagctgaaccgatagcccgactccatgaaccacctaagtaggaaaggtcaccgttgcacacaagctgtgtgtcatgaaaagcagaaccattaagaacacggacaacatctcttcctccaaccatatgtttccccgcaagaatcttcaagagagtggtcttgcctgtggtttggcacaagttggtacattatataggtgtgcatgtgcatgatagattacagaagataagaacataacatgcctcaattacaggcactgtacatgattgtgcagtgattgatttaaaaaggagagaatttcttttgataaagagcacccttattcgcatttgcaagagcaatgtataggtgcctcacaactatcaatgacaacttgagtatataataaaaagtataactcgtttgaactccatttttccccctatcacctattcaccttagtatctacaagcattccattgagattgtgctttagctccaactttgctcaagcactagtgcagaacaaccttgccttgaagaaggctgaaacgtcagaatgcggaactccaaaacatcaagggtgacaccatacacaaattcatggtcattcaaattcgaaagggcacactagaaacccgtattgcaactagcaaacaaatacagtaatacacgcgaattgcttcaaaatacgaatagaggaaccatagatcaatctatatctaattctaatccaaacgacacgcggagtgaagatagcctatatattatagctaaagccaccaatccacgcgaatccatcagaagagctcgcccggagcatcgaatagtggaaatcgacgaaactacgtaggaaccacggctgatgggaggggttagggttaggcaaacaaaacctaacctgatccgttcgcgccgatgaggaggcatcgtgagccgggggcgatgcggagattgaaccgcgcgaagagcggcggctgcccgtcgtagtcgaactgcagtgcgctcacctcgatgccgctcctcctccacccttcgtcctcgccgccggccatctccgcagcctcgccgccggtgggtgatccgagcggagtttggtgggggaagtgggaactcttttcccttggctgtgtctccgccgcgtcagagcctccgtgcacttgtatcttctcattttctcacgcgactgcccaccaaacacgactactgggccttgggccgactccatccctgggccctggcccatttctcacttatgggcctgggagtaacaacgaacagctccacctaaattttcagttttgaatttacacaaactatgcacagtgtagttttttttagtgtaaactccaaatttctcatttttcgttagcacgttttttaaactgttaaatcagtggcggaccttctcttgtggcaagggatggcgccggccatacctacaaagtaggtagggtattcaagcatatgaccatctcagccttgatttcagatgctaattatatgattagttggctgtatttcatttggtacaagcttattcgtttagttaactggtggtaaagacctatagggggactgccttgtgtctgcacaaatgaatgaatagtctagctaaccacaaaatgttaatcggtaaaaatcgaatgctaaaaaatagatatgtaacttaagtgaatgtctacttataaataaacacacctaaaaaacaggaaaacactcgtagaaatgtggtttagtcataaaagttacacaacaaatttaacactcgtagaaatgtggtttagtcataaaagttacacaacaaatttaaggcttcagttgtaaaaacttcatgacaaatttaggattataatcatcgttaatggcatatattctaataagtacgaacatattatagtttgtgtataataaaatgttacatcatttttaaaataccacgcacttcgtccttgtgtgatgatccgccatagctaaattttagtgctgtatccgccactgtgttaaatgatgatgttttttataaaaagttttttttatcaaagtttattcgaaaaatcaaataaacatatttttaaagtttgtaataactaatactcaattattaatgaactaatggtttttcttgttttatatgtcattgaaaagctaaatcaagctgagattcaaacaggtctaaaatggtaatacagacatactcacatcctaatacaatgaatcgaatactgttaatagattatgtccagattcattgtactatgatgtatcacgtcgtagcacgattatgaatctaggaggggtaggactatgaatctggagtttttttttaagtacggagggagtaatatagaaatgtactagtgaccaagcaatagacagaacagcagcacagcagaagtaaacgaatcgaatcatattcatattcaccttgttggccacagacgcatgacccgcagtgtctagccacagccactcgtgtaacatggttacacttcagagtttaggtttgcagaaccagcctatagctagcaaatttacagacagaacagagccagactatagataaatgatgatacatcgttgccaccgttgaaatgccaccggcgacaaacctacgaaagatctaaccgatcttcttcaggttggaagagctcaagctctgagctcacggatgtagttagggctcattgggttgaccttcggcgagagggcggcgaggtgcacgtcgttcagtgccgaattgagcttgctctccagtgggctgaacggcatctgctccgtcgccggctgcttcttgacagcgcgcaagcaggctaggtagctgttcggctggttgttgcagcttggcagcttgcttatcggcacccctgcttccttctctctggacaccggtgcgccagaaggatcctgcaccaaatcagagatccccacatatttctccttatttgttttcactgacaagattcgatcctccaatgcaagatgtgatagtggatgaatgacattgcaaggaggaagaggtagcagagaacacttggatgaaagcatggcataggtagtagtagaggagctagatgacgtaccccgagaaggaggaaggtgaactgctgctgctgcttgctccctgcttcttcgaagtgatcctccaagagctttctcaggtcagaaagacacgagttgctcagcaatttcagaccttttatcagatggccggactcccatttgatgtagacttcaagcaggccgtcttgtccagaagcattgttctccttgttctcatcagctgcctccaaagcattgcatgatttcagctgctccgacacgggcaacttggcatcgtccacaacttggcagacgataggtgaaagctgcgaggatactggactgtcggtcactctgacgtcgcacattggaggttctatcgctccccatgctgaagggtccttgttctcatctccaaacactcgcttcgcaggctgctgcttgttctcatctccgaatgtttgcttcgcaggctcattgttctcatctccgaacgccttctttgctggtgactggaccttcttggctaattctcggtgattcccacaaagcctgaaaatgttctgaatccggttattccttgtggcagggtcttcaggctctgcaaggggctgttgcattacatagctctcttcgacaacttccttgcacacttcctcttcaacgccactgtctttatcttcttcttcatctccctcctcaaagacagtgctcaggaccaccttttctgggtacccagacagcctcacaacatcatcttcttgctccacagcgctggtgcaagagcctgcagtatttgcttggctccatatctggccctgcttgcgagtatcctccttgatcaccttcacgtcttgcgcagctggctgatctcccatatcaaaatcaatggacatatccattgacatggactgatccgccctagcggacatctctgacagacgtgccagcaatctacctccgatgatatcctgctgcacaggcttttcacgctcaacctccttcagccgctgttgcaaagcaaggagttcttgctgctgcctaagcattttctcttccatcttcatgagctcagtcctcaaactctgggtcttctccatgacctttgagttaatctcttcctcctttgcagctgctccctgaccttcaatcagcttgagcttcgccctgagctgtgcaagctcctcttcctttttccttagcacactctgggcctcattgcgctctttctcccttagcttgttctctttctggagattgtagatgaactgattcatcgcgacaattcttgaattgagcattgtagatgactcttcagagctcattttgtcccttggggttgcagcgtgggcagcacggataatgcacttcgctttagcaccatactccaatgtagaaactgtcttgtgcaattcctttgggtcaggacttgcacagagaatcatcaagatttttgatttgtcatcctcaaatgaatcctgaaaattcatggaagatcgtaggcattacgttagcagctttaattttacagtataaatttgtatcgaggaatgtgaaattttagaatcttgtacctgcaagagcattgtgagcttgctgtctcgaaatggaacatgggagtcaccattagcaatggactcaaccactcgtttcaaagccgtgttcccttggttaatctttgcagtctgttcaacagtaataataatgtaaacaaaatatgaacttctgttatcgaacacataacataatttgcaggaaaaaaagtactagtagctaatctttgcagtctgttcaacagtaatgatcatgtaaacaaactatgaacttaattatcaaacacatacaataagttgcagaaaaacaatataatagtagtacctaaagtacttaaaaacagcgtgactgtgataatatcactttatcattcaaaaaaagggagaaaaaaaacctacaatgtggtcactgctttgcagaccgttaactgttatgtttagatttttcattacacaacagtgttaattattcttctgtattaggtattcattgttgaaggggtaactttaaaaacgtcctgctgaaagtacaaaattatacaggcattagtgacatcacagacctgcattttggcttcaaatccagtttggcctgctgcttctatgttctcagaaccagccatatccacaagcatgagccttccccccaccgatggaacatccaaaattatctagagaagtaaagcgaagcttatcaatagcgagttcatttttgaaatgaagattccaggagctaacagctcaatacgagaacgcaagtgtgcaactaaccatgcagtggctccgggaactcctctcattacaaagcgtgctcttgacaatacgcctcttttccacttttgcaacttctcttgatatcttcccggcttcatttccagatatgtaggttgcattcttggctttcttccccattacttctagcctcgcctgcacataaagtaaggagtaaggactgagaaacttcaacaccatagaaaatttccaaagttacgcagttaaaactattaaaatcttctgtccatcatatgttcccgaaaatcatgttaaaacctatgataagtatgccaatccttggaacttacaagccatgagcttcctatttaagcttacagtaattatccactcaaaaaacaacctgtttcagctcacagtaagtatttcagcttccaatttcatattaccatttgtttatccctaaaatgctgcaatccgagcaccagaaaacaacttaattcagcttaaagtaattatccgctcctaaaaaaaatgtcagattcataactgacaagcaagattcactgaaaaggacagtgacagtaagaaagcagacaccacctgttaactttcaaacttcaacacacatctatcttaattaataacatttcctaagcactaggcatcatcacatatgaacccaattgcaaattgcagctgcattactaacagttaataatggcatgtggaaaattagtttcggtgtatcaccttgggggcgtttcctttagcattcgctccgctccccacgagcaaatcgtagatctcctcgttgtagatctcgagcacggcaacctgcacgaacagccccatcccgaacccggcgtcatcctcgccacggccatcgccttcacccccaccaccagagacacctccccctcctcctcctcctccttccagtatatcccggagagcgcggtacacgatcccgggctgcttggcgcagccgaacatggtgtggctcttcccggagcccgtggggccgtacaccatgacggtgcacttggcgcccacccgcaccccctcgatccgcgaccgcacgaagcggcggtagaacccctccagatcctcctcctcggagaccgagaccccgtcgagggtgaagtcgcggcacccgccggcgtcgccgcggacgcgcacggccgtgcccccgcccgcgatctccagcgccgacgcgccgcccgcccccgcggcgaggttccggatgcggccgatcacctccaccgggtgctccgtgccgcccgccgcggcgcccccgccgccgccgttcctgggcgtcatggccgggaagtggaggcggtgcttggatgcgggcgtcttgagcggggtcgtcatggccgcctgcggcgtcggcggcggccccggccggggagagggcgtcggcggcgccatctgcgagagagagagctcgctagggtttggagatgtgaactcggattcgatgcgagagaaagagagagagaattggagatcgagttgcgggtgaagagagagaggagaggagagggctgggacttgggaaggggaaggatttgaaagggaagtagccgttggagtcgtaacggtaagtgtgtttgttttgaagctggacgagagggagaccgcaccgcgccgtgtaccgcccgccgcgaaatcacgagattttcggtcgatgcaaaatgggggaaaccatgcatcaaaattgaattctgaaacaattttatatggtaacttttctttgtttccttcttaagaaaaatgctccctccatttcagattaagatgttttaactttggtcaaaattaaaatagtttgatcaactttgtagaaaaaaatagtaacaaatttattatgaaaatactatatttaattattgatttgatgaaacttatttagtattatcaacattattatatttgtctataaacttagtcaaagttgaaatgatttgactttgatcatacttaaaacgtcttataacctgaaacggtggaagtaatgtagaacgatatctcgttcggattgaatgatacctctaagatatcacctaggcacttgatttttgataggtatcagttgatacctgttcagataagatgatacttaccagatatcatacgatatttttaaggtatcatttcgttcaaacgggataacatcgtatagattttactcttttttttttgtccaacgtactatgtcggtctgatgcgaatatatagtattgtttggattctactatgcatttatgggtttagtttttttatttggtgatatcctttgtctgaacatagaatcgggtggtggtgcagcgaaactgtgcaaagataattaatttgtcttccgaaactgtgaaaaataaatcatatagtgatgttaatcaaagtgtttttttatttattactcctatctacttgtggagtagctttaaaatcatcttataaatactcgtattgggatcgagcgtcacccaagtagtactacagtaatttagccgatttttttataaattggtcatttttaaaaacttattttgaaactagtctctgcaaaaaactttaatcaaaaataggccatggactcagcgccatggacattggcgctaaactataatccgtggtgatatgaattcgctgagtcatcagatcttagcgccaaggtatttggcactgaggtccagacggtttaaataatcgcgcaagcaacatatagaaccaagaccgtgatagcgtggtggttggatgcttgggctgtcatccatagggtactaggatcgaatcctggtttccctcatgtattttacaaaataagttttgttctcttcactactcactctctttaataagttttgttctcttcactactcactctctttacaaaatgactgttccgtttgtaaatttgttttattttgaatttgatttgaaatttcagtttaagttctcatttgccatataatatagcactttaatatttttttaaattaaaaaaagtttcatattaaacatatattttgaagatagtattacaagacaaaaaaaagaaaataaataaataaagatagaaaaagaaaacgagataaaaaaaagaaaaaacatattaatactcactcttattctttacaaaatgactgttccgtttgtaaatttgttttattttgaatttgatttgaaatttcagtttaagttctcattttccatataatatagcactttaatattttttttcaaattcaaaaaaagttgcatattaaacatatattttgaagatagtattacaagaaaaaaaagaaaataaataaataaacatagaaaaagaaaacgagataaaaaaagaaaaaatatattaataaagagtgagggagagaagaaaaagggaaaactaaaaggaaaaaaaagaaaaagaaaacgagataaaaaaagaaaaaaatattaataatgagtgagggagagaagaaaaagggaaactataaggaagagtgagggagagaagaaaaagggaaaactaaaaggaaaaaaaagaaaaagaaaacgagataaaaaagaaaaaaatattaataatgagtgagggagagaagaaaaagggaaactaaaaggaaagaaaaaaaaagagagatgggagtcaaaccctgctcttcaaggatagagtagaactctactaccattatgctatcaatggggtgttactataaatgcctccgcatctatttaaatcgtctaaacctgagcgccaaataccttggcgctaagatctgatgactcagcgaattcatgtcacctcggattagagtttagcgccaacgatgttggcgctgatacgttatagcttagcgccaatgtccatggcgctgagtccgcggcctatttttgattgaagttttttgcagggactagtttcgaaataagtttttgaaaaggatcaatttgttaaaaagtatatacagtattttgtgttccattatcttcatttcacctggtacgatgtgggccccgaagtggcccatgagacggggaaatgtaacatccgtacttatgggctggcccaatacggacatattcgtatttccttttttttttcggggatattcgcttaggtcttgagccccgaacactagtcgaagttgggaagcatccaatgaggtatggaactataaaaaataaggtaaaatctaaacagagaggcctctctgtttagtctctgtttagtcttaataggagacggtatagaaagtctacgtacatagcagagaaagcctacacatctgtacgggagacaacagacaaatgcctacacatctatataaaatttctttttacccttcttataaaattttctctaaaattacttatccgatatacaatccgattacaccattgtattcattacaattaaatctttacaacaagatcttacatgattatattgcgacgaaaaaaatatttatgtttgtaaattacttttattatatatgtaagttacttttatcatatatataaattacttttagatttgactaagttacttcttatacattcataatgctctaaattgattatttgtattattgtttttagtaaattctgtaatttgtggactttaaatttaatttttcgatagaccatattttctttcctacaacgaatttacttctaatgttataacaatttacttgcattttatgctaagttacttttatgatttatgtaaattattatttctactatagagagagttagaagtacttctattacataactaaattaattctgttgcatataattacttctactacagaaacttatttctattgcatagctaagttacttctattgtatagctaagttacttctattgtataactaaatcacttctgcaatttaaatacattgcttttaaattaataaaatatttgaatatatatcaatatggatcttgtattgtcacatattttatgtagagcataatgacgcaaatagatactaaaaacaatacgtgatttaaaatatataagttattaaagagcttaaatcacatatatgacaaaagtaacttacatatataataaaagtaacttacaacatatatatatatatatatatatatatatatatatatatatatatatatatatatatatatgtatgtatattatcagaatataatcatgtaagattttgttgtaaagatttaattgcaacgaacacaacggtataatcggatcataaatcagataagtattttaagagaaacttctctaaaaagaaaaaaaaacatagatattgagtgtactggtagcttcttttggaaagaatagtgtctctctttagcactatcctgctagtactctcggtgtagttgtgtccaaaaaataaactttgttagcaagccagcggtaatgttgtgtttgtttgggactagaaacctcgttaacgcgtgatcaattaagtattagtaaaaaacttaaaaataaatcaatgtaaaatttaagcaacttttgtatgtattttaacagaaaacacaccgtttaatagtttggttaaaaatatttttttcttagagcaacttttttattttttttataaaaacataccccctccgtctcaaaatataagcatttttagctaaaaattgctatattttgggatggaggtagtacttattttgaaaaatatggaaaacaaaagaatataagttgtcccaacccctctccctcgttttccgcgcgcacgcttttaaaactgttaaacggtatattttttttgaaaaagtttctatatgaaagttgtttaaaaaattaaattaatccatttttgaaaaaaaataattaatgcttaattaatcacatgttaatggattgttatgttttccgtgaatagggtgagtagcgaacacacccttaatactgctctagggctgcacataatcgccacataagctgctattcggcgtcaaaagcgacataactttatcaatcctaattatcatcacacgataggtcactagcaaaactgacaggcatcaacctttccagacacacacagagtgacatagagatgctggcattatgctgcagtgtttaaattaagatgcttgctaaaattatcattaacttaggtcagacaactacacctcattgttatttgtttagtacagatgcatgcccatcgagctagctaaacaaaccatctgcttttggtcgctcacagttactatttgctgtcctaatcctttgctctagctaataagcagccgctgcaagaaaataattaagctgggctgcatgcatgcttatcatggagggaggagggagagatatcgctttgtgagaaggcaagatcacatgagctgagatgagaattgagaggagaagagagaagagagaagctgcagcttgcttgatcaggggaccaatcgccatggatgccattggggtccatgactccatggatgcacacacacactgtcagtctgtcaccgatcttatttatatgtgctagtggtagcctgttagctatgcatctttgctgctttgcccattctgaaatgagatctcagcaagccggccagcaacaagaatgcttctgtgcgtgaactgtaggacatctgaaactctcgatggatggattggatcaactgtcgctcgatcgacgagatttgtttctgcataggattatcctccatgaagctatcgcaggatatgatcagtgtagttagagactgtaacaacattattctgaatctttctacttgctgaatttagtagagagctgctcttcctcagcctcaagctagaagcgagttcagacttcagagcagtaaaattatactccctccgtctaaaaaaaagacaaaccctgggttttcatgtccaactttgactgtccgtcttatatgaaatttttttataattcatatttttattgttgttagatgataaaacatgataaatattttatgcgtgacttgtctttttaatttttttcatattttttttaaataagacggacggtcaaacgttggacacgaaaaccagggtttgtcttttttttttttgggacggagggagtatatctctttaattgtagaattatagcaaacagtgtactcgtacgtgatctggattggcacagtaacaacaagatttgagctagctaatggcgccatgtttcacagctgtgccctgcagccacgagagatcagggggcctacttgggctgagcagtagcgagatttgtcagagacagaagcatccgatctagtgtgaatctgcaggtacagagaacactgtgctgcccatatctctcaccaaccattagatttcctcctcctgcagccgttgcatatgcttgtgccttgccggctcagctgctctgctcatctcggtgaccaatggcgaattgtcgattaattgcctggttgatctgtatgtttgacacgaccattcagttctactatttgtcatcaagtagcagtaggctaattgcaattgcaaccaactaccgcgcaaacttgtctgcgtcaacacggcaccgaactgccaaacaacacaacaaccaatgacttttacaccgttttggtcagggcagggcagcctctcttattatgggttgattagttgcatggtctacagattaatcactgctagttactgtaaatactagtactcccttcgtttcaaaatatttgataccgatgactttttaatacgtgtttgaccattcatcttattcaaaaaatttaagtaattatttatttttttcatatcatttgatttattgttaaatatactttcatgtacacatatagttttacatatttcacaaattgttttgaataagatgaacggtcaaacatgtgctaaaaagtcaacggtgtcaaacattttgaaacggagggagtgctattgtactagcgatgatcacattagccaggttgctttatttggctgtgtcagtaataaagacaggagatataaaccgtttttatcaattattaagaggtgtttcatcagtcctaaaatgtaagaacctaacactggatgagatatttcctacccattcaaattcactgtactagaaaatgttccatccagtcctaggtttttatattttaggatggagagagtagtttgtttttttttctttttcttcttctttttctttcttcacgaggaggaggagatcgatcattagattcgatggatatatcgtagctaatgcgggtatggattattaaggatatttaaccgttacaaattcgtcctgcagctatatgccgtacgtgtgtcttggtcggccgtgtgtaaatctcacggaaaaggacgttgtcagggttgttcaacaaagctttaaagtgatgcaacgacaatgggcatagtgtcatccattgatgacattaatcttacacaagtggggtgttatgtcatggctcatggggaccttattcaagtttaaagagggaatagcaattaatggataagtgacattaatttagacaagtgaccagcattctttccctctttttagttatagccccccaatacaaaaatgcgtcccacatgtacacaatatcacagcactagctacactaactcataagttcaagtttctgattttcttttggtgccaggcaacgtgtgatatagtgacttcgttaatttcaagtctattagtctcaatcgttcgaagttgcttataagagcgcatatgcatacaattgataagggtgacgagcatatactggctccatcgtaaaatatagctatcagatgcgacatatcatgtattagttagataattcctccgttttagaatatagcaaattagaactagattaaacaccatataacacaatgtatctatgtgatgtccaatctagtttctggttactatattcctgagacggaggaagtatatttaagaaggatatagcaattgtttgcgtttgtattgcgtttagcgtagctcaactggttaggtttattgtggtggaactaacccacatgggcttaagtcataaacttgatacggatggtcgtattttactgttaattatttatttagtggtaggcgacgtaccccttgacagcgagacacccgtggtgtttcatacaagctttgaaattttggaattggttttgttgccggtggggaccggaattttagaaatttgtttgccgaaattatttgaaaatttgattgattttgaattaatttgaataaaacctgatcaaattaaaaaaaaattacaaaaaactgaaaatttcgggcaagatgtgagcttgccggggggggggggggggggtggggcgaagttaccaaaatttcagaaatttcgaaccgaaatttcaaaccctggtttcatcaattttaagatataccggcccagcctcgtggatatactcatagagacagggtatgcgtatgcgtatgcgtgtgttataagcaccaacgattgtactgtgtttctcaaaagaaaatcacacccgttacttacctaaccatttaaccaatgatgtttgcaccaagagaaaacatcatcaaccgcaacttacttagctcacaaaacaaactgtcctggcgaccatgaaatgatcacccgagcccatgacaccaccaaaccaaaccaaacccccccaagatcacccacacaaacacacagtggagggagggaaggaggcgccaatctagagcacacgcaggcaaagtctcgatacagcaggagggcgagacgcagacacagagagaggagaaaaaagaaaaatacagcgagacatcgcgcgaacaggaggaccacttcccccctccctcctctccagtctccctccgccgcgccgcgattcccctccctcccttctcccccccgcgccgtcgtcaccgccgccgcgggaggagggggcggatcccgaggccgacctcggcgagccagatctgggccacatgccgcccagctcggcctagatccgccctgacctagcgccgagcgacggggtgggggcatggaggacgcgtccaagtacgcgcacagcccggcccacctcgccgtggtgcggcgggaccacgcctcgctccgccgcctggtcgcggggctcccgcgcctcccgcgcgccggggaggtggccaccgaggaggagtccatcgccggcgaggccgtggccgacgcggtctccgccgccatcgaccgccgcgacgtgccgcggagggagaccccgctccacctcgccgtgcggctccgcgaccccgtcgccgccgacatcctcatgtccgccggcgccgactggtcgctccagaacgccgacgggtggtccgcgctccaggaggccgtctgcacgcgggaggacgccatcgccaccatcatcgcgcgccactaccagcccctcgcctgggccaagtggtgccgccgcctcccgcgcgtcctcgcctccatcaaccgcatccgagacttctacatggagatctccttccacttcgagtcctccgtcatacccttcatcggccgcatcgccccctccgacacttaccgcatttggaagcgtggagctgcgctgcgtgccgacatgacgcttgccggcttcgacggcttccgcatccagcgttcggaccagaccttcttgtttctcggggatggtgctcgtcctgaggatgctgggggcaaagagttgcacccaggttctctcatagtgctggctcataaggacaaggagatcacagatgcattggagggagcaggggtgcaaccaacggaggccgaggtcgcacatgaggtggcgttgatgtcaaagacgaacatgtatcgtcccgggatcgacgtgacgcaggcagagcttgtgcctcatttgaattggcgccggcaggagaggacggaagccgttggacattggaaagctaaggtttatgatatgttaaacgttctggtgactgtgaagtcaaggcgtgtgccgggggcgatgacagatgaggagctgtttgcgatggagggggaggagaagaatgggaggggcactgaacttgacgcggagctggatgaagtgttgacagccgaagagaggaaacagcttgattctgcgttgagaatggggaaccaggaagaagaatttgaggagaggtgcgaggaaggtgatggcggggctgatcatttggatgcaaatggcgtggcaaaagataagaagggatggtttggttggggtggcaagaaaggcaccaagaatgacgagaaaccatccaaggcgaatcaagggagtaaggatgaatcaggtgacctaggaaagggaaaggagaagaacagcagcaagaagaagaagggtgcatcatcaggggattctactaaacatgaaagtgaatacaagaaggggttaagaccagtgttgtggctgacaccagatttccctttgaagacggatgaactgatccctctgcttgatgtcttagcaaacaaagtgaaagctgtcagaaggcttagggaactcttgactactaaactgcctccaggcacatttccggtgaaggtaaccacctgccaacttgactatataatgtccacctatttcagcaattaactgaatttttgatatgccattcattttagtcaaaatttgcacgcttattcatttgcaacataaatggtgatatgattctatgtaactcaatcaacgactgtttgctgattgtatgagcaattattttgcactggtttctttgactgccagtgtttgttgtttgatccacctgctgtgtcatgcgtcgtaattcactccctagctgggacttgtgctgtctgccttgctgcttgtgcatagtactgtttgaacctggttatgacatgtgcttgaatatgaaattatgaatatgtgtttctttattgttggcgctgatgcgcggcttatggctatgcatgtggtttttttccctttagaccggacatattaatacaagatagttctgttcaagttctagaactagcacatcttatgtgtgtcctcccgggtaatcaatccctcgcactaacaaggcattatcataagatgtggtgcccgccatgtgcacaattcatatgattgatggatgttcgaataaccaaaccttttctattagttaccactactattggccacccatatggaataattagattccaataatagatattatatttgggtgtaaatgataaatgtgcagtgtacttgcaaaatatcattgactatttctaaggatttgatgcatgatggttgatgacattttttttccttgttgtattaaactttatatggacatggaacactatcgagttattgaatctagtacaaatatattgtatatttctatttgtctgtttgccatttcttttatgtggtgttaattaactttaaaagtagccagtgggtttctgctcccaccatcaatttaataatctcacagatttaagaaatgccaaaaaaatatatccattgaagctttcaaaactttcatatgtttatttcctattcatccactctatctcttcctctgtttgagtcttgattagctgggtcctactccaaaccaccataaaactgatgcccccctgtaccctactgaccttgtatccctaaatgcagttgatgatccatcgacatcttgtgaccactcttcctgtcaaatgttatttcatgtgtcatcttttctttggtgaatgctgcagtaatttttccattgcattattagactatttttaccgctttccatgttttgttgccatgctttattgtttctaaattggtacagatgtcttgtctcaatgtgcatagcaatctgaatcgtttcattttgttgtaacttttttggaatctcatcatttgttttgaatcttagttcttgttggataaggcattgtggtgccagtacaagacgtttgcactgcatcataattattatttcacatagtctcaaatttgaaatcagatctcttcttttaccaaaattaacatcactacagttacttcgaaaatgagattcacatgaattaatctatattttggaaaagatgatatctaactctctgtaacattgattttcagattgcgatacctattgttccaacaatacgagtcatcgtgacattcacaaagtttgaggaattacaacctttggatgagtttgctaccccaccctcaagcccaacgcaattccaggatgccaagggcaaagaatcagaaggatcaggctcatggtattcgtgggttagaggggggcgtggtgcacagtccagtgatagtggtgatagccgtaactggaaagatgaggttgatccattccaaataccttctgactacacctgggttgatgccaacgagaagaaacggaggatgaaggcaaagaaagccaagaacaggcggggctcaactcggaaacaatcatcgaaaagcacctcgtcggaaggaggtcacccgatgatggatggctttgaggagtaaaaaagtttcgccacatagcaggtcacctttcattcagagatgttagatgttgatgtcagctgtgctgcgcacctgacagcatagattgataatgtgctctggagaacgcgtagttgattggatctcctcgaggaagtacaggatggctatataccccgctaatctgtaattcaattctattttttgcccccttattttcttcttccagctggatgtatgtttgatgatcatgatgatacggccctgttgttgttaaagatgtgttttgtggggggctttttagctgtagcacttcccctcctgttgtacgaaaaccctcgaatctggcagtgattttctcgcaaagaggaagctcaatgcacatgcttgcttatgactgctgctgtccctcttctcttcgctttgtttccaaggaaactggacatcttatgcttgccagagacgttatcttgctttctgttggtacttaattagtacagctgctataacttgctgtagcttattgtgtttcaaagcagagtaattgtggtgctctcattgaggctaagcagatcatttacagtctgctgttgagagcgaaaccctgcgatgcagaaatgtacaaaactcatagttgatggattgaaaggatgttatatgattgtgaaagatcatgcagcttactgtcgatcagatgtcatcatttggtagcagtctctctcttcaaatgaggttattatggccacacacagtttgggattttgccggttggtaagctacgctatcagcttgagggcttgtttagagcgaatagttaaggggaaaacaaggttgaatgccagaattagaggtccaaccagctggattacgctgaaagagacgctacaatccttaccattagaccctgttttttttttcaacttcaaacttcctcattttctattagcatgtttttcaatatgttaaaatatacattcttaaacaattcctatatataaaagttattttaaaaactgaaaataactctattattcaagtttataataatctgtattaggtgcacttatattagtatattctactaggatatcctgtattatgtgcacttatattgggacgaagagaatattaataattaattaattatatgcttatgagatttactgttttgcgtgtgcttaaaattctccttcaatgggaggcaaacgaacgggcccttagaagctcatcacttgggccgagtcacgggccttagcccaacaagagaacagaactggtcggtcactgacaaagcgggccccacctaatgcggccccagcgcttttcggtgtacccatgccgcctgggcccacagccacagggcctcgcgctcgaaacatttcgaaatttgaaacgcttctcccggtcgtaaaattcccaaatcaaaccattccttccccaaaatctcgcaaaccatctccctctccctctcgtcttcccccagatccccccaaaccctaaccctaccatcgccatggcctcccgcatcaaggaccgcggcaaggccgcacccgccgccgcgggatcccgcccgctcacccccaaggccttctccgcctcgtcgtccgctcgccgcacccccgccgccgccgctgccgggaaggagaactcggcgtccaagccctccaagcccaccgccgcggtgcggtggtccacgtcgtcgatcccgagggccagcaggatcccgagctccgtggagtcctccaagctcgtctccaccctcagggcgtcctcggtgatgccggggagggcatctgtcgggaaggaaatggaggcggaggcgggcttgcggcggagcgtgagcggcgggatcagggccgctgccccggagagagcgaggaggtcggtgggtggcgttgggggtagggtcccggatgcgaggagagcaagcagcgtgcctcgtgctgatgagattggtaggaggagggatgggtttgatgctagggcgaaggcgagtgatgtgaccagtgggagaagagaaggctttgatggtaaggctaagcaaatgaatgcggttgataggaaaagagagagcttcgatgtaaaggcgaagcagatcagtgggaaaagagggagcttcgatgttaatgtgaccaagcaatgtgatgagatcaaaggggaaagagagggctttggcaccaacgcaaagaagcaatgcgatgggattgatggcgacaatgagggctttgatgtgaaggccaggctaggtgacgaaatcaataagaagaaagatggatttgatacgaaattggtgaaagagattcatcccaagaaagttatctctagtgtcactggttcggcagaagcttcttccaaacctgcaccttttcctgctactgagaaggatggtgacggaggcaacaatgctgtcatccctgtattcactgtccatgtggtggacgtggacgatgttccttgcagagccagggaagagcagaagaatactgatgagcctaagaagcaggaggaaaagagcaagctggcagacaagattagagtttttgagaaagcgtctgcaagtgggggatcagtgaaatctgtttctagtttgaacaagtacccaagcaagctgcatgagaaactagctgcattggaagggagagtccaaaagatagcgacagatatcaagaagaccaaagagatgctggatgagaataacccggatgagcctaagcagatattatctaatatccagaaggagattactgcaattgagaaggcaatttcccatgtcaaggatgataataagattcagctcggcactgcagataatagtgagtgtgagatctcttatgctaaaaaggctgcagagtgtgctgttacaaagccaagtgacccgaagcatgctgcaaaaggtatgaatactgatgaattagaggcgaggttctttccacatcataaattgttgagagactgcaaatcgtctagcgctactcaacaggaatcgtccatggctgtcaaaaaggattgtaacacagatatggaactttcttcccttgagcctcaagaagatgagaatagtatagccatggagtttctggcttccttagatggtgaagaaagcggcttcttcaagaaccgcagagcgaagaacttggaaaaaaccatcatctgtgaagcagcagatgttagcagcaagacatcgggccaaggttcctcaaataatccggtaggcccaaaccatgacaaagaaattgaattgcttgctacagagaagctagaagagtttgatgaacaggagaacaagtcctttttgattttacaggaggaaacagaggaattctctagtgatcagttattagggatagggaacaaatcctcaactggtggatggtttgtttcagagggggaagctgttcttcttgctcatggagatggtacctgttcttactatgatattgcaaaccgcgaggtacttgattcattactatgttttctttttgttcttttcataatttatgttaatacaacattttgaagttctgattgcattaaactgaaaatgacagttcaagtctgaatacaagcctccgagtgtgatctcaaataatatgtggggtgattgctggttgatccgtgccccgggtgttgacggatgctcaggaagatatgtagttgcggcatcagctggcaatgcactggaccctgggttttgcagctgggattactatagcagagaagcaaaagcatttcacattgaggagatatctcatgcttcttcagtaccatcgtccagaactgttcttgggcctcttcctaatgtaggttcatcaagatctagctctgcaatttctactgtagaaagacagcaatggtggtatagaccctgtgggcctctcctgctttctgctgctagtaagcaaaagatggtcacagcttatgacatccgagatggtgatgtagtgatgaaatgggaagtgagcaatcctgtacagggaatggaatattccagcccactacaatggcgtagcaggggcaaggttgtaattgctggtactgagtcgattgggttgtgggatgttaattcgcttaacccacaacccctgttatctgttgcttctgctggcaaaaagctttactgccttcatgtgaacaacactgatgcagagctgggcggaggagttcgtcaaaggtacgcctggaattattagcttgaatgccctttgtgtaccattggtaacactatactagatcctgtctggttgaacttggcttatgcttgcaaatgcaggattttttagttcatttaccaatagctgatttttttttgtcttgatcattgatgattctgaaacttggaaatgtaactaatctaaaggagatgtaagttctgttttgtgtgagctgacatgttttcaaagttaacttgtttatcgttctgttttgcagagttagttcctgtgaggtggagggaaatgatggtgtttttagcacacaagaaagtgttaatgtatttgactttcgtgtacctgctggcatcggtcttaaaatggcaagacatggtggtacagcaagttcaatcttctcacgtggtgactcggtattcattgggagcacagaaggtaggctgcaaataaaagggggtctgaaatcacgagttcagcaatattcactgagaaagggaaagcttgttgcaacctatgagctacctgatttcaatgcccacttccatcactcttcaataacccaagtatggggcaactccaaccttgtcttggctgcatgtggtatgggactatttgcatttgacgcctttaaggaggacggtcaacaaacttacagctttgaccgtggagccactcttggagtaagagaggctattggctttgatgatttgtactgccctacattcgattactcgtcatcaagggttcttcttgtctcaagagaccgtccagcacaatggaggtatctgtcatagctatctatttatcgtgtgcatcatgtgatcgacatgtaatatatttgtactatgtttatgctttagcttatttagtcatctgtagtgccaagcatcttgctttcactgtattagcagaaatgattgggtttcttccccttcagttaattaatatctattgcatgtttattttaccccattgtgttcttatttccttctctaacattgacatcttacttattttgtttatcggcaaattatttgaattcagtttgatgcaatggtgcatatgaattcatggaatattttttttggagggtgggcatccatctccagatacatacataacacaaccataaacaaaattaagatcttgttagcgaaatgacgcccaacaatcttcatcggaccaagaagggattattccttcttttttgacgaactgcctcgattagctgctctgatttaagcttattccatcctaatcagcaacatcatggtcttgtgcaccaatggtctctgcaaactttattaccacttatgtaccaaatctagcggcaagcagcatctccattcctggaactctgatccttactggccttgatgttggcagcatgccggcatgtcctactgcttaatcaatcagtttcaagttcacggaatggtaatgggacagtcttcactgctctgaacttgccaacgttgttcaaatgttcattctccaatctgcaatcccataaaccatttcaccatgttacaccataacattaaattaaaattgatgttccttgtaaaagtacttccaattacctatagaagttccaatggcctcgtctgattatctctagtgaagcgagcgagaaatccagtaagcgcgactcaaccttaccaatatggatcttcattacactctcagtccatgctaggcgaagtgcaagattgagcatctgtaattatttgaaggcattagtgtcctagatctggaattttctagcctagtcagaaatgaagtatattaagcatagtaccatggatacgtagtagattgatttattcttcaagatgagctcgttacgaagccatcggttctttgattttgggtttaagaagccccagtccttgacaaagtcccagtagagctggtaaattgtggcacctgaggatgaaatgatgaccatccacacccagaatggtgttggtgttgcagcatatttgaacctaacagcagctgctaccattgctgatacatattttccagcattagcaagttggttgatatcatgtccttcctccaagtaccttcttaaacacttcaaaacatgacacagctattagtttgaaactgatccaaacaaagttgttaatcgttagtatttcccatctaaagattcatacctgcaaggctctccagaagtatgggagaaaggagatcacataggccagatgcttatattgttggccactagtacaggtctcatatgggtgagttctaaagcttccagccatgaagtagcacgctgtaaattccatgtgccgtaatagtggaatctgcagatagtagcaccagttcactcataagatgctgagctccaactctcaaaagctctagtgtaaagttcagtttcttcagtattacctggctagttagttggtcagccatgaagaaatcagccatcagaacctgcatgtcaaagcagcctgcttatcagatagatgctttcaacaatttgtgataagaaaactcatgaggtctttagtctttaccttatagaatggtgaaaatatgatattgcgcatgacacgcatgaagcagtatcgcgtcgagcggtagaatatgtcaaatggacagaatagtacacctgttgacagctgaaacaacagaatccgagttgagaactgaaaatcagtacatgaaacagagctgaattaccaaattttcccaaagtttatgtttcttactagtaggagtgctccaggcaaagcattggcataggctacaccggcgttcttgaggaaaagattgatgaccagtgcagcgacaacagtgcacattatcgatgcagacatgaggaaggcgtcccggtgcgtcaaggcggtgtttgaggagaaatcgaatatgaagttgtgattgatccttgtgttcttccacatgaagaggttgcacccatacaggaagatgtggaggctgatgagagcaaacatgctgcagaagcaaggtcacatctatacattactttgaggtaaaattgcatcttttattatcatgaggtcctaagtctgaaatttgaaaaatttgcaaacattgagcccacatgctaaatctaatcaattgaactcttgtcaagaacagagcatatatagcctgaacagaagtaccaagtacaaacgcagtaataaaaaatctatttctaaatagtgctttacccctagaactgaaccgtaattctcaagaatttacctgaaaacatggtacacaatttccatgtaggctgagttcccagtggaagtaaaaataccactaacatgggctaaaatcgcgtatatgatgaacagtgaaacaaaagtgcccgtgaacaaacctgcaaattagaacatgaaaaaaaagaagaagtgaagttagatttgtgtgccaaatgcagatgacagatctgatattctgatcttgaagttgctcagctacatgcctacgaggaaggtgatcatgtgagtgtttctgggctgctgtggcttaaggtatttcatcgccaccttcctgtcattgcctgtgaaatgcttcatgaagatgcactcgacctcatctgctagctgaagtacctgttcagaatttcgcatgcttcagttcatattcgtcagagagacatgtttccatcccccaaaaaactgattgaagtgaatttgtatgtttgtgcagctttgcagtaggattgtggagcaccagatgataccttgtcggagctgctaaatggcgacctcttcaccttctctgaaaacaggtctgtagctcgctgttgctcggacacctgaaatgcaaagcagttcgtaccagtcactgtcagctcggagtagcatttttttaaaaaaatatattaaaaaattaaattattccttgcaagaaaatgtttatgctgtctcatgttattaggctgactagtgactaggattacactgtcgagaatgagatctagtacctctgctttgagggtactaaactactaatagtacacttagaactttattctcctagaagccttatatatgtagaccggttttctttaatctttatcatctattatttagactcttcattcttccatccatccatttcaaaagggcacagatgtggctaattagtatattaccttgacaaatttcttcaatattttggtgaaagcctttacattgagagagctgctcccatccatccatgcatgcaaccaaaaaagcatccaaatccgtcagaaccacaagaacaccataattgacaagtaaaagaaatataaagacagccacctaaaataaccggtgaattaatctaccttttcaaaaaccacaaaagaattagtaatttgaaaggagaaacagtcgctttcaggtgacacaggatggtgtatggatggctacgtgatttacacggatgcttccatgcaaaacggggttgaaatttgactaaactactactgtactgcatgcttgggtgcagtgcaggtgtagttgtgtgctgctcacacagtgctccatgactcatgctgcaactaatattcatagtagtaatttgttagatatacatctatgaagaaacaacttaatttttttttcctagttggtcagttaaccaaactatctatatcatttgtgtgcatgcaattagtgtgatcgatcagttgcatgctattagtgtgaggtttggccatcagaattctaaatagcttacaaatgcgtatatatatgcatcatgcatggcatagaagacaatatacatagacacaaaaggcaagtcttgttctaaaataccgtgacttcgtggttttagcttgtcagatatggcaaaaaggaaagatgaagagggaagatgtgcctgaatttcttgagcagctcgaggccgcggtagagcgccatgaaggcgtcgcggatgttcttctcggcgtgctggatcttcttccggtggacgaacgccgcggcggggtcggcgccgtccttgcggagcacgttcacgagctcctcccacaccttgagcgccgcccgcccggggctcgtcgccgggatgtcgatcctcaccgtcgctggcagctgcagcacgcctccgcctccgccgccgccgccgccccgccctttgccgctgccgtccttggtcttgccgtccttcttcccggcgagccccacgaagctgacgccgttccgctccagcgccgccatcacctcgtccgccaccgccgcgccctccgacacctgcgcctgctgcaactccaggctcccatctgcaaaacacgccatcgacgacgacgacggcgacatcgacatgacatgacattgcatgcataaagagatgtgcagctagcccaggattcatgtgtgtgggtggttggtgtcacctacctgacatggactgcggcgaggagaggccggagaggaggtagcggccgctggagccgtgcaccgacgacggcggcgaggaggacggcggcggcggcggcatagagcggcttcgggcgaggccgcgggcgcggcgggcggcggcgtggtcggcgaggatgcgcttgacgtcggcgaggatccggagctgctccagcagcgcgtcgccgcgcgccagcagctccgcctcctgccccgtgtagaacgcgttcaccttctccagctcctcgtccgccctctccatgaactccctctcctacaccatccatccatgcatctccatttttacaatcaatttaattacttagttttatttacaatcaaattaactaattaattttatacatgcttgtccgtggatcgcacgagctcccctctgtccgggcactcctcatcctcctgcgaaatgcacatacgtattaacatcagaaatgtgtattaattaattaatacacgtttattagttagtatttgattcgagacacaacgacgacgtactgaggcagaaggctgttgtccagcggagaagcgggcggcgatggcgcgaacggggtcaagaatggagaacccatagccaccggcttccttctctgcgggcggcggcgggagaaggtggtcggctgcggctgcggcgttggcggcggcgaaggagtcgtcgcggcgggtgaccttgatcctcttgatgagcttcttgagccgcttgtagtcgacgaacgcagccttccactccggtatgatgctcgcctcgtactccctcgagaacttcaccatcttcttcttcttcttcttcctcgttgcagcagcagcagcagcagctgatcgatcgatcgatcgaacaattaactgaaacgtacgtacgttcacatgtgtggaatcgagctaggagaagatcaagatggatggatggatgcaggaaagggacaggcaggcagggatgatctcgcaagcaacaaccgtcctgccttgttagcttatatagatagacagttagagagagagagagagatcaggctactagcttggtgctcttctccttcttcttcaatcctctctctctgctcacctcgagtgctcctgctatataagcttagcttagctaagcatgcagcgaaatttggcactgctggtgcacatacagggacagatagtggccttgtatgttacaatattaggtagagctagctagcttagctaaattaaagtagaaaggtgtatctgaattcagagatatatatatacacttacatagtggggatcgaccatgccattcgtagaactgtttgtgtcctgttcattcagttagtggcttagttagttgcttaattcgatcagtgggatcatatatagttatattattatatactagttatgtacacgtaattaagcctcgtcgcatgatctggttggatgctaattctgtattaagggagaaattgattaagtaattacttctaattagagtaaggcagtgtatacatatttgtagcgcagagaattaaagaggagaaggaaagaaattaaagaaagaaaggaaagaaagccggttgctttaggccgggttgttaatttgagcggcccatcttttgggcgaaaaggcaggggcaatggagtgagggaaacatgagcagctgcaggaatcaagcagagacagacccttgcttaacctactcggccactcacactcaggtgaccatgcatgcagctgctaattagctagttgcctcctctaaaaaaagacaataactaatcaagtaattggctagttgacatgcactataattttcttattagtatcactaatcagctcatgtgttaattaattatttagttaattaaagaagagggcagtgtccaggggagtaggactaattaaggtcgtaaacttttaagtatgtatgtggatttctatgtctaaagtttgatcgttcgttttgttttaaactttttgattagtatttttgttgctattagatgataaaacatgaataatattttatgcgcgacttttttttattttttttataaattcgttaaataagatgtgcggtcaaacgacaaacacggaaacccgctaatgtatttaaaataggatggatgattatataattaattaattaattaattctgattagagtgttttgtgcggtgcagcatggagtgactgtagatatgctatagctttacacatatcgtggttcgattggatcgcggaaattaatggatggatggatggatcgatcgcaagttggagacaatggagctaagcttagctagggttctgctagtacagggaccagatcagccggatgctctccatgtatgcgcaatggaggccacgccaccgccgctgctgcagcgacgccggcctgacgtggccatgacgccgactcctactcctttttcttttctttctttttagtgtttttctttttttttaaaaaaaaggtatatttctctaggcgcagtgacgaaaactgggtagggcagttagggctgttgccctaagcttaaatatctattaaaagttacatttaaaaacttcaaaacacgaaaaataaaggtaaattatgtaaattatactagttgtgctttaggcgtgagaaaattctaactacaccactgctctaaggtatctatctacaattgtagtggagtacatggtatttgtgtgtgtgtgtgtgtttttaaaaaaaaagataaatatgaactgatcggttacacagtaagcatgcatgcacatgagctgagttggtcggatagtggcgcagccgtgcaacggaaaagtgtagctaaggtcgacagtactaacaagtcgcatacctcatcctaaaagaaaaaagaaaaaatatgttcactgtatacggttggctctggtatgatcgatcgacggcgtcgacgcgaccatcattaaatgaactagccgcccaacatcgatcgcttaatgaaactgaatcgaatttgccgtgcacactttttttttcctgagcttctagataacgtgatttttataagaactttctatatttgaatttaattttttaattgctgtttcaaatatattctttaactagaaaaaatgcccatgcgattgcaatgggtgaatgatattttaatcttattattgttatatgtttagctaggatgaaattcactgtgtgcaattaggagtccgactttcatttcaagttggcatgcgagtttttttaagaaatttcttatacaactccttttgtatttccaaaagcaaataaacttaaaaaccgactcaaatacggatgacgtaccaaaataccggcaaaaatattttcaatttttataatagtagggactagttaatatttactcactccttttctgattataagtcgttttgattttttttctagtgtaaatttataggaaaaaaattagcaatatctaaaataccaaattagtttcattaaatctagcgatgaatatattttgataatatgcttattttacgttgaaaatgctataactttttttataaacttgatcaaacataaataaatttgattaggaaaaaaattaaaatgacttctaatatataaaattaaagagagaaagtaatttatttgcttctacccttaaataactatcacaaatcactagctattcagtccttcaacacaaaacaacatgtcataaatggaagaaaatattaggtcagccagtttatttctcgtattataagtgcgcgcatacgtacgtattacctggcattaattaactagttcgcttacgtacgtacataacatatctacgcgtgtgtgtacatacacatccatctcccctgcgcggatgcgggggcgcgaaaaattttgtctccacgacgtgtatttcgcgccttttttccgcaacggaaaaaaaaattgaaacggtgaggcgttattttgcctccatgtccgttacgcactgcagtgtaagtggtcgcagctgccgttgcgtcgcacgtcatggggtccaagcagaagtgcagaacagaagaaagagatcgaagaaaaaatgggtaagtacacccgcgttgcgtacacgtccatgacacctcggatatggtgcttgctgcctccctcgccacaaacaataggaaacccggccgacctcgtttggtataggtccagctaaattttgttatattcatactctaaactagctgaagtcttatatttttgaaaaaaaaatatagtagtcatagtcttgtcaaacaccatagagcttatgatgttaggtaggtttaatgtgccaatatttgtgtgtctgggtctagcgcaaacatgttcagtcaatgtcgtgtctatcatgaaatgttgtctttaaaaatttatacaaagaaactttatatttagagactattaatatagaaacatttagaaaaaaaatatatggttttgaattagaattagaatcagacatataaaatttttatggcctacaaacttaccagaaaatgaaaaaaaatatgatgctaaaaaagaaaatcatgcgtgattcgcacgatatctttttttgtaagatgttctcttcaagaaatctcgttcttgaaaaattgcattatgctgtaaattattgtttttttcctagcatttgttctagcagtttattttattaatggatcaaaagccggcttctacaccaacaagtgtgtacacagccaactagcggttcatattcatagtggtttttccagtggtcaccatatgggcagaacaaatacatcgacgttgtaaagtttcttggagcgatatgtttgtgcatgccaggatgataggaatccatatgattattcagcaacaaacaggcgtcagctcatctaaagaaaacaagtgtcagctcatgggaagcacatatatctctctttttgggggtcccttgcatgcaagggtcaaaatctggtgccgtgactaactggcccaactgtgcaatgcacacagcataattctggttctctgcaggaatcttcttgttggtttcaggaggaaaccaagtcactaagcacaaaccagaaagcctcaagagaagggtttgtagagatagcttaattaaatgttaacaaatctcaccaagggtgcaaggcactggctagcacctacttttcagggcttaatgctccttaacaagaatgcaaaacatgataataaaggcctttttttttccttcatccttccttccttcctttgctggctgttgttgccatttcatgagtgtccacttcacaacaaatgtgacctaaaaatgagagagagagataaccctttcttctttttttctcccaagccagaatggaaagatcattcgcaacactagctgcatgatttattcttctaaaccatcctcctattggctcatgcttccaaaaataagaaaaagtcagtttaattaaaagcttcatccagccatctaattggtcctttctgtttaggacatgtttaggatgctggttggctaattgacttgtttaatattcactaatctctagctatgcccatagttaacttattgcagtatgattctagttttaacccgtgcacgcatcgtttgtttgcagaatgatatagtgcgtaagttcagatagcactaagaaacctgtggctaatcgggcatctctctctcaattgcactttagtttattaattttggtatcttggataggaatagaacatacaaagttatagttaaattttgcttcgcataatgcacaactgattggactgaaatggctgcatacttctgagtaatggagctaagctaattgtgcacaatgactgtactttataagtaacagagcagaattagctaaaggaatcacaacaaaaatgtgcaaaatatgaaagatttgagggtgacaagtgtcaagtgcagcaatttgtcagtgagaaattaaaccagcgttgctttctgaattacatgatgttctagtgttctagtgtgtccggattgattttactaattaattactagttagcacgtaattaatgagtttgtaatcttcacgtatgtatatgaacttttacgtgcgcaaagatattccaccaaggaatgtgcatcttttcaggagttgatccggataaacgtgctgtgatctgggagagtcttgtacgtttctgacagatgatcagagatgtgtgacaaagatcgatcaatgctcaatgggatccacgatgcaaaccatatgatgatatcaaagccatcttttggttgattaattaagctttcatttcatcgaattaatgtttttcacgacgagcggcaaattggacactgaattgtaccactaatctgtctgaattgtactactaatctgtcatatcagtcgcttcatatatgattgtctactacaatgcaagttgtttcaagttttctttctcaagagataattagtctgagaagttatgtgggattactttgctaagtgattttacagtttgcatatctctatctacgctagctttaggaaaagctcgaagtggtagattctatatcgtgtacgaaaagaaatttcaggtggacccaattaattatgtaatcttttatacaataatactatgttttttggcacatctttttttttaataaagaaagtgcataatgtgatcttaaaatggtcactgcatttggctttaatttgatgataaaaagatgagcgtatggctggcgttttcctaatccaggctattgtgattagaagcttttttttctactttcaggtccatttatgccgacctttgttttgttcatcaaaaaattaaacatcgccctgccaatccttttccataaagtgatttatcatcgcacatatgtaggatctaagtggagagaagtgctactttataagagcagatgatgatgtataaaatgtatacatttcattatctgaaaaaaaatgtgtatatttgcaaccaaagtcctaagtgggcagtgcacaagttggtgtgctgctaggtgatccctattgttcctgcagctcatggacattgacatgggaaagaaagaattagtgggcaaaaataggtcactatcatatagatttatgaattccaaatccctaagatcctaaaatgatctgctgatttgattttaatgccagagaacagggcattgaatattaagtacttttactgcggttagaactatcactagtagcagtgatctcaactatcgattgatgaattctactaccagttgttaaggtggtagcataaaaatgtatgatccattaaatcaagagcaattttacagtacttgaggagttaccatgagatacaaaaaaatttagagtaaaatttaatacctcgtagaacctcttcataaaattgctcttaaattaaacaatgcgaatgatctctaccgtagggactgtgatgctcaattgctatgtgtttcagaaagattagttagtaggggtgtgtgtgcttaattcagtgatcaaaattagccagtgcagtgcaggtggtggaggctgacgtctcccataacgatgcgtctgtgtatgtgtgtgtctggttgtttccctctgatcctcacaatttgtctggggcaattctcctccttttggatgctctgatgatacacgaaaaagttgcagacgagagcggttttcagctgtaaagagaaacaagaaaagcagctttctcttctttatttcttttcttttatgtattttctcctcttttttttttctaatatgcgattcagactgatggtcacgatttggagttggatgtgttcgtagcagatttgttctcggccttcagactgaagccggaagaagtttttgccggaaatgcgttgtttttctgcagtttgctgaccatgagtcttgtccatggtgactgcaactgtttttggtgctttgcacggttcgtcagcagcatgaagcctcctctcactaccttttagtatcggatttcctgtttttaacaaaaatttggagataatgcactaaccggttgacttccttttgaatgatgctgcatctttcaagaatatgttccagatgagtcatgcgtcatacctggtaataatacaagtgttttttgactgaagtgatgatacaactgttagtgttctaatctgcattccaagtcagaagatgcactctgcactacagagaacgcactctcttatcccatgtctaaacccattttttgctacagttttgcctcacaataatcatccaaaaatgcacacaagttccatgcattgctagggcactactcgtctactactatagtaactctacctcctagacttcagataaggatgcatggcatccatatactatatatccatcagaatataccactttctgaattctgatacctaacattgagccattgaggccaagcaatgatcaaccatgcagtagtgcatttttactgctgctaaacttcatacatctgcatccactgcatacagtaacaaccacaacacaaaccattgccaaatactgattgcatttgcaaaaatcatccaacttgaaatcatcaggtcaatggagtcaccagggctccaagaaccgccccaccgaaggcgcgatcgccattgcgcgtgcgcacagttctcattccatggtgtccaaggggagagagccccctggggcttgatccatggtagaagctgataggattcagaaggaatctttggaagtggggagcaagctgaaatgcgatgtgctcatgtccactaccttggcattgtgatgtgttgcactcattatatacgatgtatgccacgagaagttcattgttccttttcttcagggcactgttacagtgtccctttcagagtttcaggatccatccatctctaagaagcagtgactggatggatgggttgttgagaagaaactagtgcatcactcttggccaggaatcgcaaatggaagcactagagaatggtaccttattaggagaagaacaaaaggaggtaaagtattacatgtcatctactcatgtagggtgacttggaaaaggttggctaaagaaaatttgtagagcacaattcttagtgcataggttcatgctacagtgttcctttctccatatagaaatggccagttcaacattctcatctgtcattggaactttgtcgaaatgatccatttatttgaagcaccattggtgtggtggtggagtcgtgggtgcgtgattcttaccactagggttaaaatcctggtgtccataatatggccatgtgcatcatagttgatgtagaggccacaaacaatacttccattatgtaaaaaaaaggtggagttttacagtggtctctattggtagtagaatcaatctagacagttcatgcaatactgcaaaacttgcagatttggtcgttgctgcggacaacgactctctcagagggccatcttggttctttcaactggaggtgggagagttcggggtcgtactccacccgatcagcttaccttgccctcttctcgggcaggatctcgtttcagcacctaccaatctggcgctcttttgccccacctcagtgtcacgtcgctacttcctgtggctggtcgctcactggcgctactggacgactgaccgattggagaagcgtggcctgccgcacccaacctattgtgtcttttgtgaccaactggaagaaacagttgatcacattctgattgggtgccttgagtccctatagctgtggtggactgtcctttcaagccccggcctccctcagtgctttccctctgacgctgattccttctttgagtggcactgctcctgtcggctcaaagttccgagggagcatcgtcgtgggttcaacacgattgtgactcttggcggttggtctatttggaatgaaaagggacaaccatgtgttcgacaaccattcccggccctagcctgaggttgtcgcagccatggcgtaagaggccatcctttggcgtcttgcccatcccccgttgccagcgcttcctagttagcatgtttggtcgtttggtcgttcggtcgtcacaatgtaatcgcgagaataggcttaagtccttgttttccttttcttcctcccttccccccctcctctcctctcctctctctctctctctctctctctcttctttgtttgccatttgtgtaaattttattcctcttaatacaaaagtgcgtaatccttttgcgtattcccgaaaaaaatctagaaagttcatcttttcaaatccaatttctggtagtagatctcataaatcaatggttgaggtcatttctaatgatgataatgctagtagtaaaacactactagtacagaccaccgtaaaggtacttttaaaaaaaatagagagaaaggctagtgattagtgaatatgtgtattcatcaaagttcactggattttttgggtcatgtcttcaacaaatcaaatggttgacaaagaggagaatgccctggttgttctacaggaaactttttttttttgaaaccgatgttctacaggaaacttgtgtgtcaatttcttttacatggcatagctgttactgtcatactactataaaattctgcaattggatctctcgtgtaccacttatcagcattatgagtaccactgaaaatttggtaagtgcatcctcttttttcttgggtacactggacctcaggataatatatatctaggattaagtggataccagatcaaaatatatggacctgatttgatataacgatactgttttcctattagctcagaagtttcacacgctaaagttatctgctaggatggtgcatatatacatgccctattgccgtacagaagcaaacttaggccaaacatatctattcagaggagctaaaatacaatgaacaaggtttagcagcttctgaattgcttaccagaaccggtccttgttcaccgacagatagccagacatcacctttcctgcggtgttccgcatgccgtcgatgaggtagcaccaggttgatcccagggctccaatgaagaaatctgcttcagtggccatgatgaaattgacaaggggatagtttgtgctggtctcacggcccaggctggcctcatacattgccatgctcacattgacatcttggcgcgtcacatttgtgaaatagaaattccatttgggatataattttgtttcgtcgataacttcctacatttcagcattagcagagttaaattacagaccaatgaaatgaagaaattaatttacaccatacgagggatgagaattgaggagttaaattgcctgcatttcagtagaaagccagatgttcttgagacttggaaaacgttttcgaagacgaccagccaactccatgtatttctcaaagccaactacttccatttcacaagctttatctcccatccttacatgcatactgataagaggcccgggtatatatggtttatgctccgaccacacaagtcgctcaatgtcagattctgttctgctaatgctaggctgcaattgtgaaatctttcagttacttatctaaaaaagtaaggtggttagtgctaatgttgctttatccgaatgatgcgcagacaaaactctccacggaacaaagcaacataaaaatcttcagattgctaatacaaacctttggtggatctgggacattttcaagaaccatctttgctgcctgcatgccaaatgctgaatgtctagccacattcagtaatctgcacatgtactctgactggaacctcattaggtatctcagggcctacatggaagtttcaggttgatgaagcatatttgcatccccattatgaatagcacaaaatatgctcatcattcatcttggcatgaggtacacacctgtgcaatccaccatctccgatccattttacaatgatttttaaccaatctcccatctatctctgttgtcggttgcatatatttccatggtctcccccatatcctgcataacagcaggtttcagaaaacatgtgcatgaatcggcaagagccacaagaacagagcgatgaatgagatatactccctccgtccctaaatatttgacgccgttgacttttttaaacatgatcattcgtcttattcaaaaaactttgtgaaatatgtaaaactatatgtatacataaaagtatatttaacaatgaatcaaatgataggaaaagaattaatagttacttaaattttttgaataagacgaatggttaaacatgttttaaaaaatcaacggtgtcaaatatttaggaacggagggagtaaatgtgtatagctcatcagtattgggtgcgtgtttagctttccagaaacaggaccagcgcatcgaaatggtacctaggtatatgcccagcccatatttgcttggaggtatagttttccttaacttttataattccattttccctagaatctttgctttgcatgagatctaaagcacgtttctggcagtctgcagatgtttcaggtaaaaagtagcatgaccagctagatcttgctaggcctgaaaattgaacattgacagttatctcagttatcatgtcagttaaaagttacaacttgaggtagcactacacatatcatattatcaattcataatctacaaggtaagctggattgttcctacctttacaaccattgtgatcagcacggttgtagtatcctgcaactagaatccttctctcttttatagcaatagcaagaagtcccgacattccagcgagttgcgcacctataccaaatcccggtagcctctcccagtctgcatagagaaacctcaagcttggatcactgcagtttggaggatgttgatgaatccatacatctctctgcacttgtctggtcagtggatagttttcttcatctgatcctgcaatctttaaagttttgttgtaactcaaaagttagaatactgcattcatagtagtactgacaagacaattacgagttcaggcaagtttacacacccaaggtggatatggcgccctgtcagatttagcatttgacctgaaaaacatttgcctccactcttctgaatctgaatagttctggttgaataactcaagaccaagtgaccctttccataatgtccaaggaggaaatacgccgttgtcgctataactgtcaaatttcttatttctttcccatttaagcctgcaattctccagatgaggcggccgcggcacgtctgaacttttcataacttcatcactggtcgtatccagtaaagtgctccaagcattatacaaatgcattttatcagcttcattgatgtccttgctattggtggctatttctatcttttcttgtaaaacagataagtcatctgtttctgtagctccacctgcatggaagaagctggttacacagacattgtcacagctaaaaggaaaagaaaaaatacattcagcctagatgaacatatagtactacactactactgaattttttatgcgaaatggtgttcgcaaaataccaggttcagttgatgttgaattcaacaagattgctcgccgaaccggtggatgtaccgatcggatcatcaggatttggataggtgggagagcaacaccaaacaggtacacaatgcagacaccacagaagaagcccagtgcccatgtcttgcagggagcagagctccccatctgcagagccctccgagatataaacctttcaaggctcttgctgctgttgctgtggccattactcatcatcctcaattcctgaattcctcagatacctaccagcgcaacctgacccttgcattcaaacactgcctccaatcaagaaacaccaaatgcatcatggaatggaattcatgcaagaaaagctataaagacaaaaaaattcttcccaaagagtaaagtacaaatcaaatcacagatgagctaattgcttggaagacaacatggatttgatccacagatggcttctaagcacaggaatatacagtctacatgaaagatcatcggcatgcatgcacattaaacagattaccatgcgctaaaccccatcactaatcaggaaggaccaaggtagtcgcacaacacagccacatgcagaagtcactgacaaaccagtacagaaattgaaagatggttagctgaaaaacagccgctaacaaatcgcggggcttatcactcgtttactcccctcttactcggagtctttcaagtttcaggtacaagaacaggtcaaataaacagaccgaaattcaaaacaaaccaagttctctcgagtgtcaaacaactcaccgaatcttctgcaatcagcctaatcctgcaacttatgcatgcagagtgaaattcagagctggaagtgttcttgtttttctcatctcctcctccgtcctacgccctgaaacaggagaaaagagttgacgaccagaggagcaaagatcaacaatggctcaagatgaaaagaatctgtttaagaagaagaagcaaaaaaaaagactgcacaacaaccatgttattttgttattctcttgtacttatcaaacttctcggtgagtcaataaattggccggcggcaaggaaaggatgcagagaagacaagttcagaaaagaacatttttccttgatcggtcgagattctgtgttcattgctcagatgaggctgaggcattcacctatttctaaagagaggccgtttttagcttcttctggtaggattggcgagaccgatcgaagtaaacgagcaaagtgaagtaaacaccattcatcagggaaaaaaataaaaataaaatggaagtaaactcatcagatgatgttttggcgtgcttatgatggatgcattttactgctgttcatttccctaattaggtcaaacaattatctcatatgccttctctgtgtaactcgattttttgcacacagagagagagagatggtttcatcaagagagcatagaaaggaaggtgacgtgtcccagcgatgagttggtctctgtctactctgctctgtgctagacagctagagtagctgaaaaagcagaggaggtcacggtacaaacgaacaagacctgccacgtgtgggcccgacgccgaacacatgacaagtggcacgcgcgtggcagcaactcgctccacgtgtgcacgcagcgcaagagtagcagttggggtccacatgtcattgtcatcctcgggttgcgtggaaattggaacgtctcccgcaccgaacgcgcgctaatccgaggcgtccgtttgaaatccaacgactcaaaaccaatttggttgggaaagctctttttggctgtatttttttttctaagaaaagaacggttttgctattggataattctgctagtatatagtttgaaagctttttgagacgctacgatgaagctcgatctttatagatactccctttggtttaaaaaaacccaacctaattaaaaaacaggacacaatctagtatgagaaatctagatagaggattattcaaattcattgtactagattaagtctcatcccctaacaaggttaggtttttataagaatggatggattacgtgtgtaactgtacggtaagaaagtagattggatatgatgagatttggtgcagaagaaatcaaaggcaatggatggagctagaatgcagaatgttaagtatggaggaagcaaagtggcacggccacatgatgttgatgatttcatctgctgaattgaggttagcagcaaataaccacgacggctttgtggaagaacaaaactcggcccggcccaatatatatttggcccaaatactccatattacggtacagcctccaccgtcttgaaggccccaaagccaccgccatttccttgtaccgttagcaatttagtgctatctacatcatccgttataaaatgtaaaatcatttttcacacatcctacgtataccaacataaaacgacaaatactaaaatactccaacttatcgaatcgcaatgcaattattcagcactttgcctactctcagtatatttattctctattctttataaactttgatgtaatgactgctaaaaatgaatttatttgaaaacaaccgtgagaggttaaggccctgttttctttcagcttgggattattataatacaaattattaggagtaagctgaaagaaacagacaacttattgaagtagcttattataatctggagcccagcttattataatctgataagctcatttaggtgagctttttccagattattggatgaaaaattacccaccatgccaccccactccctttttagacttacaaacccaataatctaggctctaataatctaggaaagaaacaactaaccgcttattctactacagattataacaatctaacttatagtaatctgacttaataatctagattataataatcccaagctgaaagaaacagggcctaagaatgactttattccgaggaggaggcaaattagcctatctcatgatttaccttgtttggatgggcctcaataataatggcccatccaagtggacaggccctttttgttttttgtttttttgtcggcaggcagtgccagagcccagagctgagcagagaatccccaaggatcaagaaaaacgcaggcaggcaggcagcagcctggagcactggacgtcatgggtggatgaagaagacacgtacgctcaacagatttagtggactctggctctgctgctggcttgggactctgcctgctaatctgctgtcatctggtcatctccatgcacgcgcgcactaaaccacagcaaagtcagcaggcttttatccgtaatccatgacgctgcagatgatggactcacaccagcctctgcttgacatgcttgtattgctaaactatcatactccctccgtcgctaatcacatccaactaaaatcctttatatttagatacggagagagtactttcttcatcccaaaacgttgatttgatatatcttacccaaaacattgatttgatgcatcttataacaaaaaatctggacatatctcaatcttgttttaggattgattaaggttgtgttcggcactaagagtttccaactatcctcactcatttttcgcgcacacgctttttaaacggctaaacggtgtattttctgtaaaaaattttttataggaaagttgctttaaacaccatattaacctatttttcaattttttttactaatacttaattaatcacacgctaatgaactgttccgttttttttgcgccggaggagaacgtttccaaccatgagaaacgaacaaagcctaaatctcatcctaaattacaatatttcggaacggatgtggtactattatttcgacaaaaattaactaatcataattactatatagtacaaccgataaaatcatggcatgtttgcatcgccagtttttttttcattgactgaatatcacttcatgagaatttggatacccatctgagcaggccttagatgggcctgcaacgggccgtccgcgtacacaagcacgtgacacgtctatagtagaatccgagccgagtcacgtgcagatattctctctctttactcctttgtaacaaaagctcaatcctatcattcattcagcaatggcctcagagaccggcgagcctttcctcctgaaaagcagcgagactaccccctgaactgaaatgaagcgatgcatgcctgcttacgcctttgaccactctccatctccaatctccgtgcaccatagtagcatgtctctctctgccttagctgctgctgctactgcgggagaggctccagggtacagctgaccatcaccaaaggcgccatcacgacctgcacagctccatgcgagaaaccgcttcaaaacattttcgtgacctcactcacagtcacgctcacactggagtatcaccaaagcgcttggggcactcaccgttcgttctgaaagacttccaactggacgattcatagctaaaagttactccctccgtttcgaaatgtttgacgccgttaactttgtagcatatgtttgaccgttcgtcttattcaaaaaatttaagtaattattaattcttttcatatcatttgattcattgttaaatatatttttatgtaggcatataattttacatatttcacaaaagtttttgaataagacgaacggtcaaacatgtgctaaaaagtcaacggtgtcaaacatttcgaaacagaaggagtattatattttgggatggagatagtacatactccacaatgcatgttgcttggagtaggtcccatctatctctctccgctcccttttatctctccctctcccctctcacacattccgcaccactctctctcctggacggacgaagcaaagcggcggcgacaccgagctccacgcctccacctctcctcgtcggggctgaaggcggcgacgtcgccgcccgagcgccggtggagtagcggcggcaccgagctccacgcctccatctctcctcatcggggccggaggcggcaatgcagtggcgcggtccaagcttagaccgcaccgggcagagctccccgtatggcgcaccgtccggcctccttcctcggcggcaggcatggatcggggggcggcgcggccagcgcagatccgggaggacgacggcatcgccatcggcatcggcgcttctcccctccctcccccttcttcacctcttctcttgtgggcctagaagctgcgattctaacgaagaacgagccaatacctcccctttctccacctcttctcttgtgggcccaaaagcccccgttcttgcgaggctccgagctatgcctaggtgaaggggaatgacacctaggtgcagtgtgaatggccttagcctatgttctttgctcggtgttcccaaccctctctcttgtattctgcgcgcacgcttttcaaactgctaaacggtgtgttttattctgtaaaaagtttctatacgaaagttgttttaaaaaatcatattgatcctttttttaaaaaaacataatatttaattaatcacacgctaatgtaccgctatgtttttcatgcacaagagaggggttcccaacctatatatagaaacgaacacagccttaggttgcgttcgtttggagttgttcccaactccctcgtctcattttccgtgcgcacgcttttcaaactgctaaacattgcgctttttgtgaaaagtttctatacgaaagttgcttaaaaatcatattaatctattattgaaaaaaattagctaaaacttaattaatcatgtggtaaacgctgcttcattttatgtgccgggaccctcactcccgaacacagccttaatcatgtttgcacttgtgttcaatactccctctcccgtaatattcatttttagctattgttgttttacttgaaataaatttatttttagagtaattattgtatcggagtttgtaaaaataagaaataattatgggagtagataaagcgaaaaaatagttgtattgatatttgatataaagcatgtttattctattttttattggtatgtgtataaatgaatttactttggggcggagagagtagtgttcagaaatagcatacggttaagcaaaaatttaaaggatgtgagcttttcaataacggcctaaaggctaacagcatatgctaatagtgtaattcgaggctaaggccccctttgattcaaagaaaattcataggaatttaagaggattttattgctataggaatttttcctacaaagccttgaatcaaaggaatgaaccctatggaatcctatgaaattcctatggaatgcctttttccatacaagttttggaggaattttaacaagaggtagaacctcatggaagaagaaatcctttgagtctttatctctcctcaaattcctgtgtttttcctatggtccaatcaaacggtcattactatattttttctgtgttttgcaatcctctgtttttgtcacgccccgaactagtcccgaccggaactagcccgtgatgctccaaattaacccgttaatcgataccagtcccaggaaacagtgctggtatcacaggaagacagaatatcacagcaacagaggtctctttattatagagtaggagtacagtcatgttgggctgcggacagatctcgagctcacaactgcattacaaaagggaagcggaagccaagacttggaccaaacatcacaggcgcgacttgggaactaggccgaaaccctaaaactcatcatagccggcttgctcctggaagaactcctcgtcagcgggatccgcttcatcttcttcagcaactgggggggattatttatatagagcaagggtgagtacaggagtactcagcaagccatgggaaataagtgtttaatgtaggcttcaaagaaaggctgttgtttttgcgattgattttatttaaactcttttctgaaacaactaagggagtgcttctcaaacgacacggatgagacagtgcgtctcatccggtcggagtatgtgcaatgtttcagtcttttgaattgatcaagattggcacccggccaacagctttcaaacggccacctgggcctggctgatcccatcagccgcagattttccaaacatcaaacccattccacaacagcaaatttcacaaggcagtagtcaaacaaaactacgctaagaatcacctcacatccgcccatgaccgtgggcacggctgttcgaacagttttaataacctctgcagagggggtacactttacccacacgacattactaacccggatcatccagcccgtgcagaacggccacgactagagaccttaaggctttcatgacaaggcatttcgaaagccgacacaggttcaccatatgccaacgagaggggtcccaaaccaacaccagattaggtcccagaccatactgtgccaggaagcccaggggtcctccccgacaccaccccggcgaatccacatgtctcttagcatcatggctcccccgataagctagttactcagccaggggtgtcccattccacccatgtggtcgtacttgtcttatgttcggatgaaattccaaggaaacggtccttaagtgcaagagcgggaaaccgtacacccggtacgttccccggtccgcggttttggaaattcatttagttcgcaaacaccgacccaggtgtcgggttttccaagtcttttgtaaaacccaagttttacccaagatgtttctcagattttaagtttgaaggcgaccgtcgatacccgtgcagagtacacgattaccgaggcgcaactaggtgggtacaagggaacatggtataacaattacaatggaagggtcaaatgcaacaaattaggtaggtccgccaatctgccttgcagacgggacaagcagattaagtgcgatcctatcaatgcataatatttttcaagcaacataattaagttcaaatataggctcaagatgtttaaaggtggcttgcctcgctcgagatcttgagcttgatcctcgaaatcctcgcactgcgggtcttcgggctccgaaactacacgcgaaacgggacaactcagcaaacggcgaaaataaagccctattattgacctctaagcgtgccattagatagatctcgagatttgaggaactttggaagttggacggagtcaaacggacttacggcggctagggcgggaaattagacttccctctggcggctagggcgcggcccgagagaatggggcggctcggccgagcttaatgggccggccggcccaagaaggcggcccaacgcgcgcgcgcgggcggggaggggagagagagagccggtgggccgggtccaacccgcgtggtcccgggtgggacccgcttgtcggcgactcagctcaccgtgagcgaggtgcacgcggggcgtgctagggtttggggagggaggcgcggcgcatgcgcgcggttcgcggaggacgcggtgcggcgggcctatgcgcagcctcacggctcgcggtggaccgcgcgcgcgaggggcggagggaagcggcggaccggggtctgcttgacccggtcgcggccgaggtggcgccgacgtggcgcctacgtggctaccacgcgggccggcgggaggtagacgacgacgccggccggaacggacaacggacggcggtggcgattggtggagcgaaccacggcgatacatgcgaaagcgagcacaccggggggttgcatgggacgaggggagatgagccaacggctcggatt

SEQ ID NO: 10079 - DNA, 129700 bp, Oryza sativa
caatcaattgaatcttagttgatgaagaaagatgtgtatgacatacttcaacacaacatgatcttaatcgcgaagattattaaatatgctagcttcaattaatccagcccacaatttttagcgagctaaacctcaattaattaaggccccatcaggaacaggaaatttataggatcactgtatgaatagccaggaagattccacatgagattctcaccaaaatctttgtcgaattccttaagtacgttgcaaaatggggcttagtggaactgcttatcaaacagaaacaagggttggtgtttgtatggaatcagatttgtctgcatcgttcaataaattccggtgactatgcgcaagtgaattgccacagaacagcaagctgacgtcttcgtagtatatttatttggaatcgcagatgttaactatctttctaaaactttgttaaagttagagaagtttgacctacgacaaaactaaaaccaccttacattctggaacttgtaaaccaccttacatactagaacttctgaaacagagggactgagggagtagctgacacaagaatgggcaaaccaacccctggtctgtaccaagctttccatgcaggaaatgggtaggtttgtgtttgctgccgctttgccatcagtctcaaagttgaagtaggtatgacatgcccccggaccggcaattcaaagcacctgttcatctaaccatatgatgtttcagtaccacagttcatagggtagttaaagtgacctttctcctgatatgacagacactaatagtagtaagcctcttcaggatacttaggccattcacaatacgcctccgtggcgttcagcctcagcttgagaaacagcatattctataccacgtcgatcgcgttcggagccttattaggaacgcgtagcaaattttggtcacccgttcttcccactaaaagcctgaaaatgctggcgcagtgacagggaagaggggggagagtgtgaaaactgcccgctccgctggcgccgtcgccatcctcctcgccgcaccgccgagcttgtcgccgtcctctccgcaccgccgagctcgtcgctgtctgcgccgccgagctcatcgtcctcctctccaccgtcgctcttcctcgtcctcggagagaggagcgccggagaggggagaggagcgtcggacaccaccgctctgccgccgctccggtcgccgcctcgctttgttcggccggtggagaagggatagagcagagagagagaggagagaaaaagtgagggtaggtatatgcactgtggaacatgtagctaacaatgttcctaggtgttcttgagctgagttgtatatttgcaatgcattgctaatgcccttacgatgcagtcaccaaagaaagaattaatgtatataataatatagtaacctcaatttgcagagttgaagtgtcctttacaaggtaggagtagcatcattatacaggccagatagcttcaaaagaatcaatctttctgacagatttttcatgttaactatgtgggtcataatgtacatggatcaggcctctccttgtctgtggctggacactgcaaataaccatgcttggtgtccatgggggagaggttatccttcctatctactattgactgactacaacctgatacaagttgggtacaaaatgaatcgacgactaacctcgtgatagggacagagaaaaaatgggttatgaatctttacttgaaaactattgtggtggcgatgcttctgaattctgatcgctggtggttacattgaaaaaaatcaacaaggttagctgctgcctgtcaagaggaccactgatcggggacggtgaggaagtactttgacatggctttcctgaacctcttcttgtactgcatcggagatatgacggtcggggactcgttcttggggcctcccaggatgcctgaagctttcacccaggtctcgagctgcttgtcccaggtgtactggcgcaagtagtcaataatgccaatgacaagctctttcttctcctcgtcgattccaacaagtagtgagtaatccatgacatccgctgtctgcaaagtatttcaaatgattaacagtcattttcagtaatataaaatgcaccaattcatgaagttgtgcagttttacaagaaataagtattttgtgcaatcccttgtctgaaataagaatatatatatgagatgaattatcaagattaatttccataacaacataccgcaagaaaagaagtgtcattccaaacggctctttccaatcttcgttttgccttgctccctaaaaatattggctttgtatgcaatgcctctaggaggtttgaatccaagaggactttactctcactggatgtatagcgtgagcgcaatgaaccctttagatcatagactctagatatcttcctttcaaagaaaagattctccatcaccatgaggtccatctttacttccctaccaccttttaagcccttgatattaacctgaactcaagaaaaggcagcagaagttagaaccaggggaatactctatacacttcattcatcatcagataaatcatgcaacaagaagaaaacaaacctgatatactcctacgattttggccaggcaagttggactacctgaagtcagggattccatcaaatatctgaagtactgaggagcaaactctacaaacgattcaagctctgtcctggtgacttgtttgattatgaatctctcatcaagagtctttgcaaagtaaacattgctttttccaccttgcgcattccatctcttgcagcggctaagtgaacggatgaaatcaatatcctttgggcagcatttcttcctaagtgcggcaaaatgctttgcgaaataacaagtaatggaaaactttgctttatcttcagaaagtggcgattcatcatcaaaagaaaacttaaagtgagttcccttagaatccaaatggtcttcttgtgagagcaaggtcccgtcaagtccatggctgctgtcaatggcatttggtaggtgtaagaaactcaaacttgaattcagtttgcgtgtgacttgctgcacatattcttgtgaagtcattgcataggacacgatactggtaggctcatcatcatagactgcaatgacagcatcatcttcatacccaatctgaggcaacagcagccgtgccccatcatcgatcatatgtgaagcagatgagatatatgtaagtgtacgggtaagaacaacatttaatttctctactgcaccaggagacctttgagaacaagccctccgtatgtttggcattggatctttcaggatactagtaaaatccccaaagtattcagcagatctgaatgacgacagatgcaatgaagtaggagccaatccattgcgttctcgctggtgtatagcaaatttagaatcaaatgaatgaattctgacaggggttacagaattcccatagcttggattgtctgggaaattaaacgatccatactcatcaattttggtaaaaccttgtagaaggtcatcttgtatctcactagatccagtccatgccaaatcaatcttatctgaaaaaatagatgcaagtgagggtaacctttcaacaggttccttacccattgtagctgtagtaactggctgctctgtctctccattgaatctgcggaaaaccttgtccagatcttctgcatcatccacaggatgagttacaagatcaatctgtgaatttgtctcacccatcctgtattccgtatcattcaagcagccttctctagatagcaaggattttcttggacttcctgaagattgcgacaaatttgtggattttcctatttttgtatcccccacaagcaggtcagctttccactctttcagtctgacatctaagaaaatatcaggatttgaaacatgactgtcttttttaaggagtgaatctatgtaacaaagccttcgatcccaaatgtaagcatcaaggagaagaccgcgtctcaagcggttgagctcaagaacatcaatagagacctgcacagaatgattgctatctgtaataactggcaacagcaggatctgcaaaacaaacaaagaaagagacagggggtcaatattaagataacataaccttttgtttaacctgaacgcatacaaccaggaaaatctcgttgcactacctcatatccatttctttccattttaagcaaatctttcatctctatgatctgcctttgaacacctgctttcaccggctcatcctctgatgtaacactattttcattatgatgaagaaaatcatatacctctgaatgtaaggtctccattttgctatatatctgcaaaagccaaaagtcaagtatatgagtatcatattattagtaagttcacagcaaaactatatgatgcagtctatgaacatggtcatcataacttagaaaaattgcatacctcaactgccatccttctcatccaatcttgtcgactgcggcaattgaaatccagtactgaggggggtaggttaactgagagaatatcaacaggagaatatctgaagaaagcaaccatgtttccgtacctggatatttagcagataaattgaaatcacattgaaggattgagcaatgttaattggtgaaggatacagcagatacatacccatagaaacgaaggcagtctctctggagagaatgtccacaacttgcaactcggttagcagtagtatggtttgaaaagcttagctccaagaacttcccaaacgacagaccccaagctgcatctgacataattaccctccgtgtggcaggtggtacaccatccttaggttcgcacttgaggcatctatgccacatccatatcctaccatcacgttcacctggtaacttttgagacagaagccgccgaacactaattgttaaactcccatgctgatgagtatagcacctgacatgtgattctgatgactctttgcatgacgggcagcaatatgcctttgcatgaaaaaaaacatttccaaaaattatgataatgataagaaggccatatgatagtgcacatacggattgtacaggaaatacctgatcaaataagtcttccctgaggtacctcccaagtggcttatcaaagctaccataaaacttgatgcggaagagctgagaacgctcgcatagcatgcttttggggatacaagtgcttgaaagggaaactaagatgctctgatggttgtcagtagcaggaaaatattcaccagaaagctcattcgggccatctgcatctcccatcaaataatcatcatgtggtttgggaccatagtggtctacctcttgaaatttctttcctgaaaccatgccttgacggtcatcatttatgggaagttgtgtcgagtcattcaaatactgatattgcatcaccatatctgaagttctaatgtcatgatccaatgaacatggaaatattttatgacctttgcatgattcagttgcatggaatgaatcatgatcatgacaattcatatgttcaacaggaattttagattccctatgctcagagatgaccccctctccttcctcattcaacgataatgagccaggtgatatagaattttccttaaacataccattgactctagtagcttctgaatgtttgccttgtacaggtttaagtccatgaggaataccaacaccagcagatccagcaaaatagttacttgggtcacttcgaatatcatttaccactaccattggccttgaaggaaccttgggaagagtcgcaccttcatcagcaaagaatgatgtttcaagagagaggtgataagctgcaaacacagcaagttgcacaacacgcttaattttctttagttcctctcgacatgatcctctcagtagaacctgcagaagttgaggtacattgattagaaatatatagtcctttgaaaagaatgcaatggtgatggtgaatctgacaccctccccctacaatgtgtacaagctgattttacaattgattcttagttcccgttgtaacagaattgtgattatgtttcagtgtattcaatggaaaaatcatttcttttgaacaggaatgattcatttttattcgtggcaaaaaacgggcatttaactagtgtaaaaggtaaaatgagatattcaattgaaaactaattacagaaccagtgctactactgcgtatgattgaatatacaagcaaggagttatcaatttatgttagtgaaatgaatctaaatggaatatttagggaacagaaatagattattaccgtgcaacctaaacgcctcggacagccttcaaagaacatcagggtcttcattgacctcctgtttgtctgttttcctgatgagaattctgaaactttatgcaccttgaacaattcacattgacctagtcttgctgaagcaatattgtcaattgacgaggcaatttgtgctcctgagcatcttgatatcctatccaaaagcggtctcttaacattcagaactaaagaaatatcttttgccaagagttcctgggcataagatgagacacttttctcaactagcagcacatttggtcgccgagactcaatctttgcaacaattgccctcaggtgctccttttcctgcatcaatggtatttcattcagcaaaacaagaaacaacaaatatatgcaacacaaccatgaagaaaacacaaacctgttcaagtatagtatcaatggatgctagtttgttcgtgaccttctgatactcaagtgctccccctaaaatgagcaattttgcattcacatgctcagaggccatgcgtttgtgttttacattcttagagcaaaccactcctctaacaagattgctgcataaaaggaacacccatcagtttcatatgatggaaagtacaaacatgtaaaaaccagtcaaacaacaaagctaagaacatacctatcacttggatcccctgatgctaaacatttaactttcacataatcagtaggatccatgctgccacctttcttggtatctggtctcacatagccagcagctagccaagctagggaggatactatttcaagccagcttttggatccattgtcattttccagatcaatacattctcccttaagcaattgagccacaagagcccggaaatgcccaagtacagcattcctcagaccctctttgtgagctatgtctgtgattgtgtcaacaccaactattttgttagtattaaagttaccaagagcaagaagcttgcccgagtccccagcctcatcatcctcgtagtcgaatccaaataatctcgcttcaacatcgtcaccctcatcttccggtgatggcgggagccagacattggcatcgaaatcagcaggataacgggtcatgtcacctccactcctgtctgcgatgccaccgttcagcctggtatcgcaaccaagagaatccaggctgaggcgctcgttcctcttggacgttggcgaggcgtcgttgtgccccaccatccaagtcgggctctccagagggcttggtgtcaaggacctggcgaccccgttaggagtactgacgctaagagagtctgtatctgaaaagtcatgtaagtagtcattccctggggtgaaaaactgtaccccgggctcatcgtcgtcctctccatcgcctcgcctgcatccacgaaaacaagtaccacaacaaattcagcacaatagtatttgcgaatcgattacaaagcagcgccggattaacaccaacaagcatacatgaacatccatgagtgctacctgcatatgttgcataatccactacacctaaattagtcaataataggtggtatcaccattcaccaacaccatcgaaaaggttagatgccatgtaagtgattacttaataataataataataataataataataataataataataataataataataataataataataataataataataataataataataataataataataataataataataataatatcgtaataccaagcaatctctacctcgcttttccccttttcctccatagcaagccaaggaagaagaagaagaaaaaaaaggaagtcgtggtagcgtaaggagggcatgagaaggcgatggaaatggagggagtacctgacagcgtggcagcggagcagctgcggcgaggagatctggcggcgcagggcgatggcgcgcctgccgcccccgggcctcgcggggagcggcggcgtcgtgtccgcggcgccgctgcgcgatctcgtcggggtcgcgggcgacggcgggccgctcgtctgccgggccacctcctcgccttcggcggcggcggcggggggcgtggggccggcgatgagggatctgaacttctgcaccgcccccagcaccgagaactccaccactcccatcaccaccaccaaaatatatataaaaaaaaactctagaagaaccacgccttggctcgcgtccgccgaggctaaaatccctcaccggcgacgacgacgaaggcggcggcgggtatatgtacagggttcggtttggttagtcagtggcgaggcattagggggtcagccaatgccggactggtcggggggcataggtcaggttgcccgtcgctgcggtggtgccgggttacgcgcgcgcggaggcggacgagaaggcggcggcgatggtgcggcggggggtgccgtcggagagcatcgccggagagagagagggaggtgggggtgcaaacgcaaagcgatggcggaaggaaatgaggggaaagggagggagggaagggggggtggttttaattgcggggatgaaggacggcaattcttaaggcctcttgcgtcacaccgaaacacacaaaatgaggcggtatttattgctcatacatactctctctgtccgaaaaaaaaaggcaaaccttatgttttttatccaactttgactgtccgtcttatataaattttttttataattcgtattttattgttgttagatgataaaagctcgtacatgtacagtgatacccgcgaatactttgtttaacccattcactcttagttttttactaaatgacgccgttcattttaactatttattttactaaaaagtttatatatttattatttattttaatgtggtttaatttgttatgagatgttctttcagcataatttaattttttacataagaatttttaataagataaattgtcaaatattcgttgaaaagtcaacgatgttatctactgaaaagggaggtagtaattgcatatccacaaatatgttctcaaacacacgctctagaatctggtgaacattaaaagcaccccctccctcctttccccttatttcgttccgccattaagaattttctactgttcatatcatcgccttaacaccgtcatatgaatagtcgtagaaaatcatgcatcaatgactactcatatgatcggtgttttctcatgcgatcctttaattaatagtaattttttaaggcatgcacatacacacacttaattcaaaatatattgtcattacatgtttttaatatgatcttataatttttcaatggaatatcttgatatacttttcaaaagtaaatgtgaaggtcaaaaggtaaagtcaacaataacgtatcatgagcattgagttgtctatgttttagtgtgtattcaaccggagtgagggagtttacttgatcaaatacgaacctaatggtacaacggataggttgtcagattaaatagaaaattacgaccctaactgatcgaacagtcggaaaaaaaatattagtacgaatggtctgaggtggtgttcttttttaacgaagataaaaaattaaattaaggcacacataaaaaacaaagaaaaaccattaatacgtgattaattgagttttaattatttcacacttaaaatataaatttatttaatatttaaaatcaacatgtatatagaaagttttcgtatgaaacgtaccgtttaatagtttaaaaatcgtgctaacgagaatcaagataaaaaaaatatgtatcttaatcagaaaaaaaaacaccaccatcaaagtgtttatttgtatcatgagggtagcatgagggtgtttatttgtatcgagatataaattggtgctgtacaaataattacataaatatttatcaatctccttataattgcactctttttcttatatacaaatttttaacaacagaggccaccatgttgttttcggttaaagaaacatggtgacaattgacaaacatctacttccatacccatcttttttcaaataaattaaatgtataaatacttcaaaagtattttatattaacgaagcatgttgtatcctaaacattgtcatatgatatgtctaatcatttaaaattaggtgatggcaaaagttaaaagtataatggtcaaccgtgacagttattacttaaggccggaggaagtataaagctaaattcacttaacgggaaaagaaatgtctagatatgaattctgcattacaagtcacaataatactaatactaatatttatggttggaataatttattttctcgttccaattcgtattgcatgatcaaacgtttgttttcgaaaatgtgtacaatactaatgtttttaatcttcttaactagtactatttacaatgcaaatgcagtgccctcttgattatatccgaaataacttaaccaatggatcaaccaggatttattatttatcaatgaaaattgcatattctgatacatatggctgctaattttatttttgggtggtgttttcaagtcgtgttgcgctgccctcaaaagacatacgtatatacgcacatttaaaaggggcagtgtatacgtgttaggaatcaggagcaaaattaataaatacgactagtcgtcgcaaagtaatactcctaccgtgacagttgagagaacccaattatatgatgaaatatgggcaccataatttctatggcccacatgtcagccttaggttgagttaatttcccagctttcccaactcacctcttacttttccgcgcaaacgtttttaaaactactaaacggattattgtttatataaaagttactttaaaaatcatatcatttatttttaaaaaataattaatacttaattaattatgtgttaatgagtcattctgttccacttacgcgagggattagtcccatccccaggtactgaacacagccggaggattttataacatcaaagtatatttatcagttaagccgaaagtggatgtggtgtgtgtcatgcatggtcggatagtcggaggaccatgtcaatcttgtgtggctaactcatggattgtcggctaactgttgtgtggtgtgaagcgagcgattttattggggtttaataaatactcctgtcttttcttaaattgttagggtgtgtgcgtatcacaatctcacatcattaacatattatatggagtaattaagttttgttattataggttagaaatataatattcccttcatccttgtttgataatcacttaagaaaaagcgcagagattagggacaataaaattttcatcactctgtagttaattcttatcaattaacatgctacatcgctttttatcccgtgaattgtatagaattttaaatatttacaccaatataaattaatcttaggtagctgcatgtagcacatttaatgatgttcatttactctttatttactctttgtccaaataaataaagagatacttgatagagaataatcatttggggaatacctcaaaaatcttaggtgataatcaaaatggaatagagggagtacttgttaatttgtgttattcttaatttttttttataaaaatatgattatgaaagatacttataatcatgtgtgcgttaaaggatatcttatacgcaagttataccataatttaattgaaatttggtacaaaattaattcaaatcgaaaggcataaataggtttaatttttattgaaatattactattgattaatttgttaagatcggcactacatatttaataaactctgaagttaatcttgcagtaccatgtaaaaaaaactatctccatcttctagtaacaatgaagcactcaaaccgattatctactttttttttccaaaaaagaaagttaatttacctaggtatatacaggatgtagaaaaatatggtctgttataaagatcagtatccagtcagtaaaaaatgaaaaaaaaattaattagccaggataattatttcaaatgtgtgtggcagcccttgcataactttactctagagtcaagtcatggtactactaatttatctttagttcccacaagtcatggtagcgttgcataacgtaagtaaatcttgcttctttcgattttgaatgtaagttgttttagcacctctttggaaaattagaattttcatggtatttaaactaattcatgtgaaattcctccaaaatttctcaggttcaaacgcgcacttgtgattttcattttttttttcaaaatatgagttgttttgaaacacctaggcacattttccaacttttacttttgagtttgctcttgtcgagttatcaccacttttacaaataaataattaatccatcttttctaatgtagtatgaatggaagacatcaaattaatttgagcttttttaattgattctggtacataattaaatactgagcataaaatggatcattcatgttttctaatctagtaagagcatccctagcagatgctccatccaatcctccatctgagaaatagcgtatgggagtgaaaaatcggcctccagcaaatactccatcggctatgccaaaagtagtggatcgccaaaacaggagagaggaatgccaattttggcgttcctctctccccacgccaaatcgcaaccgccgctctcccgccaacatccagagttcacagcggcggcagacaaagcgggcagaggaggaagaagggaggtagagaggtggcaccagccagatctgggccgggaaggttatcggagaagaagcgccgccacagctcctccgcccggcgactgcccgcgccgttccgcgccgacgaccctgccgcccgtgtcgcggctcctccgctcggtgaccgcctgtgcaactccccggccgcgaccccgccgcccgtgccgcggctcttcttccgcccggcgaccgcccacgccgctccccgcccgggaccccaccgcccgtgccgttgctcctccgcccagtgactgtcgcgccgctcctctgcccatgacccaccgcctgcgccgccggtcctccacccacaagctaccgccgtcgcccctccgctcgtgagccggcgccgagatgctgccccttgcgcccctcgtgagctgctgcttggctggaggcagaaaggaagaggaagatgaaaagaaggatgagaggaggtagagagaggaggcagtgaggaggaaaggaagaggaagagggaaaatgtggaaaagaatgagaaaaaaatagaaatatttattttgttataatttttgttcaagttgtatactttacttattttgctatgattacaaatatattcatttcaaacatatatttagtcattcaaaataaaatccttgtaaaagaaattacacaaatgtatggttagttagataatactccctctatctacttttgatagtcatatttcatcttgacacatagatcaaggataagtaattctacttatcatccatttaaaaatgctactccctccatctacttttgataatcatatttcatcttagcacacagaccaaggataagtgatactacttatcatccatttaaatatgctactagtcattcctcgtaaacaagcgattcattaatatttatatttctcgatgctcatgtagccaatcttgtgtggaagaatggagagtcacgcattaaatccaataaagccattaatatgataagttgttggattgaaatatgcctatcaaaaataaaattttcagatttggaaatatgactatcaaaagtagatggagagagtactagtcattcctcgtaaacaagcgattcattaatatttatatttctcgatgctcatgtagccaatcttgtgtggaagaatggagagtcacgcattaaatccaataaagccattaatatgataagttgttggattgaaatatgcctatcaaaaaataaaattttcagatttggaaatatgactatcaaaagtagatggagagagtactagtcattcctcgtaaacaagtgattcattaatatttacatttctcgatgcccatgtagccaatcttgtgtggaagaatggagagtcacgcattaaatccgaaaaagtcattaagatgataggttgttggattgaaatatgcctattaaaaataaatttttcagatttagaaatatgactatcaaaagtagatggagggagtatctcagatttaatgtgtgactctccattcttccacacaagattggttacatgggcatcaagaaatgtaaatattaatgaatcgcttgtttacgaggaataactagtactcccttcattccaaattgatctacatatttcataggtacaccaaaaccatgaaaagctaataactctctcatactatatttactctagcaataaacttgatgcatgcaccatttctactatttcctagccaatagcaaatcaacatattgcatgtgggttataaatatttgtttgcatggatgcatgcattaatatccatttactccatgcatagataacgaatagacttaatgaatgaatacaaatatgtatgttatttaggaataacctcaaaaacactatatgtagatcaatttggaatggagggagtagtatgtttaaatggatgataagcagaattacttatccttggtttgtgtgcgaagataaaatatactccctccattccataatagtataatgtacaaccactttgtttagatgtttcataatataagacatgtatacatgtagacaattaactatggcccctttttcattaaattattacttttttaaatcatccactctcatgttctctaattctattggatgcatgtattgtatttattaggatgatccaaactacaagatgataataattatttcttagtctttaggttaggggtagttatgccttatattttagaatgaaagaactatcaaaagtagatgcaagggagtacaatggttgggttatccacccgagctaggcagctactactactattcatctctcagtcaccttgaagctttcgctgaccgttgatcactttatctcccttttcactgtgcatgcactgcacggcacaagaggagcagaggactatcagagattcagtgagaaatttattgcatgtcttgagcgagcgacttaattggatcatcatgctgcccacattactacgccactgtactactaaaattcgtcctaaaataatttttactttttttcatctcatatatattaataaaaaataagactaaaatattttttctttttttaatcctaatataattgtcccctacattatctagctggtcatatatttttatcaactctaatataatgcttgttcatgaataaatttgttttaacataaataagaggagacaaagacgaagggagtgcgatttaggtctaatttagtgctctaactcttaaggctgtgtttagttccacaccaaaattggaagtttgaagaaattggaacgatgtgacggaaaagttgaaagtttatctgtgtagaaaagttcgatatgacagaaaagttaaaattttgaagaaaaaagttggaatctaaacatgtcctaaatttaactttagaagttgggtatagaatatagttgtgaagcagttaaacccagttttatttctctaattcatttgtaagagtgctctagccagatccgctctagtcagagctgaaactatttagttgcgctcaagctctaaaagagatagagttagagagccctgtaccaaacaaactcttatcacagcttagtactccagtacagtagtaccaagttgactctgcatatttgtccgacttacgccgtgtttagttccaaaataatttttcaaacttctaattttttcatcacatcgaaactttcctacacacacaaactttcaacttttttatcacatcattctaatttcaaccaaacttttaattttggtgtcaactaaacacagccttaattaaccagcaagcgagcagttctttgtctcgtcaaagatatcacgaactgaaggactgtacactagaaatctttccctaggggtactggaaattaagcgaatatgatcgacctacccacatgtagtacagtcgtgcgtgtgttcattacgcatgccatgagaaaaaaattatcgtatcggatcatcgaaattaataaactgaacacggaaaacccttagacttataatatgatgtgctatctaggttcacaaacccttaaaatatagtttcgaatctcaaatttgttttggatgtcatgtcacgatgatgtctatgtgttgtgagactatgattttaaggacctatataccagtcacatagaaaaacaattaaaaataaagaggggagagaggacataaggatgtttttaattttgaaaaataaaattagaaaaagatagagaggagaaaaatatgttttttatttttttatatgtgtgtcagggttatagataccacatacctaatagtagttgactaaatcccggcaggacccaccacataccatgtcttgtatggaaataaccttcgaatataggaggagttccacataaggaaggatgaatagagttctacatggaaacgacaaggactactcagattatatccatattggtttccctagttctacttggacaatgggacacttatgggtataaatacaaggccccctaggaggagaggggacacgaaacaatagatcaagacacaagatcaacatacaagccaacatacgccaagacaagacgctggatatcgacttcagagataagcatggctagtcccctacggtgtctatggatactgataggagagacatagcgctatctttgatcttgccggatgcagattcgaggaggaaggctaccctgttgtcgactacgagtcagcacttcagaccgccaagtcgacaacagttagataggctaccccaaatattgtactggtgtaattatagtgaataagagcaacgaccggcttcggccaacaggagtagagttattacctgacaattcaggggcccaaacctatataaaaatcatcatccccatctcttttattacaatctcgcatatatcctaataccaacgatccccatactatgtaaataccggaatcgcgacatcaaacgtcgacagtgtgattgacacatgggtcctactaactttttatatgtaattttctatggctaattggtcacagccaatcaaagcgtaactatgcccattctttgtaccgggcgtgtttgtctctaaatatatactccatctttttccctacaatgttaagttaatatatagtatttgattagaagatcaatatatcattgttttatctataattcactcaagttcatgctacaatgttaaaaggctctacaatgtgaaattgtcgaagtcatatatatgggggcaaaccatccatcccctacccacctatctctcgtcgccgctaatgtcgatatcctctattgccattgtattataccaacactcttaatccaaaaacaatcattttcaccattcattccaaaatttcaatgctttgaaggttgtgatgtctcacagcttatgtgtttagagttagggtccatacaatactgcagaggatctgaatttaagccaaacatgtatagtgattgagttaagtagttcctcgtagaaagtgaagctgtctagttctatttcataatgttacttttgtgcagaaaatggggaaaactcgagaccattgttccaatacagatactccataactttaggaatgaacatatcaattttgatattgtgttttgctaacggaattctattttaaaaaaatatgaaaattaaactcgaagcatgaagacacacagtgagtcttagtaccgcactgctgtacaaaaataatactgtaggaagtttctgaaaaagggaccgagttctctaaaattgaatcattatatttaacattccaatttaattgtggtagccttcgtagatatttgaattttcacaattaaaattgagaaaataaaataaaaactgccgtgcaagatctccacttttcgaagttcgattcagagttttgttttttttttaaaaaaaaaacaagctgtaaaaatgttctaccaaaaagtccttcaccattgcagtttgtttgctccagtttaatttatatacacaattttttttatctagaacagttttaataggagttgactgctgatttctgaatatacaaaacccgttcggtgatctggaggaaatacaccaggaagcttctttgtttttgaccataaaacaaactacacattattcatattatttttgcaaaaaaggggtcagggccttttcaaattgtcctctgcgagttcttcgagccacctggtcgatacagcgcatgcagcacccatttccgtgagacgtttcgttcgcatttagatcacatattaaatcaaattatatttgttaacaattttatgaaattaaattaaattaaattgtacttgcgcagttctattgtcgaagtcaaattttagttctcgaacgatgcagcgtgccttgcatggaaaattctccaattttttatccggtggacagctaatatggatcattcaactttggattttgtcctcattacaagaacattatgaatattctgaccggagaatatatcttgaccaaattctcttgtcactaatcggataaggggaatgatcgcgcttgtgcaagccatgtcatcactagcaattaattaattgtgcaattattaattaattactaattgttttaaaagttcatgatagaaacgagccttgctattggtcagttggtcaagtcatcctcactgtgcaggaattgcactcaaatgctcaatgcaactaatcaattcaaaatttaggtgatgatttaattaggtacccaagagcaaacgccaaggccgagaataattagcatgtgaaatcgcaggctttttgcatgctttcgctgcatgattaattttgtttgttgaagagcaaagatcccatttaaaattgaaattaaaatatataaacacgggaatcagcggccaagagcaataaggacattagcaggttgtgcttagagaatgtgagcatgtgttaggagggaaagtgttttatgtgagttgaattaaaaattaaccctgggaaccacttttgattcgatgcacgagtaccattttcccttttgaaaaatgtgcaaatataaatacagttaaaccactctttcgaagcactactgacttgtatagttaaaccactcattctcacattgaaataattattacccctttcgttttaaaatatatgatagtgttaactatatatcctttctctttaaccactaattacttttaaacggttagactatgatgaacaaaattattatgcatgtatttaaaattcagtacactcgataatataatagcttttaaattacttataataatattactgtaaataaaaggagagatcacgagttttgagaatgaatagttccactatcaataatttaaaaatggaggaaattttggaccatatgacttgaaaaggaaaatgggttcaaaaagattatttagtggggctcgtatatatattgctccttataaacaacgaaaaattagaggtaatcgagtttagccaatcatcatgcatatctccacccaatatgaataattcaaatacaacactcggctaattgtacatatattattatgaagacctatggatttagacaaatcatatcgattccaccactccaaacatttcatcggttttctttcgaactacccctctagcattacacctagtatatagtactatagtggagcgacttgtaataaaaaaaagttgactcataataagtggctggctggggtttatttgactccgaaaaggagaaatggatggccactaaaatgtatggaaaaaattggaaatggcaaggtccttgtggccgagctgcacagtacatccaacctatcctgtttaaaatggtcaaaaacccatgctgcacgttataaactattttaaacttttaaaatatattaatatggttttttaaaataattttcatatatatatttttttaaaaaaacacatcgtttaaagaagagtgcacgcggaaaacgaaacataactttccggcaatctccagctgccgaacgcagcatgcaggaatcagcaacaggaaaaaggcagagaagatcggtgggcggcggcgcaagcggccaagatttggctgcatcaaaactcaaaagctgatgcctttccaccggccttggctagcagctcatgacgacatgtgtaaggactacgggccggtttggtttgagtcctaaattggccttatcaatatttgataattttaacaatgtttaatgtctatttggtttgaagcaaaattttagcatgcctaagaaaataggctatttcaatagttaacttaggctattttggcttcaatccaaacacaactttaccttgccaaaattagccatgcctaaacttgctaaaatttggcatcgacaaaaattggtaaggccaatttaggtcacaaaccaaaccagccctacatgtggattaatctgtaaatccacttaaaagttaaacaagtggataatttgtttggatttgtggattgatccacttgcagccttagacctctgtatgaccagtgacgtgaagttgagcgttaaagaatcaccaacagtcatcgtatattgtttccaaaactgattttgaagattttaactgaaaaatcggatccagcagatcccctcacacgttttggagttctcttccctgtatttctcgctctgtcgatttgagggagagcgatcgcttcctctgactcccaatcacttacgcgctggaagaaccacatgatctatttgcgtgcatgtaggaaaacagagaattttattgttagtttaacataagggttcacttttatttttttttgataaaatttaggctctctcttgaagagattagttatttttattttctattttcagtttaaaacaattttttttgtggaagatcatacgtaatctctaggtgatgctctaattcggtgatgccagtggagatcatcgtaaaagaggtttagtgagataattgtgctaaatctgaacttaatctctctactccctctaaatattagggggaatctatatattcgtcaatcatgtagttgattttttcccttatctatcaatctttttttctattctcctgtctcaaaatatagcaaaacctattagtagattagactaatactacgaatatagatcgaatcgagtaatatataaattagaacttagcaacttacatgtcaatccttaattttattgaggtgaaacaatgacagctatatggtactccttccgtcccataatataaggaattttaatattttgtttgtactgtttaaccacttgttttatttaaataacttgtgcaaatataaaaaaacaaaaagttatgcttaaaatactttggataataaagtaagtaaaaacataaataataaatctaatttttttaaataagacgaatggtcaaatagtgcaaacaaaatatcaaaatcccttatattaggggacggagggagtaacaaacttgttggtgtggcaaatttcaaaaatcaaatattggtgattgataaaccaataagcaaatgattgatatattttgaattgtacaagtttagtctattgtcgtgcaagtgtagtcatccaaagagttgaagaaaaatcaagtgagattaacgaatactctctgtacgagggaaaaaactaattttgtagctatggatttgtataaaatttaattctttttgatacggtggagtaccaaaaccgatgtaatatactactgcctttgtcctaaaatataggaatttttgaggtgggcacagatattaagaaagttggtagaaatagttgaagaaatattgtgattggttaaaaagagaaaataagtgagataattaaatgtagaatgactgtgattggttaagaggaggtagttgaaaaaataacgttattttgagataagttaccgtgttagaaatagttacaatttttacacagaggaagtagtaagaaaatctacatagccggagtatcttatagtatcaatcaaccttttcctagaacttttgcaaacatttcccttctcctagattagatgttcatgttctctgagaatcccaaggacaatggcagacatgccgtgacctagtcagaccccaagctttacagctcgatctcctccactaaagtgtctcctggcgagcatgaatgcatatgatcttttttcacagtaccgctactccctcgttccaaaataagtgtaattttaatattgtttatgttcaacgtttgaccgttcgtcttatttaaaaaaataattataattagtatttttattgttattagatgataatatatgaatagtactttatgtgtgactaatattttaaatttttttttataaaattttcaaataagacgggcggtcaaaacactggacacggatatctgtggctgcacttattttgaaacagaggtagtacctgccatcaatctcctctcatatcactcaattaatcatacatatcactcaattaatcatgcatgatgcatcaagtgcacactctgacagtccacactgcacaagtgcacggtgcacacacaccagacaccaggcagctggtacaataatcacctctcactcacagagctcacactgtcagaattaatgggaaaaaaaatccagatccttcaggtgggccccacaaagcctcctagtcagatatcagtatatatcacagatcagtaattcagcatcacccccataaaaagcctctttccatgagagggacacatattatgttgatgcagcttgggttaattaattagttacaatttccttccttatctgctctacttgactaatacatgacttagttactatttttactatcagtagtgatcaccataaaactcgtcattatcactatgtgttactccctccgtttcacaatgtaagtcattctagcatttctcacattcatattaatattaatgaatctaaatagatatatatgtctatctagattcatatatatatctagattcattaacatcaatataaatgtgggaaatactagaatgacttacattgtgaaacggaggaagtaccatttatactatcaatagaaaccattgcaaaactcgtcgttatcgctgtatgttaccatttctactatgagtaggaccaatcataaaattctttgttatcgttatctgttaccatttatataagagcaagtttaatagtatagctctaaatcatctataactaatttaatagctcattaatacaatagtcatatgtaaatatatacttcaccattaatatatagccccacctctcatacacataatgctttagaggtggggccagcatgctgcagttggctacaaatctataactcgctttccttttctatcttctcttatcacctctacatgtgcttatagcttacttgtagtcactattttactgtacgctcgctttgcactatgcactcttgtcaccacacagtacataccttggctggatagatgcacactgtccatccaagttgccattgcatcatgtttcatgagctgcaggaaaccaaatggagccaggcactgaaactcattgagcctatttatgggatgatgcttaagttcaatcaactgtgtgattggaattgtttctggggagatgaatttccatggccagtggtgctggagcatgggtggtgatgagctgttgatattaacctgtgccctaggtgtagggtttcttggtggatcatttgaatcaaaattgatcaggttgcctgagttgtcaggatcatctaggggccatatctttacttcttgttggagtcacctcaaacccaaattgtggatgtcatggtgatcatcagctggggatttattataatattccacattatagggctcaaatgatgttcatggattagacatggataactctttggtttgtcattttcgttgaattcaggatatgatcaatttgttgtggaaattaattctttttgccaacctttgtgtggtgcagtgtcagcctaaggccagtcacaatggctagtgtcattgcacggctacccaaaatattataccatcttctctcaaatgaaatcttttatgaaacaatccccacagtggaggggtttcactttgacgtttccaagactaagcaaagcatttaattgatacaagttgctgggatcatttgtacccaaaatccggcgcggcgcgggagaatgcggaggtcgcacggcggaggcggacgcaagagatccggtgaatgaaacgaatcggcctcaacgggggtttcactctgttaccgaggacttggaaacgacgctgacgagtttcaccaggatgaaactctttccttctctctcatcccatttcatgcaaataatcattttttattcagtcttacccctattaaatgtgcatgacacaccagtgaaacccccattgtgactggcctaattgtcaagaaatgattttgcatgcgactgccggcattggaatccggaatttgtttgatccgaggacaaatatgcagcatgctgacaagttgaataattatgcaccattacttcaaattgggaataacatgtaaatccctattttaattccatgtttgtggtaataatgccgggattgaattggcctgtgtgtgagggcagcaaaagtctggatttgatcttcaaccaatacagcaagttgatgcatgcacaaccttttcaatctcaggttagcaagtggtttaattaagagcattttatcttggtacagctcatttttcacagtacaagatgacattaaattgcaatttgcaagtgctaactaaaaagttgtgcacacagttaagattcagggtaagagaaatttaagcatttgacctgcaggataaaatagccaggttggaagacttataatttccctttgcagctttgataacattattaattacaagcaaaagtgaaaatgtgagtagctgcaaattaatccccagggaataactatatatactttgagaaatgggaaaattaaatgaaaactaaatgtgcttcttgcatcctaattttgcaggtggaacgtatttcttgggtccaatcaaatcagcagataagcatgcaaaatacgcacaaaacatcagatgacatttttttagaagatcaaaagaagttaggtacacattatgtcactgagaaaacaatgttatcttagcagctctgatacatgtttgaacaagaaagaaaatgacaaggcaatgaggtgttcaagaaaggaggagcaacagtgaaggtagccattcagagattctatggccaaaatctaagcagacaacaacagtacatcaccacaactgctagctatatctttttatggaacaataatatcacattaaactatgatgtacagtcatctcaacagagataaattatcctccagaagcaatatggatcagcagtgccctggtctcacctttttcttatgaaaagaaaattagttcctagtcacatcacacaattcacagagtcacacaccagaaataggccgagtttagttccaaactttttcttcaaactttcaacttttccatcacatcaaaactttcctacacacacaaacttccaacttttccatcacatcgttccaatttcaaccaaacttccaattttagcgtgaactaaacacaccgatagtccattttaggttatatgtaatgttcatgattacttgatcatcaaacactactatgcacatcttattgtacaactgaaaaagagatctacaaatgtacaggtgtagaactttctgcttcccttgtggcataaaacagaaggactgaactactgaagcaatgaaaacttgaaaagtaacctttggaaagaaaatgttggcatggcagacagaaatggttgcccatcactttacatccattgtcaatgtgggttgtcattactgtttttgtcaccaagaaaaaatgggaaaggaagttttgtttttcgatgcgataaatcgctatcaggagaaacttagcaggacacttagaagcctacaagtcatcagaaatgatggaagcaaggaatcttctgattgtgtgatgacaacatgtgctcctgaaagatcacacaagaaggttagatggtgggaggagctgtatctgccaatgtttggtcccaattattcctggaaaagtggtgtaagagacaacaaaaggatgaagcaaaaagaggaagaagatgctgtgacattgcatccttgattaattagctttttggaaattatggtttgatcatgggcagagttaactttgctttggctgtgttaatctgatgtgtagcaagaatgttcagcttccttagtagccaagatacttgtgattcagtaaagtggactggcttttttttctgtaaggttacttgggatcttggcaagaactttcttgtgagctgctctgttgcttgagagtagctctgttgttgcatgtgcttgttgagattattcggtggttggttaataccaagtacacaaatggattatataattaattcttgctattgtaaaagtagttcttgcagaagtttgagcaagatgaattgagaaactaatttggacaaaaaagcaaataaatgtgtccacttggattgaagtttggttggcttatcagtactgtataagggttagctacatgggccttaagtgtcaacgtaggacaaataggcccatagtgggtggatttgtaagccgagtttagcaaggaataagttcactttaggtccctcatcttgacgatgagtttgaattacgtccttgaaattacaataccacatatatcacgtccctcaccttttaaaaccagtaaaaatgtaattccaagatagtatcgtaagctgttttggctaatgtggcgctaacatgacaccagaagcaaaaacaactaatataaaacctcatggaccccacatgtaagtgaaacaatattggaaccggtgaattttatgttgtttgtccatcagaagagcccatatgcacagtatgttctcgatctattgatccaccaaaacaagcagattatccaggctgttatgtcaccaagattagctttgcagtacaaaggagtaggtggccaatttggccaggttatcaagcaacaagaatacatgaaaaattaggtccaaatatcacattggaatgacagaattgcagtagattttgagctacattttattcaccaatagaccaatctaaaactgggaagaggggcggccgccgcggaggaggagggagcaccgacgtcgcgtgttggggatgctcatcgcggaggaggagggagctgccaccgcccgctgtcggttgcgcagcctagagacctagacagagatgggaaagagaggggagagggggagatagagaggaggaagatgatgttgtttcactaacatgtgggggcccacaagttcttttagtatttgtttttgcttcttgcgctaagttaacgtcaggtcaatcaaaacagcttacatacttctaccggttttgaaagatgaaggatgtgttttaattggtattgtgaatttgtgattcaaggatgaaatttaaactcgcggcaagatgagggacctaaagtaaaacttattccatttacaaatcattaggcccccatgagcacattgatctcccacaattgaatttgaccaacggttttgctatttcacttccgccagatttttgggttcgtaacttttgaaagattaacaagcaatccatttgatcaattctgaacgtgttatgacatctctatctcattcctacgattccctcccagtgtctaggtcctcacatccaggcccacctccagatcgcaaatctagaggtcctggtcttcgtccatcatttgatcgaatttactgttcaaatttgaaatgctcaaaaatcatttaaaatttgtctcagaatcttctttcatctcacactgaaacctcaaaatttttgtagctttcaaccaaatttgaacatgaaccttgtttgccacatcatcgtcgaactattgatatcccaggtggctaccttcccaggcaaagcactacctattgcagaccagtgtatcggatggtggatgggacatgaagcccatgacagaaaagagcccatcactcatcgacctgaccagcagcccacccaaccggcaacggtccattttaatttgtccagaccatttccgcgaacatttgtgtttctgaattatttttcatcagattttttttaagaaataagtacaaacgtagccattcacaacacgggtggcgcacactcacccctatgaatacacacaccctatatgagtacttttgaaaaactgaaccgatatattttaaaattaatgcagttatcatggacgtctcattatcgatgagtacatcacttatcactgaaagacccgatttagaaagtacaaatgttaaagtggtatattcggtcagtgcgaatttgtgtgaccattttcacaaatattcatgccatgtcttttatgctcccatttttgctagggattttctttcttttcgagatgttacatcatatctcccctcgtctttcttttcttcctcaacaatgagccatgtctttgttgcctctttcacatttttaatgtggttgacaaagaggtgtgagcacccaaccacatgtttctcaccaccaaaatgatgtggctcagtcgtcgtcactgtcaccggcaatgaaaaaactcaaccgctgaaggaaagattatctgatgaggacacaactagctcgaatataaccataactaccttatgtattaatcaacagaaggtgcatatgttctacattagatttacatgttatatatttgaaaaaacgttgctacacaatgagtttcatgtgtttttatttgcaaagatacttgcttgggagaaggaaaaaagaccgagcgtaacgaattcatagatgataaagaagttgattggggaccatatcaagaccctctccaagtccacttccatctcatcacgtcacttttggtccatagaagacaagagataaagttctacacgttttggattcggattcgagcctcctgacagcatcaacttcaaacggacctagccgctgatctagaaggaatttcggggcccatgagtacttgttggaaagcttatggagtctactttcagatggttttggtcccacgtcaaaattcctaccgagctgctgggaatctgcaaaacaagccacgtatctcatccagtccgaatctgactcgggttttgggccttgtaattttgtcgtgggcttagcccaagggggtgtgcgccctagggcaaccctaggacgtccctaatcatattaattcagtagccgtcatcgtttagagttgggttttgcttagattattctgtcaagaacagtttcgccgctagatcggtttgtggaaccccaaattcgagtgcttaatcattcatatgcaatttggttgcaatctatcttgttcttgcttgtgtttttcgattcacatgcagggattagccttctcggcgaggtcaaccaggtttcggcacggttgataaccagaggagacgtggtgctgcgattgcgaggctcagtagcgtgttcgttcagaagtcggatcgagttatgtcaccactccgtccaaatcgactgtttatcaatacctatcggaaaatcgggacctacctccctcgtcactatccctacggtttttcattaagaagaagaagaagtctcaactaaaatgagggatgaggcaacatcgaggaagaggatgcccctaggttcctccttcgttgtagacatcgagattgtgtgctgctgagggcaaccaaatctatgatggttcattaatattgttagttaataagtgtggcttatgtagaatttgttaacttaaaattgttgtaattctgacatatttagatgaacactcatattattagtgtagaaataactataatgactgattagtatgtacatgtacaaatatgctgatgatataattatgaccgaccacatatgcacactggtttgcgctttgcagtggtggagaaaggaggggcaaccaagggttcaagacgttcagcctccctgaatttctcataatttgcagcttgaatgaagttttataagatcaatatcactggtctccttcaacaattctttttttaaggcataatttgctacatgacacttaaattttatgttatttgctggtagtcataaaaatgtgtcacggctaaaagacactctaaaaactagtaatttgctggatgacactttcagtttaattgaaaagataaattcttcaaaaagacaagaatgcccctagggtcaaaagcttttgagctgaaactagagtgaagatggaatataatgtatgctaatgatgtacttagggtgatggcaaatttagagttacataatttctaaattttactttaacgtcatatttgagcatgtggtcttagagcattctcgtctttattaagaatttatcaatctaattgaaccgaaaatatcctcttgtaaataccaattttttaggatgtcttttagccgtgacatgtttgttcgatgtttattagcaaattgcataaaatttagatgtcctatagcaaaatttgccttttttttaaaaaaaaagttttctggctctgctgctaccagcttgtctatactgtgtgctatgtgctttattattagctagtacacttcagaattgaccagactactacagtatctctttctttacaatttactagtaggtaggtaaccaatataggagaaaagcacaatcctttaaaaaagtataaacaatcatgcagaaatctcgttagctaccaacaaattaaccagtactaataatcaatctcactaaccaaccgtttcttggtccccatgctcatggcaacatcaccccaactgtgcctgtgtaccatgcaaatcatatttagtatgacgtttaccaaaccttctagtccaattaaggcacaaataatataatcaagatgttaattaagatccaactgcaaactgcatttcgtcatcaaacacgtagtagtccgtgagagaagcaaaagctgaacttctcgacgaagttgacgtggcatttatgcgaggaaattaaagtcaatattgatcattggatactcacacgtgctatagatgcagagcaatgattagtatgacgctagctaatcatcgtatatttgaacatggcactaatctcgactaatttgtcaatcagtttcttattaccatcccaaatccaattctcaaagagcgagggtctcgaataagaaagaaacatgaaaaccgagttatgaatttgccccctgtttcaattgaaaataagagggaaactcgcatttctttttttttttctagtacaatgcgcgaacatttacttatgtgaatacactagtacaccttagccctacgagcacatccgactggtccagtatatcttgaaattaatcgtaaatatgagcactcgtgtcactcactttgtgctttgtttgcattttgaaactgaacaggtaccttgattgattttaacctcataaacttgcttgaattagatattaaacgatcaaggaatgtgctctcatttgttagttacgatctaaacaattatgaaccattttgaaaaaaaatagataacacaaattattgtgcaagctttctttgaagataataaggcatactttgttaataattaaaattaaacctgacctctccatctatcaggaatgcagaaaaaaagggaagaataggtgcaaaaacctaggatagggatcacaatatcatgccaaacgccaaacactcgaagattccaacgattgaatctgtagcataagtatatatgatgcgtactgtagaacaatgcctttaagaagaaaataatttttgtccactggtatcattcaaaacaacccaaatatcaatcggtgctagattttcatccatgtaaaagttagagaccacattcagcaacgaaacaccaaacatttatcaggcattgtcaaactaaatcagggttttcatgctagagttgagtgccaacattatacaaccgtccatgataggagtttgtgccctcggcaaaagggccaccatctatcagagaagaaaccacacacacaataaatcgtgacctcgaattgtcgactaatctctccgatcacaacgaaagaaaccacccgcatagtccctctcgcattattatgtactccataagatatcccttcacaagtacgcatgttatttttatttcttcacgtgtagattaaatctaactatatatgtctgtgtaaaggggcagacaacgagagagtacatgctctctagtctctagggattaaaatagttaatacatgtccctctgttcatgtcatatttttttcatgcccacattcaaaccttgacagcatagcaacccccacctccaacaacacatccacttctctccctgtaagagccatgcttcctattggaggcttgaatattgtaaaatcaaataaatttgcacgccttttcattcgagtcacgaggagctggatgagaagaagctctcatgcataggtggatctaggggtggtcccggaaccattcaaataaaatcctagcataatgtataatatacatatgtaagaaaaacttttgaaacaaagctcttttattaatatattatatgatgcacatttaatcaatttatttttctaactttgttatatttaggatatttaaaaaatatatatatgttagaccacctatataaagatcctagatatgccactgctctcatgttcggttctatagtaaggatgaaaaaaaagaagagaaaccatcgactataaccccaaaattaaaaaccacattatttcttaacacacatataggagaaataaagggaaaagcctatcgaggcaatcatatttgtttgatattttgtaattatcattttttatgtgagttatgttatcagtaaaagtattttaagcacgatttatatctcatgtatttgcatacagtttttaagtaagacgaatagtcaaacatatgtctaaaagtcaacagcgtcatctattcaaaaatagaggagtatgtaggtcgaaattcggcctttgtatccacgagtagatatacacatgtaatttgtttggttgatatgttatccaagcagtcctcggcacatccactgagattaaatagcgatcatccatgctttccaaagttgaaaaaaatcccttatctttatccacggtcaaagtccatatgaatgcaacaagatgcgcactaagaaaaaaaggataacatcagtagcaaaaagaaagaaagggagatccacactaaccggacaataatatgtacaccgagcagtccatgatcacactcacacacacacacacacaccccacaacacctttagcatctgttccttttctgttttttttttcttcttttcctacacaccaaaagtcaatcaccaactaattctaagccgtttctgacgacaagaaatatcagataaatattcagattaggctactacagctgcagatgacaagacttcgtcaggctgggagagacaggaagccattcatatcttcacatcgcagcttctcgtgtcagtgctcattgctcccaattaacctgcaaacgcgatagtaatcgatccatctcattatctcctccctgaaaacattaattctctaaaattcgcctccatccatctgcactactgtttcatggtgatttgcatgcaataatgccgatcatcaaatgttcagaagtcgatgatctcgtcaggtacgtcagtcataaacctcgccttcttctgccaaggaatcaacacacaagagaaaccaagttcagaacgaaaacatacatttcagaaagattaattcaaagcgcatgaatttaaacattccacagcatctgcttctcctcctaggtgtgttttgatttggtgtcaattagctagaggggattaattcggattgctttcgttcggacaaggacgaatggcttttgtgtggtgtgtgcgctgcttttgcagcctgtgcttgaatcagaagctatccatggatttggatccctttctgaccggccatgattgtgtccgtcaggacagaggacgactaactgcaccgtttgatcgattcgacggcctaaccgacactccaatgccggccataagctggtttcatcgagaggaactgttgaccagttcagataaagttcagatacgtttacatttcttatgtgtgtatagaacaaaaaaagttcagacttcaatttttcccaaaagaacacaggacaggggagcttgtgattttttttcaactactcgtgagaatatagaaaatttgagttttctactttctatgttctgattcatttctagtttttataactatgaactattgaaatcttgtttagaagttagactactttaggaagctgaagattctgaaagaagccgcaagtgtctaaggccctgtttaggggagcttgtcccagctgcagcttttcccaaaagctgcttctgttagaagctgcctcaaacagtccacagctttacagattctgaaaaatgaactaagaagccaaaagctggagaagctgggtttcagagttttttcagattgtcagaagctggctaccaaacagccgcttctcagaatctaaagctcccccaaacaggccctaaacctcttctaacaacgccatagtatttaagcatagattctaaagtagttgcagatagacaaccctgatgttttagaagtacattggagtgtaatctaacttaggtttagttccatcaacttcataaacacgagaggtccaagacctgtccctctaaattaatcactgttctaatgtattcgttaatgatactgtacacaattgacattggagaatggagaatgcattgacagcttccacgtagcagccagctactagctgtacctagtactacatgaagtccactcttgcaattaaaactctctctagaaaaaaaaccaacatgtcatgatcgatcgattcgcgtaaacaacgtggttaatcagtttcagtctaattaaccaagtgccagaatctaagcacgtgtgattagttgtattagtagtactagtactcaattacattagacttacttgctcatcatttgacctcaaattactcttcctagcaactcctctacatgcgaaatttacctatttaaagcaagcactcttctaagttgaccattgccatattgacctttctttagtaggaactcaaccacttgatcaatggaatatataaagttataaacatctcaatgaaccattaactatgttttatcatcttttatatattttttcctgatcagtttaaacttttgcatgaattggttaatacgtgaagcacctaacaacctcatatgcaacaaggtagcacagacactactctgcacactagggctgtgttcggatgcctgagttcccaactctaacagtgcgcacgaaaaacggagcgatccattagcacgtgattaattaagtattagctaatttatttttcaaaaatggatcaatatgtttttttaggcaacttacgtatagaaactttttataaaaaacaatccgtttaacagtttgaaaagcgtgcacgcgaaaaacaagaggagagtattgggaacttggagttccgaacacagcctatgtcactagcaagaaattataagaggacattccactgtaatactaatactttttattagatcatcataaaaatattcataatactcccccatttcagattataagtcattttgactttggtcaaagctaaactactttaaatttaactaagtttgtagataaatatagtaatattacaacaccaaatcagtttcattaagtcgataattaaatatattttcataatgttactatttttttctataattttgattaaatttgaagtagtttagctttcaacagagtcaaaacgacttataatatgaaacggagggagtaatgattaggtgggtttcaaagcccgcttacatccctaaaaaaagatttactaactactgcactgatctctgaacatcaacggccaatatcatgataatgacttgacttactccctcttaactttgggagttggagatcatgatcaatatatgtatgacccctccaattattttcaaaggcctcatttaagtgccacaccaaacttgttcacacaatatatgcttctaactaactaaaccaattaagcccttgcacatggtcctccattgacacatatgcatgtccccttcatccatatcacatgcatggacacatcaacccaactattctaggtcaccatggatatctcttttaattttccctttgtttcaaaactgttcatgagaccatgtttcaaacacagggtgaaggagaggagtaggcaactagaaagaaaagcaagttcattcacttgttgcatgcacagctctgcaccacctaaaccatgtgaaggagtagtgaaattctgacacgaagtggatttggattaggggaagtcaacgaatcatggacaactcattgctaattgttggaaagttgaagtgatggattgagattgtttttttttatttttaataatgggatagtgatttgcacttccgatccatggagtatacatgatcgaatagaaaaaaaaaaattctgaatcattggtctacgagtatatttacggtggtgactactggtagtattaataatagcaccggtattaccactaataggaacaattatatcactagagaacaccgtaaaaattgtcaagacgcgagacatgacttaaagtaatcgtcatcctcttaacaacaagctattagtgttttctaaacagattgcagttctgatagatcctgttatctgctatcatagtcctttttagtaccactgagctgaaaaaaaatattttcaatctaaaagttggtatagtcaggtttaaaaatttcaagctgaaagtgctcggtggttaatctactaatgaacacttcaattacttcaacttctgacctgaaattttgattctttaattgttcttttgccgctgaactcatacatttcgaagaggtttcagagagtatgaaacatggcattgtcgaagatttttgaaaatttccgccatttttgtggtttgaattcgaagcagaggaaacagagcaaagggttagaaaacagagagagtatgttatatgctgttccttacctgcttcttgtcggcgaccttcttcttgtccgacgagacgagcgccgccggcagcggcagcggcagcggcagcggcggcgggcggcggaggacgggggtggccggcgcggagctgtggtccctgtcgacgcagagctgcatgatcttctcggcggcctcggcggcgtcgcggctctccttcacaagccgcgccacctccgccttgggcagccgcatccgcagccgcacggcgccgccctcgccggcctccaccgacgacaccggcgacgccgccacgtccgacgccgaccgccgcgacagcatcatgctctccaacctctccccggcgccgccgacatggacaagcgcgcccgaccacgtccgccgcggcgcgcgggcgaggcgagggagctcgacgaggaagtagagcttgccgggcttgagcggcgcgtcggcgtcgagcggccgcgcgcgcatcccgaggcgcctgacctcctccgactccaggacctggtagcccgggtggtcgcgcagcgccgccgccgccgacgccggcggcctgtacttgtacgtcgtcccgtccaccgtcatcaccctcgccgtccgccgcctcccgccggcgatcgcgttgcccatcgatcgatcaaaagcttagctgcctcactcagctggctgctgctgcttcgccgacgagctcgaattcgagtagttgacgtgagctcgcgaggcaagaggaagaggagagaagagcatataaagggaggcacacgcatgtgatgtggcaaagtcaaatctcacgtctaattgttaaattattcccaattttcaaattactcgtcgctaattttatgctaagttaaaacagttgtttttaaaacgttaataatttaaaattttgtgtggtttaataatatttgaatattatatatttattacgagagcgtgaatctaaaaagattaaccttataatgttgttggcttcatccatcatgattcaaatactgatacacacgaataaaatttagtaagatgtcgttggtttatgtcaggaggcgtgggtatagaagtgtgtgagtatgttgttgcatgtgtaatggtaaaaagatagttaaactatatgatttattttagagttagatggacatatgtacggatttctgattaggaaaatcttaaaacgctgagtaatttaaaactgagggactgtactagtttaattagttacaggtgattagaagcataatcttttcgatacctgcattattcaagggtccaggcgtcgacgtgtcgtggtagctagagatgcatgttctttaattagtacatcgttgtatgggcgtggcaaaataattgcattttggatttacttggacactaataatgatgtacatatctaactattatctctatcctaaaatgtttgacgccgttgacttttttaaaaatatttgaccgttagtcttattcaaaaaatttaagtaattgttaattctttttctatcatttgatttattgttaaatataattttatgtatatatatagttttacacatatcacaaaagtttttgaataaaacgaacagtcaaacatgtttaaaaaagtcaacgatgtcaaacatttaggaaatgagggagtatattactaatatgttgtactagtatatagtgtgcagtactgtactatagtacatacgacgagcaagagggccatgtgagctgtttgtatatgatcgatgttctaggtacggtttaattctatcatctataacaatgccatgcccttaattaaatgtggttgatcatccatgcgtagactagctaacaaaaacagtgattaattgcgcatctaaatgtttaatttgttggttgttagctactctctttaatgtatgacgtttattgtctcttgtacatacatttaacatttaaaaaaagttaaagtaaagatcacaaagcgcaccatgctttgaccacatctatctcaaagttcatatgctcacctgttgtaattgttttgctttgacgaagatagctgaattaatagcgcagaagtgtcgagaatgacatcaatatgcaagttttgcgagaacttgggttatactccctccgtccaaaaaaaagtcaacctctaaagtttgaattttatcccataaaaaaccaacttctaccatccagctaccaaccctcggcacataaaacgagaagttttatttcttaaatacccttcacctatctatcaccattactattttttttaataatgaggactatttttggcatttttactccccactaagtttaaattgggatgctaggattggtcttttttttttaacgaagggagtacttatagcatgatgaactaagtgttaactgagtgaacggatttctaacataaattggtacttgcatagtagagtaattgtattgttgttcatatatattacttcctccgttttatattataagactttttagcattgcccacattcatatatatgttaatgaatctagacatatatgtgtgcctagattcattaacatctatataaatgtggacaatgttataacctgaaacaaagaaattgtttccgtgggattagccaacaaaaagggagaataatagaaaacgtacggaatatgggttctatgatacaatatgccccaagaagtgtggttttatgataaaaactgctaaacctatggttaaatttgagatagatgtgcccaaaaactctcggtgttttacgatatttactgctaatataaatatatagaaaattacaaatcttgtctaaaatacctttggtactccctccgttttaggttataagacgttttaactttagtcaaaattaaactgttttaagttagactaagtttatagaaaaaagtagtaatattttcaaccaagaaaaatttattatgaaaatatattcaattattaatttgatgacactaatttagtattataaatattataatatttatctataaacttagtcaaagttaaaatagtttgactttaaccaaagtcaaaacgttttataatctgaaacggaggaagtaataaatatcacaacaaattaaatacataataattacgcaattttcttaaccatgtgaatgcaaccagatatataaaaattttagtaacatcatacattaaaaactaaaacccagagagagtactagtactacatccttctagacggggcaacgggcaagctacaagtgagaaggggcgtgcgtagacggcaacggaacagagatagaactgcgagtgcgtgtcgttgttaatttttggcggtgtccggtgagaacagggaaaaataaaagtgtggctagctctccatttccgttaaatatctctttcattagtcctaaattcttggcttggttcaagaaaaatgttgagaattagctttggctgtagtacatacgatcgagctgagttaccctcggtgtcaggttacctcatggccggccatccagcgtggattctggagatcttttgagaagaattctgtgaaatgtcagtcgatttcaatttcatgtcggttatgagagaaccttctgtgtcgatcgatatgattccaagcgttttaccgcgggatatatgtgatcgataaatgctgatctctgtcaggtaaattccatacgtgaagaggacaagaggcagctagttagtgtagccttttcttcagcatgtccaaattaaactaatcgtcgtctctttgtcagcacgtacagtacagtatagtaaagtttgtgctttagctaactagctgatgactagtccgtacaaatggcaattaatattatttttgcaagctagtcccctttcatctaaaaaaatcaaattctagttataaatctaaacaactatatttagattcgtagatagaagttaaatttattttgagatggaggtgtactagccagtaattgtgtaatggtagtgctaattacagtgtgtaagtagaattaatgaaccgatcgagtagtcgtgtgatgtatatatactccctccttccaaaataaacttaagttcatgataggatgtgactttatgtttagattcgtttatgttgggacgaacgatcaacggtagtacagatagtactgtcctaatgtccatgctcagttgctcacaattcattcacacctgcgctgcgatggttagtacctttaacttgtagcgtaggacgtaggtgcatacgtaaggctgacgtgtgggtgacagaagttggtcatgggggtgagcgagtgatctatcgatctgtcgacgaacgacgacattaaatattttgtctcgatgtccaccatggtcgatggagacgactatcatatatactacagtgatcatatataggccatgccatgtcgttctctggtgatagatgcacgaggcaaaactaaagacgaagaagaagaaacagcagcagcagcagctaattaaagaagaagactacatgctgacgctgcaggcagatatgccgcgagtcacgggaagaagacgataaaaggggaagacagtaggaaggcctcccgggtttgtcgtacgtctcatttctgacccattactgatatggagtatatacgtatacgtttgtgttctaaaatataccactctaaacatgcgtttggttgaagaaatgatatgaatagggttgagtcgaactcaattttaaaggtgtttggtttgagaatgaatgggataggaatagcatgatcctctagaggaatactcctcttagatctgggtccaagccactcgagaaaatctggcgaacgagctcgacctaccggggttgagcgcacggcgtgagccgtaccgttcttccaccgctcaagctcccacgccgtccatccgcatcgcgccgcgccgctccttgctcgctggccgttgcccatctggtcatgatccagctcctccgctggcagatcttctcctccactccacctgttggattccgtcactactttgtttttgttcggcagctggttgtcatcaacttcctctccgtctctagtcgattgctggcgtgggcttccgctacaatccagtcgccatatatcgagctcctccagcagttgcttgtctcctccacccgttccttcacccgccagattacatcgctccgcccattagctggttgctgtatgtcgggctctaccacactgtcggaactggatatggacttagctgcaaacattacccatcttctaccaaacaaaatgattggatcattccatcctataaacaaaacaggaatcttggttcttaaaccaaacacacattaaggtcccctttggtttggagagtaaaaatatgaatttcagaagattttcatcctataggaaaaattcctatgaatacttttgaatcaaaggattgaatcatatccaatcctttaaaatcccaatgaaatggacaatcctatagagattttgaagaaaacttagcaagagctcaaagctcttggaaaatttcctttgagtctatctctctcatccaattcctgtgttttttctatggtctaatcaaatgttcattcctgtgtttttcctatgttctacaatcctctattttaaattttcattcatgttagaatcatgtattttttctattcctatctattttcattcctacgatttaaaggggctctaagattggaggaacgtttctatttagattttagattaatatattttgggatggagatactaactagtatcaatgctagattaaattaactaggagtgagatgaataataattgaatactacttctatgatcgattgatatggatgtgtggtttagctagggaggcgagagcgaggtacggtgaggccacgtatgcatgtaatgggatcgaccgatagaatctgtcagatcaggttatgttcgagcctgtttagatcccatgtcacgttttttcatcttatcacatcgaatatttggacacatgtataaaatattaaatataaataaaactaattatacagattatgtgtaaattacgagacgaatcttttaagactaattgctctatgatttaacaatatgtagtaaacatttgctaatgatgtattaattaggcttaataaattcgtctcgcagtttacatgcggagtctgtaatttgttttattattaaaccacgtttaatattttaaatgtgtgtccgtatatccgatgtatcgacacggcaaaactttttacactcgatctaaagacagccttagtctttgccttctgtcggctgcctgagcccctgacagtaggttcattatcttatatactactaattaacactccctcatcttaattatatggatcacagtacgtgtttgcacagcacacggcgacacacaccacgagctagcgtacgtgcagctacgcaatcggttacagcagcggaggacggcgggttggcctggctctggcttggcttggttgcatttgcatatacgatcgacgacgcacagttgggcgtggggacgaagaggaggccacagcgaccgaccgaccggacaaatctctgcagctgatgatccccattatcaatctgatgtaatgtaccgaacacaggttaccaaccaggaacatgcattgagctaggtaattaccccgatggcaaactgttgaaatcaaaacatgaaggatggcccttcttttacatgcatggttaataagtattttggtgggactagaatgtctatactacttttaaatattattccctccgtttttaagtatatgattttttaagatacgtttgatcatttgtcttatttaaaaaatttatgtgactatcatttattttattgagacttgatttatcatcaaatgttctttaaacctgacttaaatattttatatttgcataaaaactttaaatagaatgaatggtcaaatattttgttgaaaagttaatagcgtcgtatattaaaaaggtggtagtatatagtagtgatggtggtggtcgaatgtcacttgggttcatgatgttaatcttcattgtatgaatcaaatacacatgggtaatttatattcaattgtttctcactacgagtgactgtgtagctcaacacacatgtacaaaattgtaacaaaccctgttgcatatggatatgatgtttcactatatgtatcgcaggggtatttagctagtttcaaaagaaaccgtatttgaaagaaaggatatggtacaccatttgggaggccaactggatcccctcaagccacaatctcaaagtcaatacttacaccgccagaaggtaaatttctcttatcaaacttaggtaaatgatttgaataatctagtagtttgggatgaatacctggtctaaagtttattttcggcagttaatcgaattttagagataccactggtagaattccaacaccagtttgttcactgttagatatgcataggaaatgctacttaatggagaaggcaacgctgatatttctggtgttcgggatagactctagaagatgaatctgcctgaaaaaaagttaaaatctttggttgaagagctttacatggcatggtgtctcctgctccaggagtactagcagggaataaacacatcaataatcagggaggttgtcttgtgtgccaaactgatggtggagattgtggataccccatacctacacgacatgtatatccgactgggtatggggtgccatgtatagatagaatatctttaaagggactcgggttaaattccaaacttgtatgtcaaggaaatacccgggatcctagttggttacgattgtattttgtatgtaactacctattccattagagatatggactgtacttaggaggggtccgggtgcctcttggggcacgattttgctcctagatcatacgatcaataatacactcggcggatcaatccccggacaggagtagggtattacttcttgttaagaaggcctgaacctgtataaaattccttgtctctcaacccatccacttttccagcttgatagccacccccttttagtattgccgaaatcttgtttcgacagttggcgcgccaggtaggggtagcgtcaagtttttcgccgactagtgcgatgggtttcgtctctggcatcgacgactttgtcttccctctcgggcaggcgttccggttcggcagcctcgacttcatcaccaacgacttcggcaagatttctctcctcgactcggattcgaaccagtcgggaagaggccaggtttccgccccgttcggtatcccgaactcggccgagacctactccaggatcatctcaaccgagcttgcttcaaaccactcagacgagatccaatctactccaacacgacctgatcaagacgatggagcttatccctcaatcctgatgaaactccccgatgacttggctgccgtcttcaccacaagggcgtcctctccccgtaggcctacgcgggatctggcctcgaccccgatccagtctggctcccgggaagttggcgtcatactccagcctctcggcacggtttcgacggaacaataggacggctacctcagctcccccggcgtcgactctcgaccaacggagatcgtagagtacgacgacttcggctaccgctatgactaccgcaaccttgacgacttcaacgaaggctacaaagataactacacgcccctctacttcggcattttcatggccgacaacgagacggaagagcagcgtcaagcctgagaagcagaagaacagcgcgtacgacaagaagccgaacgttgccgactggaggaggaacgccaagcacaagagcgagagcgactgcagcgtgagcaacaggagcgcgaacgggctgcaaaggaggctgagtaccggcgacaacgcgccttggaggccgggcgacgagcacgagagctcatcgggcaacaagacgtcgaggggacgacggtttttcgcacccccccagcagaacacggttgcagcgatcacccttctcgacaccctcctcaaggaagacacacttaattaggccaatcacgtcgtcaacatcttgaactagactaagaccatgatcaccgcttcggtcccggtcaactccgcaagcatccgtacgccgactggcagccgagttccgcctcttcgatctcaagactatcaccaaccaagcctcagcgtcgtcagtgcaggatccagccgcaggagcagggatcacggcgaatgatctgtccactcgcctcctgaccggcacagggagcgtcgggctgaacatccccgctccccacgtcgcatgcatcccatcaatcttcgcgaaactatcaaccagcgccgtgcggcaagaggctacatcccccaccattcaccagattgttacgacgacgacttggatggagatcaatgctgttcagcccgatacgccccaatatcttcggtggtcagagacagttatcaagtttgaccgctcggatcatcccgaccgagtggtccacccggggcggtaccccctggtactagacccagtggttcgcaatgtcaagcttcgaagatccctcatcgacggtggcagcgcactcaatatcctttttgccaagactctggacgacatgcagatccctcgcgcagaattaaagccgagtaatgcgctctttcatggagtcatccccaggctatcttctactccactcggccaaatcactctgccggttactttcggcactcgggagaactttcgcacagaaaatatttgcttcgaagtcgctgatttcgagatagcgtaccatgctatactcggacgcccggcgttagccaagttcatggctgtcccacactatacctacatgatgatgaagatgccaggtccccgaggagtcatatccctgtggagcgacatcaagcaagccgtcacatgcgacaaggaaagctgcgagatggcccagacccgcgagatcacgcttgcccgagaagaaatccgactggctgcgtccacagcaaccgaaggagaagtgcctgcaaccaagatgccaaagagcggagaaggcgatgccaagaccaagaaaattcctctagatccctctgaccttactaagactgctgtaataggcgctgagttagattgtaaataggaaagcacgctcatcacatttcttcaaaataataaagatatctttgcgtggaaaccatctgatatgcctgatattcctagagaggtgattgagcactctttgcatgttaaggaagatgctaaacctatcaagcaatgactccgccgtttcgcacatgataggaaggatgcgattaaggaggaattgaccaagctgttagcagcaggcttcatcaaggaagtcctacatcccgactggctggccaacccagtcctggttcggaagaagacggggcaatggtgtatgtgtgttgattgcaccgacctcaacaaatcttgtcccaaggatcccttcgggttacctcgcattgaccaggtagttgactcaacggccggctgcgagttactcagttttttggattgctactcaggatatcattagatccgactaaaggagtccgactgcttgaagacttcgttcatcacacccttcggggcctactgctacatcaccatgccttttggattaaagaatgcaggagcaacttatcaacacatgatccagagatgcttttcaactcatattggtcacaacgttgaagcttatgttaatgatgtagtcgtcaagaccaagcagaaggataatttgattacggatctagaagagacctttgcgagcatccgcgccttcaggatgaaattaaaccctgaaaagtgcatcttcggagtaccgtcatgaaagttgcttggctttatggtatcccatagaggcatacaagccaacccggagaaaatcaatgccatcctcaacatgaaactgccgagctcccaggaagatgttcaaaagttaactggctgcatggcggcgctcagccggttcgtctcatgactcggcgagcgggggatgcccttcttcaagctgctaaagaaaaccgacaatttccagtggggacccaaagcacaaaaagcctttgaagacttcaagaaacttctcactactctaccggtcttagcttcgccacatccgcaagagccgctgttgttatacgtgtcggcaacttcccaggttgtaagcacggtcctggttgttgagcgtgaggaagaaggccatgttcaaaaagtccaacgaccaatatatttcgtcagcgaggttttggccgactccaagacaagatatcctcaggttcaaaagttgttatatggtgttttgattaccatctggaaattatctcactattttcaaggtcactcggtcacggttgtcacatcgtttccacttggggatatacttcataaccgcgaagtaaatgggcggatcgcaaagtgggccttagagttgatgtctttggatctatctttcaagccgcgaacttcgatcaagtcccaagctttagcagacttcgtcgccaagtggaccgagtgccaggaagacacgtctgcagagaagatggagtattggactatgcattttgacgggtcaaagaggctttcgggcaccggagcaggagtagtcctaatttccccgactggagaaaggttgagttacgtattgtggatacatttttctgcgtcccataacgtggcggaatatgaggcgctcctccacggattaaggctggcgatatctttgggaattcggcgtctgatagttcgcggagattctcagttggttgttaatcaggtcatgaaagagtggtcctgccttgatgataatatgattgcttatcggcaggaggtacgcaagctagaagataagttcgatggcctcgagctaacccatgttcttcgacataacaatgaggcagctgacagactagccaatttcggttcaaaacgagaagcaactccttccgatgtgtttgttgaacacctttatgaaccaaccgtaccaaggaaagaaacagccgagactacggacactcaagtagtagccatgattgaagctgactagagatagcccctcatcaaatttttgaccaagcaagaactccctcaagataaagacgaagccgagcggatttctaagcgcaacagactttatgtcatacatgagaccgatctgtacaagaaaagtccgtaaggaattctgcaacgctgtgtgtctttggaagaaggacggcaattgctaagagatatacactcgggcatctatgacaatcacgctgccgcacgaaccattgttggcaaggcctaccggcagggtttttttctggcctaccgctgtatctgatgctgacaaaatcgtgcgaacatgtgaggattgtcagttttttgaccgacagactcatttaccagctcaggagttgcaaaccatcccattatcctggccgttcgcggtttgggggctcgacatggttggcccgttcaaaaaggctatcggtggttacactcatctctttgtagctgttgacaaattctccaagtggatcgaagccaaacccgtcatcacaatcacaacagacaaggctggagattttttcatcaacattgtgcattggtttggggtacctaatcggatcatcactgacaacggcactcaattcactggcggagtatttaaacatttctgtgaagactttggcatcaaaatttattatgcctccatagtgcatcctatgagcaatggacaagtcgaacgcaccaacggtatggtacttcaaggaataaaagcacgagttttcgaccgactgcatccctgtgctggcaaatgggtagaacagctgccgtctgtactttggtccttgcgtactacacccagtcgggctacgggccagtcaccgttctttctaatctatggtgcggaagcaatgttgccaagtgaggtagaatttgaatctttgcgatttcgtaacttcagcgaggagcgctatggagaagaccgagtggatgatctcaaccgactggaggaagcccgtgaagcagccttaatccattcggctcgatatttacaagggatgcgacgttatcacaaccgcaatgttcgatcacgagctttcttagtcggagacctggttttgagaaaaattcaaaccacacgagatcggcacaagttatctcccttatgggaaggaccgttcataatttccgaagttactcggccaggttcttaccgactcaagcgtgaagacggtactagtgttgacaactcttggaatattgagcatcttcgtcgtttttatgcttaggcattacttttgtactttcctctttgactgctaacatcaagctactccttgagttatcagtcgggggctactataataataatggagtgtgatttttatcaattcaatttgcttacttgatttatcattgctttgttcgattttttggcttagtcaatgagtactgaaagtttttaagaacttttgcgggttttaggctcaataaggtttgacagaaacttttaagaaatccggggctgagtttaaatcatcaagcacaacataaattcatcagtattgtacaaattgtgcctccatcatcatcagaatacaaaatcaatcagattcagttttttcatcatcagagttatcagacccagtcggcttaagatcgttgtcatggaacctctcaactacatcagcggctatcttgtcagcagctttttgcacatcactgatgagatcaagggcggcttcctcacttgtcccatctgcaaagccatcaacagcatcaatatcaatcttcgggtaccaggacttggtcatcgccaatgccagactcacccctatatttccagcttctttgatgttcttaaaataggtatctagagtagatctcagtttgtcgaagatttcgacagcatcaattgaactcggaccattgttattgaaaaacatggcttggaccgagtggcgtagtggcgttggcgacttcgtctctggctccttcaagctttttgattttgctgaccaagacattgaattgagcctgagatttgactttacgatctgcacaaatggttcacattaacgataaagcatgaagacaagaatgctttcgaggtttcagcaacaagtaccttcgacgtcttttagagccgagtctctctgtttggtcagttcactcttgtctgtttccagggccttgattcacttttctagttcggatatcttggcagcttgcactgtatcgttgcccactggtcaatcacatgtgaaaagcggctcagacaagtcagacaagaataaaagttacctttggacgaaccgctccgctcaatgttggaatcttgaagctcggcgattcggtctctaagatcatgttcagtttttctagcaagctccttggcttcacgaagttggtctctggttgcttccagggttccaaggtgggggaccaatctctcgagagttgcggtcttcgccttatttctaagatggattctctgcattgcaatttcatctttattcagtaaagttgccgacagggtgattgaagctatgggtaaagagacatacatttacaagacgagtggcttgactgagtgtctttttcagcagacatacttcctcgtcttccttctgtttatttattacaattccctgcggttgcatttcatcatcccaccacttaactaagatgggtgggcaagaatcttcagctaaccgtatccggaggacctcttcttcatcgccgaccattgggccttacatatttatgaacgatgataaagcaatcgaagaaagtttgtcggatcaaaatggatttggatcttctgtttacctgttatgacttctggtcggggacgagcaggcccttgcaccctaacaggtgagcctaacctcgggtcggcgctggtatcttttcggagagggctgcttgtttgagcctctacttccgggatgtcttcattttgttctatacccgactggtttccagtcgggggctcctgatcagcacctatctcagcttcggccgactggtttccagtcggaggctcgttgctggattgtacattgtcggttgctggttgattattactcgggcgatcttcggcagttggcccggtttcagttgtaggaccagtctccgtgctggtcgtttcagagttctttctagaaggatcgatgtcatatggcttcctgcaaatttgagatatgctatcaacactacttcaatggtgaatgaccagcgatacgagggaaattgctaaatgactcatacctggatgacttcctgatttttggtatgggacgactggatgttttcttctttggattagcttgccttggttgtttctcagtcgcccctttgttgcctaccttttccacatcgtcgccctcatcgtcacttgaaaccaacttcctcttacgagagtctgactggttaattgacttcgaggtgttgggttgaacgtcggactggattttcggccctccactagcctggccagtctgccgacggggtgagcggcgttgagcgatcggaggatccgacttcatcaaggcgaattcctgtgcatgacattccaagttttcaattaaacttgtagaagacaaaaagatgtttttcagagaggccgagatgtttgatacgtaccggaggaggagggttgaaggcattgtatggcacgactggcaacaagtgcgaatagccgaccacgataacattcgagaagattttgtacattctctcctgcatgattttgaactcaagagattctgggtcctctcggttggggtcttgcttgccgtcaaactcgaaggctgtgcgggatctctctttgatttgctccccttgcagaccctgttctttaagcttcagcatgcggtccaacagggcaagtgcttgggcggcctcttctcctatgggaagtgagttccaggtatctcggtatactggaggaagacaggagtacccgggaaatgctggctcggggttttgcacaaagaaccaatttgcatgccaacccttgttcgaggtcttgaagggcatggagaagtatttttggctcaaggttacccttagttgaaaaccggctcccccaacaacgcacagtttgctcttgttcggctggggcttgaggaagaagatgcggcggaatagggcaaaatgcggtctaacacccaaaaaagcctcgcaagcatggatgaaattggcaatatggagtacggaattggggtttagatgatgcaaactaatcccatagaaatccaaaatcccttggaagaatcttgaggttggaagagaaaacccaccgtagaagaaatgggagaacaccacgacctcgtgtgtatcgggggtcggaaatgtttcaccgcacgccagacgccacccgatgatctccttcgccggaagaacactgtgcaccaccatttccttcaagttttcctctgtcacatcggaaggcgcccactgactctcgaagctttctctctcctccgccatggatgcgaattggatgatgcgatttggtttgagaaatggccgggaatggaagggagacagatgcggtggttgcgcagaagatttttgtggagctctagcgaatggattggagggaatttgtgaaccctagctttgccggtgtggtttcgcactgtagcagtgagtggggaaagtggcgagagtttcggcggggaagacgaaacgacgccttgccttcggcgtttatttcgctaggatatcgaaagtgctaatgggcctgggcctaaacagtatttcagcccaattttattatcagcgtggctagttgtgatccttagggacttaggcatttgtttttgctttggcaacacttgctcacgacagtatagcccaatgctgattaaaatcctttttgacgcagttagataattttttggaattactacaatgcacataaaaaggtgcccaacagaaaagtgttatactaattttgtaggccttcttaggctacaaagctgttcgggttttgttgagatgactggttttgaatagtcattctctcagcatgttatatgcttattttaatcatgacgtgagtcatagcttaggctatttagactcatcgtttgtcatgctttataccacatttgatggatctttttgagagtttttactcggatttttatcatatgtgttgatttatagacctttagagtgttttctcactcgggcctctttatatctccttttttgtgtattaaagctaaagcagtcggctggatgttttactaaacgtcgcatatgcttagctatatgatacattgggagactaggttgtaaaaccactcggatggagcccttcacagtctttgattttggtactagggagaccaagacaaaagaagttggagcactcggattattgcttgaattacgagagaagactatcttcgtcgactgtaaaggtctcaggggctactgtggagattgtggataccccatacctacatggcatgtatatccgactgggtatggggtgccatgtatagatagaatatctttaaagggactcgggttaaattccaaacttgtatgtcaaggaaatacccgggatcctagtctgttacgattgtattttatctgtaactacctattccattagggatatggactgtactttgtaatacgaaccccttcccctatataaggaggggttcgggtgcctcttggggcatgattttgctcccagatcatacgatcaataatacactcggcggatcaatccctggacaggagtagggtattacttcttgttaagaaagcctaaacctgtataaaattccttgtctctcaacccatccacttttctagtttgatagccacctccttttagtattgccgaaatcttgtttcgacaccgattgcgaggatatttaacatattcttttcacttgtgacagggctagaaaggtttcgacgaagatgggtatttggaatagaattgagaatatattgaatatggatcgatctggctacgtggtactaccagaaataattatgaggggaggcagttaccacgacttaatgatttgggcttaatttgttaaaattgttttcacatggggtggtatacttggtgagaaaggacacggatggttaatggtgaaagggtccaaaccactgtctgtcctaactctaaagtataattgcaagtaaacacatccaaaatgcaaaaccatgagaaggatggcacaaacccccaagggtttctcaagattaatgttggatgtttcatttgacattgattcaggaatcaggaggaactggggcaattgttcaagacgcaccaggaggtttcatagcaagcgtgtgtatgtataatatttgtatgtatatttgtatacaattaatattcttcgggaaggaccttttctagctaagcaactgaggtgtcatgttgattgtaggatttctatccctgtatggagcaagaaaacggatgcgcaagtttattattagggatgcaagcggaacgggcaagcggacatttttgtcccgcttatcccacttcgtttattttttcttttaaattttgtactaccatgcgaaaaatacacttgcaagtgggtttttacgtgggtagcggaattacccatccctatttattatccaaacttactgcttgtaggtagtggagacgatgcaagatggaggattctcgactacaaaattggctgcaatttttcacgaatgtggtatgttgagatttggtttagagaatatctatatagagcactgtaataagaggcaaactgcacgtaaatccgcctgtgtatctacaatgtagatacggtgctcaaggatcggaaccacgtgtgtgtgtgtatacgatgatgtgtttagcgtcggcgacttccttctcgactccgctcggttgggccagacgttggatcacccggcccatgggccattagccccgtccatttctgggcttcaccgagaaggcgccgtgtggcccatctcttctccacggcccatctcctctacgggtaggaataagttcatctgaggccccttaactcgtcaacgaattcgattttcgtcgctcaaccagaaaaccagacataacaggtccctcaactatcaaaaccggtgcagattagatccctcggcagttctgagggtgttgttgactgatgtggcgcctacgtggctaatttgactcggtctttatttgacgtggcattgacatggcgcttacgtggcaattcgatccggaaaaataataaaacccatgggacccgcatatcaatctcacacagtaaataattaaaaaaaggtaggacccacgtgggccccacttatcagtccaactcacccctcctcttcttcctcctctcttcccatctcccctcttcatctctcttgcgctgggggatgggcagttgggcaccagatgcggccgacgacgacgacggcggcggaaatggagaagagcggccgccggccatctctcttgcgcgcgctcaccggtagaccagggaaaccaccctcaaaaccgctgcgcgacgccgccctttcccgccaccaacccctcgcctccggaggacggaaacctcgcccgcgcacatccccagatccatggccgtctgcccgccgtgcgctacccagttctcccgcgcccgctgtcagaccacctgcgccgccatctgccgagtccgcgggtgaacggcgacagcaacagcatcaagcccgccctcgccgaccacaccgcgcagttgctcgacctagatctgctccccggcgcccatgcacggaagcccccgggtgcctacagtgaggcggcggcggccaaggcctacccgtcctgcgacgccatcccctgcgaccagttcgaggtggccttccaggccgtggagctctggatcgccgaccacgccgtcctgctcgtcaagaactcatcacacgcacatatgcactataatcaaacctactggctataagtagtgatatgcatacaggatccattttgaggcaaccatagttgagagagctacattggtaaatttatgacagaaaccgtagcaagaaactattcgattcaggacaaaaaaagaacaagccaatccagggttcgtgctcgccgacggcatccaggacgacgccgggaacgtgacgcggttcgtgatgctggcgcgggagcccatcatcccgcgaacggaccggctcttccgaagagaggggagatggggggagaggaggaagaagaggaagaggaagagaaagaagaggggtgagggtgacatgtggggcccacgtggccccaccattttttattaatttgtatgtgaaactgacctgtgggtcccacgggttttattatttttccagataggattactatgtaagcgccacgtcaatgccacgtcagatgaagaccgagtcaaattaaccacgtaggcgtcacgtcagccaaaaccaccctcaaaaccgccgagggacctaatctgcaccagttttaatagttgagggacctgttgtatctggtttttgggttgaaggacgaaaatcggattcgttgataagttaagggaccttaaatgtacttattccgtacgggtacggtgctgctgcttgcaacccgtgcggtgggctactctccaaggtgggccgcggtgattgagaaacatttttttttcttttcttttggagcacttggtaaattggcaagtgatctatatataccaaatgaaaaaaaaaaatgcaagcattccggtaagaaatttcgtccgccgtcacctaaatttttttcatccaccactctcgcgtcatgcgctcgtcatcccaagtccgggtcgaatcgaatctgatcgagatttacgtgcatgggattaaatttaaaccagttcgtattacaccaggagaatttacatatacgacaaacaaaaattggttacaaaattttctcaagttacaacccaaatataagaattaacggtagacgaagaaaataaaacccaaatcaagcaaaaatccagccactggaatcacggtttcaccggttctaatcttgggctgcacataacatgactcatcgcatacgctcccaataggcttcgcgctgtcatcggaccttgctggagacacgagcggcatgagtttgccgccaccaccacctcccaatgctagatccagtgaggagggtacgtgcggagtggccgccgggagtagctcaattgagttgtcgctgccgccagccaccgcatcacaagaccagatccggtgaggaaggggcgtggagtggccgttgggggtagcttagttgagttgtcgccgctgccggccaccacatcccaagaccagatccggtgaggaggaggcgtggagtggccactggcggtcgctcggtcaagctgtgcgccaccactagtggcgggatccaacgagcctgaagccggatatagcgaggagccgaggagcagggcagcgacgacgtcccgacgaggaggaaagaggtcgacaatgggggggagggagagtgctagagctggggagggagaccgatacatgcaagcatgccacatccacacattaagcatataaagctcaatatgcaagcatatactctcaccatctttgaatatttgacgccgttgacttttttaaacatgtttgaccgttcgtcttatttaaaaaatttaagtaattattaattcttttcctataatttgattcattattacatatcattttatgtatatatatagttttacatattttacaaaaaattttgaactgtcaaacatgtacaaaaatttcaacggcgtcaaacatttagggaaggagggagtagtaattatatctataatttatttcattctaaaactaaacatacccatactaaatcatcattctcaaatcatttttataatatttcaatccaaatcatctcaccatttttctaatatgtaatataattaccacatcaaattaagcgcggacatcatctagtatatattaaattcccagtacatgcgttgtgcaaaagcgtagtgagtgcctagtatagtagtacacatatgtggccacacttgtcttttccaaaactaaaggcccaaatacgtcagtacatacgtacgtcagactacacagtgatcgatcactgagatgtacactagctacatactagtatatactatactactactagtactatagtataggagtcacgcacatgcaggcaacgtcggaggcgcaacacccggccgcccggttggccggccgccgccgccgagattgctttctaattctaccaaatgcagccgatggagcgagagacgaagctagcagagagcagataaacatccaacgatcgatcgatcagctatttagtcgtcctagctagccttggatcatgacgatgcatgagcatgacgacacaccactagaggcgcacgagctcgcgagaccattcgatcctagctcactactggagaaactatcttttccggtcagccaaaaaccacaatagtcccggttgcaataaaaatcaggactaaagatggtttttaatcccggtttataagcaaaacgggactatatgaactttagtcccggttattaccaccaaccgttcacacgctgtcaagggctgtcagggctctcgggatctttagtcccggttagtaactccaactgggactaaagttcggatatttaatcccggtttatattatcaaccgggactaaagatcccggtgatctttagacccggtgagtaataccaaccgggactaaagtcaggtaccgggactaaagatcaaaacgcactatataatctctagtacttttcctcttctccaatccacacacaaactcctccctcttctcccctctaatccttatctctttccttgctcttaccttatctctttccttgtctttccttccttctcaggaggagtgagcgcaggaggctggaccggctgggtggtggcctgcgcggcggcgtggcggtggccagagaggaggggaggtggcagcggttgcaccggccgtgggcacgagaggacggcgggccggtggatgggagggcggcggcggcggccagcggccgacagtgcccactcgtggatttttgtcctttcttttttttcttttaagaatttgtgattcgattgagataaagaatttgtaattcgttgtatggattgagatatataatttctttttttttgagaatctgtgatctgagatgtataatatgtgatatatttgatttgtgatatttgggatgttactttgatttggggtttgatttggggatatgcatcccacttgattttggggaaaatagttagggagtaagtagtaagtatcaacagaaacaatgaaaaaaaaataaaaaggaaactaaccgggactgtcgacagtcccctctttagagataacgatctgccggattcgaaggcccggttgaaaaaccgggactacaaagggttacgaaccgggagtaaaaatgatctctccaccagtggcttaattaagtttaatttttgtttttaaatttaacttgccacacgcacgctggctcgctccattgctgaatgtccgtgttttgctatggataaaagaaaatgtattaatgtgttcttcattctttttactgtagggaatattcatcttaatctaattttttacatggctatccatttagatttgatcccttttaatattaataagttcaagggggtaacttgtaaaatttacaatggaactagtgaagtggcagattcactaccaccatcactattttcttttataggagcatagatattaattcctgaagtttacataataaaatcgttcaccattgctgtagttttctcaaatacgtacccaaagtgtagtaaaatgtaaaatgatagtttacaataattggttgtagttttttaatataatcatttactattaattgttgcaattttgtgaaacacccagttaaagttgtagtgaagttacagattgtaacaaatggttgcagttttctcataaaaccatttgttgttgttgtaattttgtgaaaagtacctaattaaaattgtagcatatcgatagtattgaatacatggttacagttttgtggaatacacagttaattaaagttgtcacaaaatgattggtttgaataaacggttgaagtttgggggaatctacttttttacaaaaattaagataactattcacatttttctaattttatgtgaagctattttttttaagatcggatttgatatatcactgttcgcttttgattccaatgatatatatagtatacaataggttctataataaaagtcaagttgtataactcttagctagcttgtattagaagatcatatacttgttgtgttgaaccaaatccgtattctcgaaaacagaaagccggaagaacagcaatcgctctaataagttaatttttgaaagaagttaaaattagcttccctaaatataattatattttgcatacagctatatcaattaacctataataatttggatatacgatgatttggactatactttttaaggtaacgtggtgtcctttttcaagctatatatatagtgctcgatcgtgtacttctagtttgatgataattaattatataacctgggtatagaatcatactggtcgtacgtaagtaccacatacgtacgtacgtctatgctagttgaattctatccggcagggcagaggatcatatcatatcgctgactcaatggagtcttgcttggctgccactatagtgtgtgtgtgcgcacatgccgtgcgctcgatattgcactttactgtaccacatgcatgctagcctatcagagagagattaaataaagatgctggggtacatttgcgattgagccaagcccacgtgacgtgagctagctagctaagtaggggtggcaacgggacaaggcggggccaggttgaacatgaacgcccctgccgccccgtgcccagccttgcattgctaaccgggtggaaagcctcacccgtcatcgtccccgcaggggacctcgtgggtgagtgaggccccacaattccgtatagagtcaatacacatcctctaatcaatgcaataaaatgcataacaatattctcaaaccaatacaaacaacaccataaatcaacaaacacatagagtcaactcgttagatctgaactctgaagctgcccgagaacaacctcgtggctccagcgatgaatcgtgttgtggtacaccggtgagatgaccgatggccatgagagacaaggcagagaggcgaggcaacgatcatcggcggtgagaggcgaggcaacaaccatcggtgatgagagacgaggcggcttggtgacgcggcgacaaccgacgagatgataaggtggcacagcgaagacagacggcgatgggagaacaaggaggctcagcgacgatcgccactcggcactgtggcgagaggcgcagcaatgaacagcgctgtggcgagaggaggcgatgagcggcgttgttgcgagaggcacgcgcagtggtgagaggcgccacggcgtggaggtgagggtcacgcggtgagcgacgtgtcgagcggcgactgtgcgttgagtgggagttggggaattatggttttagtttaggggctgtctatataggaatcgaatgatttctgaagctccaatcatgcagattttatctaccataggatgcacatccagcaactcagaaaaagtgatacaaatagatattacacttaaaaacagatatattatttgattatttgaacgccatttttttaaagcccaaatccagatccagatccataaaagcccaaatccatatccagatccataaaagcccattagtaaaaagaaggcccaaaatacaaaatttgaatcaaacacaaataaacaaagcccatgattttttcgcccatgcgaattatttgaaggcccaagtccatatccagatccataaaagcccattagtaaaaagcaggcccaagatacaaaattagaagcaaaacataaggaaataaagcccaaatcataatccaacagcctatccaaaaaagtagtagggaccaaacttggaagccaagtagatgaaaaacatgtcacgtgaatcaaccatgtatgggaccacacttttcaatcccctacttttcaacagcactactagttcacaaacagatctagcacgaatcaaacatggagctaggagaagagaaagaagagagaaaaagaggatccaaatcgcagatggaaggagagagtacaatgtcagaatcaaagagtagttctagaggaaagaagaaatcaaagacaacttttgaacagaaagttgagatccatacaaaggaaacacagaatctggagaacacaaagaaaaaacaagaggaaggcaaaatcaagagaaacaagaaggctccagttcaaggttagttcaaggttccaattcttatcccctatatacaattcctgaaaaagatcaaagagagagtttaggtcaaatatacaattcaaaagaatacatgaaattgctgaatatgtcaaatgaaacaaggttaacaatccactttgctggataaatacaacaactcagaactgaaaatttcatatgtttgctctgtagatctgaactatgtaatgttaaaagtaaaactacactgcattcagtactacaaaactgcattctggatgattgtattactgtgtactattgatgaataccaaactaactttataaaaaaaacatgacagattgattagtcttccaaccttactgaatttcactctgaagatatcacagttatacagttatacagaaatataacaactaggccatatagcatatcctgaattgtcatacattcaattttatcagcataatcaccatattaaactaatgacaaattcaaatctcaatgtcaaccacttgtctcatccaactcaatattacataaaagttcaatatctcatacagcacaaacaaaagagccaattcatatgaactcacaaatttcttaacatgttacagtaaaaaagtaataaaattacatacaagaatcacagtaattctagtattaactcattgtaaaaagattagttcagtaaacaaaatagtttagctcacacaatcatgcacaaattcaggaacacattcaagatatgttttaaactcaagactatctcagttcaatgtttctctcatcatcagacaacaaaatgaagatttcagataatagatcattgttgatttgttcaatgtctcaaaatagaatataatgaaactagttacagtgaacttgtattacaaatatatagagtgaacactacaatttcaattgaaaatacatgtaactacaaagaaactatgtaaaattcatatgaaatcatgatctaatgcagtttaatctcaatttcaagatgatttcagatttttcgagcaaaaaacagggtatcaaatacttcaaaagtagtacatatgtaaaaaccaaaacaaatcatatctaattgaaatagaaagaaatagaaaagaaaaagtgccatcagatagtttgttccataagtaaattttaactggaattacagtagcattacactctaattgaaatacttatttactgtaatactacttatggaacatactcatacaggtttgaaaaacatttaaagactatcttgaatatttctttacaggtgtcatacaaaaggacaaagaatgcaaaagttctaaggaaatagaaggaaaaaatataggtaaacaagagttacagtaaattttaactggaattatagtagcattacactgtaattgaaatacatacttagtgtaatattaaaattattttgaaagaattatacaaactaattcatttgttcacttcactgtctataatcaagtatcaaattgattgtagttggatttttaagtagttacagtttctgtttactggaattatagtataatttctctgtaatacaaatatatgttcactgtaaatggacttatgaaaaagattgggaaatacactctatgtttcagaacttgctggtttagaaattcaaaagttctttgcaatattaatttattctttctatgcaggtggcatacaaaaggagaaacaaagcaagagttctatggaaatagaagaaaaagaatcaggtgaacaagataatttcaaattttattcacaaataagaagattaaaatgagtctgaaattttttaaaaaaatgccatcagatataaaaaagcacttcaaagctctgacagaaatggatacagagattataagtcaatcaaatctgacagaaattaacacagctatgttgagctcaggtaagaaacaaaaaattatgtagttcaatgtattttttaaaaaatgacaaacatctagatgatctgaactatatactttcaagtgggtactttttaaaatctaaaaacattaaaactagttacagagaagaagtaataaaaatacatgtaacaataactgaaaatacagtatctatcttgacttccttcataatgatttttattttgcaggtatcacaattgaattgtcagaaggagaaagaagtattcagtcaaaacaaattcagaatatgaaacaaagtattttgacagagtataaaacaacttttgtaaactcaggtaagatcttacacaggtattcttattctgtttcagaacaattctttcattacagttaatttgtataaaaattacataaaaaactgtaattccaatactaaaaatttcaaactggaatacaaatttactctaatttttaatgttgaatcaatcaatctattgcaggcataataggtaatgaggtaggaagaagcaatgctctggatgaaccaaacacaggtaacaattcaaaatggaattgaacaaatgcataattcctttagtaaaaaaacacaaaatgcaaaaattacagtcaatttgaaacagaataagaataattttaaacttcaacttgattgttatacagtttgactggaacctatatataatttgatcacaattactttaattgcaaatataacagatcatattggattaggagcagaagatgcaacagtagaaaagcaaagtatggataattcagcaagtatgacagaagcatttgttgattacagcaacaaatattcatatgatgaattatctcttttcggatcaatgaattcagtaagttcatattacaaagtttttgctattaaaggaaaaatttgaaggtggtagtcaaaatactatatgaaaatttatttgcaggttgcaaatatgtcatacacaagcttaatggaacaaatcatatcatcacagcctacgatttctgatatgcaggtaagaaaaacaatatttgaatattatatataatttagttgtaatatttatgtttttattggaatttacaggaacaaaattcagcacactctatttttgttgcgagtccaagtgcatttcaggtatgaaatattaattatttaattgaatctaataattcaaattcaaaagcaaataagtattgatataaaaattttgttttgcagaattcaatgatattaacaacaaatcgtactgatgctaatattgaagaatggaataatgatgcggcaaatgaggcatgttgtcttggatgtattacttcttgttgtagtattaaaaattatgataattttagtaaattttaactttgtaatgtaattcaaattccaggaagatgagagtaatgaagaggatgcaatggataattggaatcttgatatattcaatttgttagatggtgaaaaggtaatttttgttgtttgtacctttttctctagataacaatgattgatgattgaagtttcatagtctgcaaaaaaaagagtacaaacattaatatttcttaaaaaattaaattgaataattcagattagcaatgaataggctagaaaattaatttcagaaactaatggaactgcttttttttttgcaggaaccaagttcaatggataatcatcgatgtacttcagttcaaggaacaagagatgatgacaataatccaaatgataactctgaaacaaatcaacaagagctgatagaagaagacataaatattttcgtagagaatgaacaggaagaagctacaaagggcaataatgcagcaattgatagcagatatataccaagagttggaacacaatttaagaatattacagaagcacatgaattctttaacttctatgctctgttggctggattttctattgtcagggctcacaactaccacacaacaagcaagaaaaggaatggagaagtgactagagtaacgttcagatgtaatagacaaggcaaaccaacttctcaatccaaatcagtaagcgcagaggaaacagtggtttcggaaagaaatacaaatgaaaatgatgcaacagattgcaagtgtgctctggttatttcagagaggaatgagatttggaatatttcaagggtgcaattagaccacaatcatcaactaagtccaagagatgaagtgagatttctcaaatcacacaaacacatgactacagaagaaaaaatgctcataaggaccttgaaggaatgtaatataccaacaaggcacatgattgtgattttatctgttctaagaggaggattgacttctttgccttatacgaagaaagatataagcaatgtgagaaccacaattaacaaggagacaagcagcaatgatataatgaaaactttagaatttttcagaaggaaaaaagaaaaagatccacatttcttttatgagtttgatttggatgagagcaagaaagtgaaaaatctgttttggacagatgggagatcgagggagtggtatgagaaatatggtgatgttgtgagttttgacacaacatatttcaccaacaaatacaacctcccgtttgctccctttgttggaatttatggacatggaaacacaattgtttttggttgtgcatttttgcatgatgagacttcagaaacatttaaatggctgttcagaacttttttgaaagctatgtcacaaaaagaaccaaaaacaatcattactgatcaggatggagcaatgagatcagcaattgctcaagtatttcaaaatgcaaagcacagaaattgcttctttcatattgtaaagaaagctttcaatctatctggaaatttgctcaaagcaaaagaagggttgtatgatgagtatgaagacattataaataactcagttacagaagaagaatttgagtatttatggcaagaaatgattgacagctttgaagttcagcatatcaattttctaaagcacatgtggtcaattagaaaaagatttattccagtgtatttcaagggtgatttctgtccatttataaaaagcacagctctcagtgaagggactaactcaaggtttaagaataatgttggtccacagtacagcattacaaacttcatgatagagtatgaaagagtaatggatacaattcaaaacttggaacagtttgatgatcacatttcaaggacaaagaaaccaagcaaactttggtcccattactacattgagtaccaagcaatgagaatgtacaatcgcaaaatcttcatcaagtttcaagttgagttgaaaagaacaactagatttcaaataaatgaagtagagaagttcaaaacttatgaagtttttttggcattgaatcaaaatattcaagtaatcagaagaaggaagtaccttgttattgtggacttggaaaaggaggatttcaactgcatttgctcaaagtttgagaaagatggacttctatgctgccatgtattgaaagtaatgctccacctcaatgcaatgaagataccagaaaaatatattattgaaagatggacaaaaaaagagtacaaaggtcttgagggaaaaggcaatggaaatatacctttagcacagagctcaatcctgagattcaacattttgtcaaggaaaagtgcagaaatagcatcaaatggatcgaaaagctatgaaactttccagtttgtagtggaagagatggacaaaattgctaaacaattggaattattgtgttcaaataaagatgctgagcaggagatcaatgattcagatccaaatgcagaagacaatttgaactcacatgaaaaaggcaatcaacaatctgaggaaaatatagatgaaatattgttggatctagatattgcaaaatccaaaggcaggccaactcaaagatacaagacaatcagggaagaaatacagcaaaaagaactatatcattgcagtcattgtcagaggacagatcacacatttccaacgtgccctctgaaacacgttgagtttgacttgccaaggaagaagagaagaaaggttaaaaatacaagagaacaggtaacaaaaattacaaatccatatgaattgaatttttttaaaaaagtaataaagaaagatattatttgttgcaggatggtgtagagcagaaaaagaaagatgtttcaaacaaaagaaaagatttgcaacaagatatatcacaggagaagcataattctggggctgaattagaaggcaaaaagaagagaaattcatcttcatcaaaaaggggtggcacaaaagaatagaaatggaaatgactgaaaatagagagaggtttacttgaatacaatggaaatagacatattccataagtttctgtaatattctagaacatgtactctggtttgtacttaaatgtttgtttcttatatcaactacattttatgaactactttgcattttatctaccacatgagtttatgtacagttgtagccctgcaaaagttgccaactgtcatatttgaacaaacaaaatttattccagaatcaatttccctacaaataaaaagagatataaaaatataaggactaaataaaaaacaaaattgtgaaaaaaataatgattctaaaaaaaatttacctgagcaaagtcaatcactagtttctttgttcctgtaccgagaacagaattgtctggatagaagaaaagacggttgacatattgaatcctaatgttttgaatgtctttttgagagaaatggtttgtcagctgaactcttggaccccatagttccatgtattttagagtaaaaactccgcaatcaaaactaggaaaaagaaaaaggacataagtaaccacagttacttatcataaaaaataaaacaaacaaaaaaaaattaaaaaaagctaatgcagttatggtcatactatttactctgtaaatttactaatgaaatctattgcaattctagtccatgttgtactaagaaacaggctcttatcccatctagtaattctgaatgaaacaattgacaaataggaactaaattttttgaatgataatcataacaaacaaactaaaattgtgcattaacagcaaaacaaacaggttatgcaacaattagaaaaacagaatagtcaagaatttctgaatgaccaacagaacatacaagattcctgtcaacaagagaacaattgggcatctgtacaactctaaccaacaaaaacaaacaaataaaaaatattattggactaaaagttacagtaaagaaaaacaacttacagattattttggcgaggtactggtggatatacaattttgaaagcatcaaaattgatttgatattcttccatgatggaattccaagcaagtgcaaaattggatgtctacaaaacataaaaagaaaactctgtaattataaattccaaatcacaaattgaacagtaatacatatatttaaaaatttgaaaataaactgaccaatctattcttaacttcatcttgatattcagaaccttcttcatgtaatgagtcaagaaagacaaacatttcatctttcagatgaacaatgaaaacaaaccagtggcgcttgtagagaattggaaagaagagctgaaacaattaaataaaacaaattataaatgtaaaaggaaatatgaaattaaatatgacaagtaatttacaaattcacaaaccatttggattttgaggggtgagataaatgaaacaaatatcggcagaacacagagacaacaaaattagaaacttcatgtccaaaattaaatgatcctccaaaagaactgaatttgcagtgaacaccatcaatttcaactgcatgtcgtctacattcagaatacaaataaattcaaattacaaatcatacattgaaaatgaagattattagaaaaaaaagtacaaaatagtacttactcttgatatctgcttgttgatagagtgcagacagcattataaatttgtctttcatattgtgagactgtgaagtttgatctttgaggagtataaggatctgtgcaatactttgcgggattgattacccttctaagatcgtgatgaattggttttgttccagaagtacttggattgaaattcttcatgttgcataacaaaactctttctggactagcaaaggttttgaagttttgtttctgagaatccaacataattctattcattttattgtacatcatgttggttttgtttccaatatcagcacatttcttagagaatttcttttcaccaataaaaacaacatcaggtgaatcctgaaatttaacaaataaattaaatagtacagttagaaacatattaaaaaaagaagatcaaaataactagaaataaaaaataataattattagcttataaccagaacagaaaaatgataaataaaagtaaggtatagggcatggaatatttgaaatatcaatatgaaataacagttaagcaaataaactagtgatgttcaacagcaaacttacaaacttgagattataaattgaataaaaagaaatgaataagcagtgagaagaaaaaccttttggaataaaaaaagaaagaatgtatgttattactagaactgaaatacattgtaacctacaagaattacagcaaaactatggagaacaataatgcaaaaatggaattagaaaaatttttaaacaccatttaatttcaaaaagggaacatcaatgaaaataaactatgagattattcatacctttatgatgtgacaacctttttcattttctttgttttcattgagagaagcattaggagaagttgaattttcaagtgtcaccatgtacatcttatcctaaaattttaaaatttaacaaatgaaagtttagtttgtatatacagaagaaataaagaaagaaattaatgtcagaattaccggactgtctgaacagattattaggctttcaacagcagcagcaaaagtttgagacaactttcttggagtgatctgcaagatttgtataaatcaatataatgttctaaaaaagtattccttatgaaatttgaagttacttcacaagtaccttatttcttaaaacatgatttggggagtatgaatcaggaataacttgatatgaatctgcaagatgagcagttgtaatttcttttttgaaatcatcattttcatgatggaggtcatcatcagaaccccagattttaaaagacggttgatcatgaaaaacttgattgtttcgagctacagcaataacataagaattagaaacaaaaaatatggcaacaaaaagtaagaggaccatagtacagtgcactaaaatcacatgacaaaagaaatgaaatattacaataactcaatttttttgatgctagaacaattaaagatatacaagtaaaaacaaatgagattccattaaaaaaaatttaccagtcaaggcagaatttttctctgtttcatctggtggattaataggaacatgaccttcaatgttaaataggcacaaacatcaataattcatatttaattttttaaaaaacagattaacaaatttagaaaaaaaaataacctgttttgttcaactttgtcattatttcatcaatgttgatatgtttaatctgcacagataaaaaatgacagttaaaaactatcaacaattacagttctatatattcagattataatgattgaaataaaaatgaaagaaaaacctcttctgaagaattcaaaatggtagacttattcacaggattaaattcttcatttggaattggcaacttatcatcatctagtactgttttactgtttccctacaaaaaaaaataaaaggacaaaaaaatgcttaatgattcacatgactattagaataaaaaaaattgaaatgagaacagaaaacaatgtacctttggagatgaggtgaaattgttatttttttgcacagcttgattaacatcatcattattttcttcaactggttcatgatctggttcaattccttaatttaaaatttataaaaaaaatcaagacatatgaatggaaaaaaattaaaaataaaataaacaacaaaattcgtaaattaaaagtaataacctgaattttcatgtgtagtaggttgagtaggataattggaactgcaatcagctaacaacaacagaacatctataagaagtttcttagccttgtcttcaaagatttcatcttcttttccaaaatgattacagagcaaatgacaaattttgtcttgaacatcacttggcaacagatcaccaacagaacttttgagcatatcagcaaatgaagatgagctattattcacctaaaaaattaaaacagaattttcaattccaatctaagaaaatttattagaacttgaaaagataaaaaatttgaaaaaaaaactaaacatttaccatttggtaacaagttgaagcaatatcattgactggtctttttccatacactccttcagatattttatcaaatttggaatagtccttaatcatagatcttttccaaactttaattcttggtgtatcaagtaatactttttgtgaaccaaagttgagaaaatccaggtaattaacctatgaaacattgaatatagaaattaaatgaatagtcatttagtacaaaatataaattagcataaatggagggaaaaaaatttaccgctaaatggaataaacaaccaccaaaagttttcgatttctcaatcttgctaatgtgttccatcaaccagtcaaaacctaacttgcaccagtccaaactttcaattaagtccatgtcttcaaaggcacttaggtattttgtacctggaatcaaagaagagtttggacaaaggaagcaattcaaggaaacaatcataaagcagatgagaatttgatcatcaggaaattcttcatttttaattaacttttctccaatgaacttgacagaaggaatagaagttttcccaaaaatctgaagaatcttttgtttgccagaatcaaattttgaatggattgtactaccaccaacagggaggcctagcacaacatggacagattgcttgttcaatggaataagtttttggcccaaaactatatcagaacagttcacatctacttgttttgcaatccagagagcaaaagaattgggaacaaaacacttgtcaaatagcagcatgctttgaaaacaagaattttcaatgactgttttgtgatgtggacttaaagaatcaagaacttttgagaaatatttgactgagaatctagagaatgcatcagacttcaaatcagtgtcaacatttttgtcctgacaaaaagaaaataaaacaatttaatcaataaataaaaaccaaacatagatataaaagggcattgcaaaaaactaaccttaaaattttgatcacctatgttgtgatgaatattaagcttttttttcaaactgttgataatttgatccctttgtatgatatcacgtagaacctgatttatcattacatcattgtccaattcaatagattcagaccatttcatctaaaaaaaattcaaaattaaaaacaagaatgatggaaaaatataaaatgaaaaataacaaacaaaataattaccttaatgttatcatcttcacttcttttagacttactgagtttccttttcaaagttttcagaagttcatttgtagaaatttcatttacatgtggttgtgaaacatccatatcctaaaaaaacatattaaacaattaaaacattgcaaatgtgctatgaaacatggctacaacagagctacaactgcatactaatgaaaaaaataatgaaagaataatggatactattctgaccttggaacaacatgacaattcaagaacaaataaaacaagaaaatattggtcctactattacattggctaccaagcaatgagaatgtataattgcaaactcttcatgaatttacaaatggaaatgaaaagaacaactatattacaaatcaatgaaattgaaatgtaaaataaacttacatgactggctgagttatcatcagaatcacaattgtaatcatcatctttagcaggcaaagactcagaattaatatcatcagattcacttatgggctggctacaattatccaattttgaacgcttttggtgaaccatctattaaaaatagcaataaaaaatcaataaagtttggcagactataaattataaaataagtgaaggtatgcattaaaaaaaagatatatataattcctcagaaattgaccactttattcaggaaaaaaatgaacattacttaaacatggcaaacgaacaaaattaactcccagtacaatatatacgttggttagtactttcaacttgtaagtcaaatgttatagtatatctccatgtcctcacaaatatatgcaaagaggtccacactatgataaaaagtcaaacaatctcacaaacttaagccctgtacacctgattcacactagggaacatgaccattccacagttggtctatgcagaggcacgcaatccaatgaatccagtctactacaaacattagcagtagaaccgacacaaatggcgtctaaatccctaaaggggaagaaatgttagacctaagtacataaacacgagtccaataacaaaaatggggtttgcactagagtgtaatccagtctactacaaacattatgaacagctacaaaaagacatccaaatcccacaaggctaacaaatttgcatagatcataaagttctcaataaactagcgtaacaaaatcaattaacctgcctgcctgccctaacttaacataaattaaattaaggggctgtctatataggaatcgaatgatctatataagttaaaacctatattgatctacacttcagatcaatatctcaggcttcatatttctagcttacatttgagtacacacaaagaactagaaaacaaaatacaacgtggatatagtacttatgtagcaatagtaatacaacacacaactaaatcacacacatcatcatgatgcaaagtttctgaatctgtacaacagttcttttgatgacccatctaataattaaaacaaagggagagagacaaaaaaaaagcacaaggagttattataaggatgcacatattagaagcaatggaaaaaatgaaatgagaaatagaacattgcatagcacacagggaaaatagaaacataatcaatacataaatcacagcaataattcactatcagatctacagctaacaataattcatcagctagcaagctaaacaaatagttgaagactacaaataaagtacaaatagtcagagatacaaaataatgcaacacaaacttctataaatccaaacatgagcaaacttcttcacaaacatcattcaaaacaaatcacacgcatctactaaaatagcaactcgcagattcaacaaatcacaacctaacatccggagaacaagggagcaactatagaatcaactcaaattcccatgggaaaaactagatctaactttacacatcacagatcacatagcacaattcgtaaatcacatatcacatatcacagatcacacatcacacatcacataaacgaaactttctagaacatcgcatagcacaaatttatgaacaaatatatcacagaaacctaaaaaaaatcacaaaagcaaaatcgaacacgaatcatggggattcaatgaaacaaacaccgaaacaaaaggtgctcagatctacgaaaactagaatgactagtactacagaatcaacgaaacacaacatgtagcatgctaaataggagatggaaatgaacaaaaaagaaaaaaaaaacaaaaaggaaagccactggaataatcttgcgcaatcgacggcgcgacacctccgcaacagcagcagacgccgagtcgactcgccgaagagcagcctcgtcgcctcgctaaatcgccaccgcgtcgccggagacgatgagaacgagacgacgaaatcgtcaacctctccttctataactctctctctctctccatcggcaaaagcacaactagcggagcaaaacaacaacgaatcgagcagcaagctaacaaatgaagctagagaagaatcaaaacatactcaccggagaaaaagaggagaaggagctcgaggacaagatggagaagcccacaccgcaaactccagtggaatcaccgccgcgacgtagcctgcatgaatccacaccgcggcgtagcttacgccgcgtcgtcgcttcccggagtcgccgacgaaatctccgccgaaatcgccggacgagacgacgaggaaaaaggcaaaaagcaaaatgaatctctcactctctctctctagtctgattcagacaatctctctctccggtgcggatttcaaaatttgaatagtgtatgtgggtcccaccattaacactctctcacaaaaaaatctctctctgtcggcaacacaaagtgggtcccacaaaaatgtaaaaaaaaaaagaagcccatttagcccacgtatggaagcccgaacttacaataatcaaaagcccacatacaaaagaaaacaaaagtttagatagcacgaatctcaaacaaaatccaagggaccaaaaaacgaatgatacagcccaacaaaaacatgcgacagccatatagcctttccgtttagtttatatatgggctatttaattgggccaagtaagcctacattgttgaaatgggctacttttacaaggaaattcacattgcagggtcccgccagatcacccatggccaggttggttacaacccgttccttccccggaaaattgccacccctactagctatagctagcgatctgctggctgccgtcactacaacgtttgttccctgtgctctaatatatagctattagttacatttttacggtctcttcgattaatctcttaagaaaatgggtgtgatattatgtctttttttctaagaactttattatgtcccttcaaaccctctctcggagactaatcgaacacggctttaaagagactgtaaagtcactccttaatttaagagaagacagccgtgtttatctagtgaaggagctataaactttgcctttcttaagaaaatgactagtcaagaactctattaattatactacatttcagtggccggtcattctgatccaaatgtgtcgtggtcgttaattaattaccactcaaaatcactgtccatagttcggcaggcgactcctaccagataagaataaatacattaaattgccactgtatacgtagtgctgatctatcagttaggaatatttgtacaatcatataggaagccacatggaactcaagtatgtccagctagccactcttaattaggtggattagtacatatatattagctttcctcctcaaaaataaaatgtggataattgtcagctacaattttccttttcattccactttcggaagttaagggaaagaaactgatagtgaaatattaatatataatatgcttgtaagaatacttgccaattgagattcggaaagtaacttttgcgtgtttttgaaaaggaggacaaagggaaccattttgactcgatggttgcatataaattaacaaccaaaactaacaaacggataataataatccataatcgattcctctttcaaggccatcgtgttcctcttacagttggttacataatccatgctttgcccttgatcatatagttaaattgctccgatcatttaatctatggctgataagcctagcaacaatgaactaagcaagcaaaattaatttttgggtaagacatttaaatatatgttttaaagtactttaaaagtctatactagaaaaaaaaaactactaaaaatcaatattattttacgagaacccctataaattgcaggcgggccataagtgtcctttcatgcaaaaatcacttccacaagaggtgattcaggggtcacatgtgacaatttatttttgcatgcgtccccttaagaggtccacctacgagaataggtgcattatcacaggcggaccttttgaggggccgcatgtgaaaatacatttttgcacgtggccaacgtgtgacccacgcaacccactcctcctttgccttttcctcggtgcgcatacttcctttttatcttctccttctcctcctctccacctcttccctttccatcccatcactcatctcccactccctctccccttctcttctccatcaccggtctcacgagcaggtggcgtggagacggtggccacaggggcgggcgggcgctggcgtgcggatccactgctcccaacctaaggaacagtgacggcaggagcgagcggccacagcgaccggctggtagatccgccgtgcacagatcgaggcgccacccccatcctcgggagcgagcggccacgacagctggcgggcggatccgttgcccttgtccatcggagcaacgccggtgggcggatccgccactcccgccctcaggagctacggtggaagcaaacggtcacggtgaccagcaggagaattcgccgcccccgccatcaggagcgactgcggtgcagggatatgctgcccttgtcctcgggagcagcgggctcaggcagtgggacgggagcaggggcgacgatgatggcagtgatggaggctgcgatgatgacaatgacggtaacagctgcacgatgacgatggcagtgatggctgctccaacaacactggtggtggtggctgctccgacgacgacggcagcagtgactagtgtcgacgggagatacccgtagaccggatatagagggtattggggtacgctggtacgaggatctatgtaatacgacatcaagcaaataaaagacaaggattatactggttcaggccccttgataggtaatagccctaatccagttgatatgggattatatggtggaaaccacaaattacaaaggaaatagcagaactcgatgataccgacgagactgtagtcgagttggttcgactagatcatccggcgacttggctcctgtaggctccgactttgtaggctgtggtggttgtgttggcgatgagattcgatgccttaggtcctcccggggggtcccttttataccgcgggtcagttgatctccaagtagaacttggagatatcagaccccacatgatacagtaaagacccagttcagtccgagtaggactccttccgtccgtggattccgtttttgttacacgatgaatttccttaatgcgtacaggaaacatccgtgtacgcacaggtataccgtatcgatatacaacatacatcgaagggtagagggtataccttatccataaccctgacaactagagtttcggtagaatcggggacgctagggttttaggcgactttgttttttgggattttttttaccgaaactattttcacggacgatcagcataggtgacagtgtacgtcaatccctttttcacatgcggttgcgctacccgcatgaaaaaatgttagatttccgcagatacctggatataggcgagccgcttggtcatatacaaaaatcagttttggccatatggaaaaatgatttttgtacttaaaaaaatctcaaaataaactactttctaaatcaagttttagaatttaaattttggtcacgcgcgcagttgataagacaacaagtatacaatgagacgcttaaactagatatctggcgaagaccgaccgttaaaccaggaaagctagagcaatacatgaagtggtttaatccgagtaaaagaccggagatgcatatatgaacccacaaactcaacgattcaaccatttgtccgagtttaacaactgccgctaatttatatggtccaattacctcaaaacttgatgtaagcaaaagagacctaacaggatatgtacatatgcaaattaggtcaggtttgtttggtttgtgaactgtgccaagtgaaattttggcaacattttgctacacttggcgtttaactgttcgctagaggccaaaagtaggattaagtcgcattagttctccttatctatttataaagtagaatttcaccaaattaattatgctgggagctagaaaacgattttggcacatccatatcttggtaaatccaaaactttggctttggctcacacataggacgtatcctagctcctaacctagtccaatataattaattcacttggcatgcagtttactcaaatctagtaaaaaaaatatagcggccgttacccaatgtttcttctccacaatcatttcctaggggcaattgatcaataaagtaggtgcaagcaatccaagcatgcagccagtggaagttagaatcgatcgacaagagaaaaatcactcagagaaaaggatggttgaattgatcaggatgtatcaggccgcgtgagtgtaatgccaatatggcattgcaatctgtatattatattcatgtttactaataattaatggaaaaattaagtcctctgtgagctagagaattttctttagttttgctaactaataggctaattcatattaaaattaatgagtaaagacggataattcactgaatacaacatcacacaatgtcatgccaagcttgtttgtaccatacaagagccaattgccttattgcgagacgagatttaagagcctattaattaatggtgcattcttttcagcgtatgtttcacctaagctctacaggcgcatgaaaaaaatcattaacacgtaattaattaaatattaagtactataaatctaaaaagtagattttttatcaggaaatgtgctaactgaaaacgaagttgccctttataactcaccctaaatcataacctccttgtctcatatacttcccatgcgtattagatttccaagattctcgagcggtcttcaaaactaataaaattaacggacggcacaaataaaaaaaaaagttaaaatggaaaaatatactaccatgtcttacatgggcatgtaaggttccaaacgtcatcaatcaagtaagtaatgaacacctataaaaaagatatgctcccttcattctaaaatacaatcacttctaacatttagaacttattctacaaaataaacactgttaccactattcaaagtacttacttatctcatcaattatttcttatttaaattttttcctgttttaccctaacccttctcacttctaagcagactcaaccattcaccatttatgaagggacgctaaaaattttctttctcaaccttagttaagcaacctatagttcttacatattgacgtgcaattcttttacgcattcggaaataaaaaagttaagcaacctatagctagctatacttacgttttaaaatggactgtggtatacgtccatatgcatgcattatttcatgcaggttttgcacgtatatgtgcacgtatatctgctccagtcttttgtgcaatatgtgcgctggacaacattatattacaaccgaaattcagtggtcggagacagctttgggatggatgtacttgcgtatgctttccactactcatgcatgtccatctgcaaaagatttgtcggagccagctaagaagaaaatattctcacactgttgccggattgcaattggctagctagctacctatatatccgcatatgcctgcacatggattatattcagctagtttcttgtcgattgagaggtagatgcaaattacaaaatatactattataaactcaccaagcgatcgatatttatacgaggagctttgatgtagtgatgtaattatgtatagctgtaaattttatccaccagcaggattcaatttatgttttttttttaattatatggaagacgcacaggtgtacatatttatacacaagtgaatataccctataagaatatactttcaaagaaacagaagccaatggtaaatctatggccttactaaatttttattgatggcacctgagtgtgcataatgtttgtgggcattagaatttgaaatctacacccatgatgtgcgtgtgcacacatatgttaacattagaaattctgggactcgtatactattttagttgaaatctatgtatatgttaaatatgtgtagaagatatacgtatataggagtaattggtaagataactttttaccgttcctaagtaatacctataggtacaaatatttagtgtaaaatttggtaaattctatgtacctaattaattaggtattccttgtactattttttacctaaaatttagtgctcatgtttatgatataaaaacataattataagtaataaatttaaaatacaaatggaatagtatatttcataaaaaaatcatcataaagtaattggtgttcaaagttttattctaatcaaacaaaatatatcttatttttaattggagtaagtatgtatttatgtgataaaaagcataatcataagtaaactttttttcaatattaattaattataccaatctatctatctattatatactaaaagtccattaaacttcctacaaacgctctcgtactgccacatggtactcctagaaacgctcttaaaccgctatgtggcattctaatggattaagaaaatctagccctcgatttttatttaaattggcaggcccattatttcaaaccattagattggattggattagattgaatttagtgccttcttgtcctctctctctcatgtacgtacgtgtccctccccacacacgtatgtacgtaccgtcgtaccctcaccaatttttctttccgtttaccccctttatttttctcacttgagataccttataatatgtgtatattaccttcattttttatgctgttgatttttgcgtatatatttgattttaaagattaaacaaaaatatgtcattataatttattttattgtgattttacattaatgacttatgttggttatgttttagtgcaaaatacattacaactgatgacgttgacatgaaataaataattccataacaaatttttaaaaatatttcacatcagatttatagtttcaaatattgcttaacaaatataaatcgctaattggaatctacatgcaaattaacaatgtatttagtcgtgtgttttttcaagtatatatggtataaattttaactcgggtgagattaagattcacaaatagttttggaattttcctttcttccttgcactcctaccaacgcttctaggctgccacatgtcctactaataaattagaaaaaaatcatacaaatcttaagaaaaaaggaaatcatatatctatatattttcatttaaatcggtggacccattatttttaaccgttagatcaaacttaaaaaagaaccaatactttccacctccacctccctctctgtacatcacagattggatcaaacaataaaaaaaacatatgtaccatgtctcctcaggtacttatatacgtactctccatccattgcatgcgtacaattatatattctactgccataatttttaagcaatatatccgtttttttaatttattggaactattattaaatttattaatgaaccaagaatatgggatatatattgctcatattatcatatataacatttggacatactacctccgttttttaatatatggcactgttaactttttgataaatgtttgaccattcgtcttattcaaaaaattttataaatatataaaaaaattgaagctattcttaaataaattttgacgataaattaagtcataaaaaataaatgataattacataatatttctaataagataaattatcaaacgtataaaaaaacaacagcatgatatattaaaaaaaggaaggagtagaaccctatgctttgcatgccaactaaatatcaatggaacattgtaagaaattggaaataaatttatcattgtaaacatttacatgtataaattagatagatggtgtggaaggaaataaaaattataaattcaatgacagaaaattattgctacacacacaattcaaataccacaagttggtgaccatctataggactcagccaagcacaacaaaaacttgtagaaatggacgccgcgtgccgccgacttgcccaacagcagcaggtagttgccgaggtgtcataggtttgctaatgaagattgaagataataacatcattgctgtccagggagcattgagatgtaaagctcttggagcatggcttagaatcgtgattatcaaagaaaatcttaaaaattgaactcatttaaaccgattgtcctatactttctactttataaccattagattagattgatctaaacaaataaataggatcataagtgatcaagtccgacctctgctcctcctttacaaaccgactctgaatattgttcgatatggctactagcaaaagggtctattgatgtgctggttggtgggaaatgctaagctggactttggtcccatgagaatagtccagcaatggaaagatgttttttctgtgtatgtgctttgcctaaaaaaatataaatatgctttttgtcgactcgcccggggaaatatagatgactcgccctgggagaacgggagataccatgctggcgcactgtcgtcgccacgaggagaggtgagaccaagctgtggggcacgcgccttgacgtggtctgcctaagggcacacgacaccagcatggtgtcaccgacctgccaagcgtccactcactgtttaacctgtcatatctctctatacacgaataatcgtctcactctaattaaaaataaatagattgctatgtctaatacattagatgaaacacctcaaaatttattactgtcctaaaatacgtaaagacatctacagtatagaagaaaaagttttactaagtttgaaaactaaaaaaagatatactaaatattttttaaaaaataaacacatggtagaaaatagataggaatcaacttctttattgtaatatactacctccgtcccaaaatataacaacttttagctatgaatctggacacacagttgtccagattcataactaaaaatacttgtattttaggatggatggagtaatattttttagtttaaaattttatacgatgtaagggtaattagcataaaatcgtagccaatgcccaaacaaatacatattaaaaaaggaatcaaagaatgtttagaaaaaaaatattacctgcaaataaaccatcgtaataaaaatacaagcaatattaaataaggtgtccgtgtatatgcgcgggctacttttctagttttacataaaaggtgtgttcgatagtgtaggtttggagctagtaagtacttaaaaaacgattttttgtgtttgaggacccatatagattgtagccggaccgtaattaatcgcgtctacaaaaatcgaccttcatttttttatacgggtgtcccaaccgcatagaaaattaggtttcgttcgtatggaaaaatgttattcgtgagtagttggagttaataacgtgcgtcactgtaaatggggtcaatctacgataatatttgtgcgtgcatcttctctatgatcgatgataatctgaaaattgttttgtgcatgtaccgtcatcaccgaagctaatactgtgtgctactaattctcttagcttagctagggatgctgcactatcgtgcatgcaagcacacgtcgtttcatggatgcttgctgcaggcctggattaggagaaacaggatagattagtggtttgattattccgaaagctgtcaatctgcaggtgattgatcgattgaaacacggggcactgctgtctgtatgtaggctatagcttaattaagatcgagtacgtacgtagctcattaactccacgttatttcagcttattcatcataaaaaatatttacaccacatttataaaatatgttcttaaaagctttctttcgattacattactcaaattgattattttatactatttgttatatttattccttaatatatttaatttatcattataaccacgggtagataatccgctcaactatataagcctattgctgctagttattactccctccatcttatcacaaaataaaattacttctttatttactctcttatttcaactacttataacaatctctcatttaatcacaaccattttctatttagttttgaataattttacccatcgggagataccacattttctgatataaaatttgttaactctgagtactagataaattgaggaactaaaatttttatacctctgaatactttttacggatcataaaatttatctttagttttatttctctttaatcttcataaaaattctaatccttacatacattttaagacggaaaaattactactgctaggtagtggaagcctacaagtaggggtgaaaacgatacggaaacggacgaaaaccatctttatcattttcattttcatatcttttttgaatcggaatcggaaacctcggatacgaaaacggaatcgaatattatcgaaaccgaaaatggagcgaaaacgaaccagcgcgaatatagtaacgaaaatttatcggaataaaaaaaagcactcaaactgatatatccaattgaataaattatctatatttaagagagtaatttgttgataaatcccaatgcaggaaaaaaatattcttatgtaattttagatttgcataataaatatttttttaaacaataatagccaaacaccatgatattcactattcagtgcttaaaaaaagaattcagggtatttctatcacaaaatttctggtaattctgagaaaatttccggaaagtttccgaccgattccgagttccgacggaaactacccttatcatttccgattccgtttccgagaaaatatttccgaattcatttccgtttccgaaaaaatccgaaaaaaatccgaccgacagattccattttcgaaaatagatccggaatccggaaagttttcgtaccgttttcaccactacctacaaggcaagggaggagactggtctagcaggttgggcttgagcctagacctacctccaaaatcttgtttaaattgtgttgaattatcacgaaaattttgtaaaaaaaccatcactccattagttaattagccctaccgtagccttattatttaaaaatttctggctcggtcaccgccggaagatgatgcatgcgtaacactgtattagcaatatatgggtggtggggtcaggtgcctcgctatcaatcggtaattcgttatccagtggccgcccactcgtgcactccaaaagcaagctatccggtagcttagcaaaagctatatatatatatatatatatatatatatatatatatatatatatatatatatatatgcgctgcacgagtatgagatcagcctgtccggacaaatgctgaaaagattaaggtactgttcactttgataccatttttaaccttatcaaattttgataaagttatcaaaaaaaaaagtggctatatttagtttgctactaaatttttgtaactatataaaaaatcctgctaaaattttaacaagttaccaaaattttgacaaatttactaaaattttgacaataccaaaatttaataaggttttttttggcatcaaagtgaacatgccttaaaggagcttaggcggagctatagttagcggcgctaacatgtttttttaattatcacatactccgtactcttctcgaagctactaattaggctaaactagcgggaggctggacccaggttttctttctttttttttttgtcccggctgtaaaattggagctttttttttattaaactcaaaacacgacagaaagaaattgtagacggcagaaaaaaatgagtacaaatcgttcatctcggatacaacactactacatggaacgctactacaaaacagcacgtaaaaactggtcttatagatgttggtttgtttgaaacgcacctataaagttttttttccaattttttcaatgtaaaattaagagtcggtatctataaccactcattgataccagtttataacaaaaatcgataccaatagtccattaatgtcatatgtcgtcgtttgatgtcacgattaaggtatttggatagtatggggatcgttggtactatgatatatgcaagtttgaggtaaaagagaagagaacggggatttttatataggttcgggccctgaattgtcaggtaataatcatactcctgttagccgaagccggtcattgctcttattcaccataatcacaccaatacaatatttggggtagcctatctaactattgtcgacttagcggactgaagtatcatcacgtagtcaacaacagggtagtcttcctcctcgaatttgtgcccggcgagatcagagacagcgctagatccctacagccggcctctataggtaccggatagggccagtccaggcatatctctgatgtcgatatccggcggcgtgtcttggcgtatattggcttgtatgttgatcttgtatcttgatctattgttccgtgccccctctcctcctagggggccttgtattctaattgtaaaccggcacatatgagctcataattgttttacagttaagaatagtcacatatgtaatgcccatatgtgctggctcatgataaaaaatggtacatatgatattatccttatgggtaccgatttattaacaactggcacttgtgatgttcatatataggtaccgatttattataagaatcaacatatatgatgtcaggttatggataccccatacctaatagaagttgactaaatctcagtaggacccaccacataccatgtcttatacggaaacaaccttcggatataggagaagttccgcataaggaaggatgaatagagttctacatggaaacgacaaagactattcggattgtatccatattgatttccctagttctatttggacaaggggacactgatgacataactcatatatgtgtgtgtgtttttatctaacttatttatataaagtcgaatgaagatacaatttatataaaatttttagagctcgacgagatcaacaaactttgtagttgatgacttttcgatttaaggctgtttggatgtccgaaaatgtgttacaagctctcatatatatttgcataagtgaatatttaaaatttaatgatatcggatggaaacaaaacctatatgaaagttgtagatctagatgtgatctacatttctgtagttgataaacttttcatttgagctcatcaatagtattaaatatggattataagtttggatgacattagtctcaaaagaatagcatttgttttcaagataactgtagttgtaggtaagatggtaaggagactttgtgtaaagagagaggttttgagttcgaatcttgcttgacctatgtcaatcaatatgggtctaaaaaatcatgttccttgtcaaaagggaagtgtgggtataggtgcttaataaaaaataccaaatattttttcggttttttcagcacctgcaaaaaaaaaagtgtgctggttctaaattagaacaaaacctatagtaccacataggtgtcggttcttgaaccgacaccaatgacttgtgttatgggtatcaataataggtgcgggtacctataagttcttaagaaccggcacctataactttttttatagtgaaaattaggagatactaagaaaaatataattgaagtatgaatgtatcgattatctttgaaaaggttggagccataccattatcaaacttgcagcgcaatctatgtactatttttttcgattacatgaaagattcacgtacatactatctatcacacacacattcgtaagtgtgcccccataacacaagctcaaaaagacggggattatagttacatccttggttttactaaattcctattgaaaacacactcacgcatgtgtagtatttgtagtcaccaaaattttaatcctaataagtagattcatacacccatgactttaccccacacaactaatactatcgcaaaaaggcaactattcaccatgtgcgtgtgtgtatatgcgcgcgcgcgcgcgcacacacacacacacacacacatatatatatatatatatatatatatatatatatatatatatatatatatatatatatatatattctcccaaaacaatagaacgaattataataaatatttcgctaaacatatcggtcctttatgtcgatattaaaagtcattctattgtaataatttgatagtcccatgttacatttgtccaagactatcatatcagtcttgggcagaatggagacaacttagttttgttattaaattttataacatgactatgtaactttagaatttcatattttgcatgattgcaaacataagaatcctagcatgcaatctgattaattatagcctagaagtctagaaaaaagttgctagattacctattcttgaaccacttgtcatttctatatccttccaggcaaaagaactttttcctttgctagtatcatgcctccttctttacatttgtgcctctattttttctgcacctttttgctaactaccttttggaattcgaagtacatgatgcaatattttcatgagacaaaagacgacaagataaccagcttagctagctatctatctctcaatctaaacaaagattcactttaatctttgcaacgcagaacacgccttatttccccccccccccccccacatccaaattaatgattgcaattgaagatccatgcgacttaatctaagagaaaaacagaaattaaggtatactcaattgtaaactgattcaaaggaaattcccaaaaattatattgcctagtacgcattatcatggaaagcatatatatgaatgttaggtactaactagaattgcagagaaacgaaaatgaacttccaggcttaattaagtgatcaacttaggctccatttggcacttagcggattgcgaagttgctatgatcttggtacaattagacattgtattgtttaggtatcaatttctctttaatttaaattacaaacaacactattatggcattcgaaaaatatgaaaaaattatgatgtacacaaacactgttggataaattatttcatctaaagataatttgattcatacggtagactaataagggtgtgttcgctattttcagttcccaactagaatagtaaacacggaaaacggagcggtccattagcgcgtgattaattaagtattagctatttttttaaaaaaaggattaatttgatttttttaaaagcaactttcatatataaactttttgcaaaaaacgcaccgtttagcagtttgaaaagcgtgcgcacgaaaaacgagggagaggggttaggaaagagggtgccaaacacaccctaatgatgtatatttgcatatgcttttagagtattgtattttaaaaataagtatagcacaaagcaacacagcaacaacaaattaagcattatatgaacccacccagtgaatcttctaatagtgaatggcagtgctctcgtttcttcccttagaaaaaaaacccaccaaaataaatatttacgcttataactcatgtgctcccttcgtaaaaaaaaatcaaattctaactatatactctttatgtactcgtaaagaaaatcgtttagtaaaatgtttaagtcaaatcttgaaaatataaattataaataattctgtttaaaaatgtaaaaattatatgaataaatttgccttagaaaaatactttcataaaagtatacatatcacttttcaataaatatttttatagaaacaagtcaaagttatattttagagactgtatcgctatctaaaacgactttctttacgagtacggataaagcatttggaaacatactgtgtacaaatatatagctataagtttttttttcggacaaaaggtgtagaagagtcctcgcttgcctgtcgaaaaccgtggtcgagacatgccctattgccgaatccgttgatggattgaacatgccacaccctcataggcacatgacaaacagtgggcttctttctttcttctcaccaaaaacagaggcttcattccgatcgatcgccaggccaaaaggtgtggtcacaacatgagtcagtaccaagtgacaaattgcaacgacctatcctaacaccctatttagatggcactaaaacttttaagtccatgtcacatcgaatgtttgaacactaattataaatattaaacgtagactattaataaaactcatccataatcttggactaattcgcgagacgaatctattgagcctaattaatctatgattagcctatgttatgctacagtaaatattctctaattatagattaattaggcttaaaaattttgtctcgcaaattagctttcatttatgtaattagttttgtaagtagtctatatttaaaattagtgtctaaatatagaaactaaagttaagtctctggatccaaataccacctaagctttaatttgttctactactaatattctactagtgcccatcactcagtcccctctgccatagctagctttatgatgcatatgcacactcgattattttaacaagaagaaacaaagctttggtcgttgatgtaaaaataaaaaaagaagtgcattattttatcacatagagattatgatattctataggttaatcatgaaaatactaaacaatttagtgtgttcatagctttaagagaccattggcatatagttggaaatagtactatggcatatagttggaaatagtactaattaaaaggagcacatagaagggtgaatcagatcaaagttgtaacaaaaccgcggctgcatcaggcaacgatcaaaaacacctacctggaggccttgggagcacatagaaattaatggttggttttgcccaaaaacaaggcacaccgttatgctgattaattatgcccactattaattaggcactaactgagagcaatgctcgttcgctatcagaccataggaatggaaattatgtttgttatttagcgttctgatgattatgtgctgtgagctcatagataagagtaaataatgtaaatcaaatatatggctatgtcatgcaatattggatttcttgcaaaatgttttcaaattttctggtatgttcctacatggtttaaattcaatgtcttgcattagaggctatgtataaaaaatatggttcatacatggttatccatggagctaaatgatctctaaacttctgcatatccctgtaaaacacaaatatacaatattccgtttatattcgtataataaccaattggaccaccctggttccgttgttttcattgataaacaataaggtaatatggtcatctgtacttgatatgatttttttagtgagctaagatcagatcccagcaggtgcatggcagcaaacagacaaagagcactagagggctttttaaaacaatgagttaggtttcgggtgcggtttttcttttatagtgattgctagtagtacttatatttgtaggtcatatagggttttaagccgctaataacggtgttggatgtagaggtaaaatgccatattggaagaaaagaagcagccatagaggtctatactaaatatgctattatgtgcggcattatcggactgctagtatagtatatcacaccagaagaattaaaatatgtgcaagatgggagtcgtgtatgatttcaagccactaacaatggtgttatctatgacagcaacaatcaagtgccatattggaagtaaagaaagagccacaaaggtctaaaatatatatatttattgtgggaaaagtctatacgtactaactttttcttactaaatttttactaacactgacatgtcatgctatgagtctatctagattttttataactttcatctgcttaaattaaacggttgagatgattgttagtacaaatttagtaagaaaaaattagtacgtgtagcagtgctctttattgtgcgtgttactattagtcagttgtatcttggttgactatgggtcctttatcttaatcctagatagttaaatccgcttttattcaatagaaataacaggagaaacaatcaagatcatgaaccatctactcgtaaaaaggaactcattgagatggttacatgcatactccctcaacttctttttaaaagtgtcaaaggggttcaaagaatcggtggtaaccggttagtgagtttgtatcaggattaaaatttatgtttttgcatgtatttgttattatagcctcatttattgttgataccaataattttaattagattattattttcaaaaaactttatctagtaaattccgataatcattttgacccaaaagacatatttttatggatactaatttgaaaccttggtttcccaaaagactttaacctaagaatgaaagagtgaaaacatatagtttcctatatagcattcggggatagttctgttcacccatttcggaaggaggccggaattttattttattccattttctaaaatataaataggactcgagccaagtggttggatacatctcgaataaatttcattatcgaaaaaacaaatactccaatatcctccgtttccatgctcaacattttacatatatgtccatttgaggacactaagattatttactcgttacaaaaacattaattgccgataaaatttacgtactcttccaaagcattgggtaacccgaattaatagaactacaaaattttctctcaactcaaaaaaatgaaaaaaaaagtttccaaaattgtagtccaagaagaacacgccatgcccgcctatgggcgcggcggcggcagcggcaggaggcggacgggcacgccgtggcgtggccggagcgtgagcacgttcaccggcgcgtgccggtactcgtcggagatggcgaagcggaagctggagaggagcatggcgagcgcgaccttggcctccaccatggcgtacgcctgcccgacgcagttgcgcggcccggcggcgaacggcaggaacgcccccgccggcggccgcggccgtcccggcgcgaacctgtccggcctgaactcgtgcgcgtcgcggccccacgcgccctcgtcgtggtggatggcgagcaccgggatccacaccgacgcgccactcggcacccggagcgcgcccccgccgagctcgatgtcctcgaacgccatccgcggcagcagcgtcgccggcgggtacagccgcagcgtctcgttgatcaccatctggagcacggcgagcttcgggaggctgtccggcgacggcgcgccgccgccgcagacggcggcgacctcggcgcgcgccttgtcctgccacgccgggtgcgtggcgagcagcatgatggcccaggtgaggagcagcgccgacgtctcgtggccggcgaagaagaaggtcttgcactcgtcgatcatcatctgggcgtcgtacccgacctcgccgccgccattgccgccggcctccttcttctccatctcggccagcagcatgccgaggaggccacggccgcacggcgacgccgacggcgtccggccctcgtcggcgatctcccggctccggtcgatggactccttgagcagccgctccagctcgccgttcagccgctttatctctctcctgtacttgctcggaaaatacctggagaaaaaaaaaaccatggtattagaactattaaccacgtaaataaaataaaaatgtataccgtagtaaattatttttcacatttctctcgtgaaatacgtcgtcgatcgttgtgcaaaagtttactcctatatatacggacattcaattaaaaaatatatatgtatatgtgcaaagcgtccgcttttaaatagagctggtgacaaaaaagtgtaaccgtcagctctgcttaacgacgaacattctaagaattaaaaaaatattgggttgctactgctccggttttttttttttacttgttggtaaggatatgggttcagtctttttatcattattttataaaattattaaatatatttaatatgaaagttttttatatcaaatttcactgtttttccatgtactcgtgtttttaagatgctgaggctttttgtccagtgcctcctagcttttgctcgtgaatgggaggagcatttcgtcgaatggttgcggtgcagcctccactccaaggaggagcagaggagagcatcaatggcggtgactcactggctgccggggacccagaggtagcggctggagcgggcggtgaggcgctggagctcctcgatgaggaggaagatcctcttgccggtctcgtagctcgtgtcgaactcggtgcgcgcgatcacgtcgccggcgagcctcgccatgtgcgcgccgatctccacctcgttcccggacctcgccaccgcatccctcagcgcccgcaccgtctgcctcgtgcactccaccatgtgccccaccctcccctgtgccaagaaacggcggtggggttagctctgctctgccgccgccgccggcaatggcaccgccgtggcgagacggtgcgttaccttgagccggtcggccatgaacgccggcgcgacgacgtggcgctggtgcgaccaggtggcgccgttggccatgaggaggccacggccgatgaagtgcttggcgccctgccgctgcagccacgacttgccggtgacgtgcgcgtgccgcgacgacaggagctcccgcaccatgccggcctccgtcacgcacacccgcggctcgctcccgtaccagtacacgaaccgcctccctgcaagcgcgcacccatgtcgccggtgtcagtgtcgatccgatcgtcgatcgccggcggcgaaccgcggacgaacactcaccgtacgtgttggaccagaggacgtagtgggggaggaggcgggcgacgatgtcgtggctgagggaggccatgtcggcggcggtggactcggcgacgagcgccgacacgtcgcggaggttgccgacgagcggccgcggcggcgggccgcgcacgccctggctcgccaggacccgccggatcctcgccggcgtgaggtagtagcatgagacggtgacccagacggccttggccaccagcagcagcgccagcgagaccggcaatgcgatggcgacgaggacggcggcggccattgccatcgacctcggacgaacaggaggaggacagagtagaggagaggtgttcttggccttgttccttgcttgcagctgcaatggcggcttgtgtgcactaggcactgccatacatgtgtgtatatatatagggcttgggagtctttgacattgcccagtgaccatgcaactaacacaatggcgcctaccttgttcagccttttcttatttagctttttcttccttcccctggcataagccggtctggctaattgcgtcgtatcactataactcttttcttttaatatattgacgtgcaattcttttgcgtgttcggaaaaaaccttatccagacttttttttaaaaaaaatttctagtattatttttttactttgattggttgtttggttgtgttggcggcaatgccagagccaaaaaaaaaagtttagaggctagctaaatcaaactacgtttgtacttcctccattcagtaataaattcatttttagctcatcctatttacccaaaataagttcacttttagaataatcgtcacatcggagtttgtaaaagcaagaataattatatttaaagtagataaagtgagaaataattgtattgcgatgtgataaagcagagatattctaatctttttttgtttttatatatcagtatgagatggatgaaaaataaacttattttgagacaaatatagtatttgctaaagaaatatatttttaatccttgcaaaagtattaagattctattgagtgatcgatgacgagcctgggcagctgcctagggtcgccgggcaatgactccgccactagttggcgggctagatagtattgaaacttgtctctattgtctattggcaatactgttatcaaacgtaattgaggagcaagaaattaaactcaaaacctatttctgtatcagcgtacatgctctaattaacaattttcggagtatatgccagtgctctctctctctctctctctctctctaccctcgttgtggttatctctacaaaatgtgaggataaacaaggctggagaaaggtgtttgacttgattttgacctaaaggtgaggccatgttggtgaaaacaagattagtttttggggtgttagtgggggagagagagtgaatgatgtggctttggcataaagttgcaaaaccggtacggttgagaattgagataattaactgcaatagttaagtacaattgtgtggcaatcagtatttccactaagtgaaaaggaggtagcatatcttcatacctgacgagattgtttaaggcaaaggtattttagttgggcttatggtttcattgcatttgcaaagtaaggataggcagagagtaagtggagatcatagctcttggatgcaagagaaggtcagaaatattgccatgaagtagcagcggagccagctcccaggcttgtcgggcaatcttctaggcttcgccgttgatatctccactgctaaatgtcattgacgtccttaaaagatggtaagatggttgatcgtcataaaacactattagttggcttggtactatatacccaaccggaccactttgatctagttgtttttctaaaaaaaaaaagaaaaagggaagtattgtgcaaaaatatgatatacgaattctgtgcctggccctactttcgattggaactgtaagctattttgaattttagtgtttaggctttaagaataatattaggtagattttgtaattgccttcttagaaatcataaaagaatatattcgtgcaacggcaatgatgaagagaatcctaaaattaaattcaaaaaattaaaatcagcttcgaattaaatccgaaactcacccaagcatggtctaaatcttaaggtctttttaagggaatagtgggaccaagatggtccaactatttattacattacattatacataaaaatgaattgtgaggttatatgttcaatcctggaaacatgtaaagattattctcagtgtatgtgctagtcaatcccataaagaaaaccttctttctaagtgtctttattctattctcttcactttcagtctttcacaactgatggttaccagaaccagagcctctgctgaggaacattactgcaaggagcatgttatttcacaaggtacttgtctccacttactgcaacttgcagaaaagatgtattggctcattccttcagaagatagatagtctgaatagcatgcatcacagtgctccatataggtcaaaggctaaaagtgtttgtttagtttgctgaatggcatgttgcaaacttgcaatgcacctgaaactaactgtatatggttcggatttcaaggtccattggaccatgaacacatctttggtttcagctggacttaaatcttaagctaaacagatgaatttgcatcctcatttagtcatcattctcatttctgtggaatgttcagtgaaccttgtcacctcccattggcattcagtgcctcgttttgcaggcttactaatttcttgtggtttcttgagtttgttcgtctcgtagacaggaaattcaggataccatagtttatacttccatgatgagaacatttataacatgtcaggcgtctcagggctcctttcgaaccaaaaaaaatatgggttaattagattaggtccagttggtgatgacgatgacatcgttgggaggctatggcgaagatattggatggtatgtgtgttgagagtttgtgtaacatcctgaaaattcaagacaaaaatcacaaaaatttcgaactttttaaaacttttgcatcatgctggttgttatgattgctattgcttgccaaaccgtaaatgatcaccaagaaagtaaagaaaagaactacatttaagcaatagatatgatttacgggaatatatttaatcctacaaataattatgcacaagatattaaaatcaaataaaagaaaagttattattaacctattttatcaaatattaaaatatttgaataatgtaggtgggtgccataatatgtgtacacatgaaatgatgatcattcaaataaactgagctctctatatatataatagaattatgggagtatttaattcgatatgtagatcgattttgcaccaagttcctaattgcattcagggattgaaatttgatatattaaacccctccatataaaataaactaacatatagataaattgagctaatgtgctattgtgttaataacggtctcattagaaaattatagaatctttaataaaccttaaatattggacaatattaaattttgggcaaattcacatttgaacacttaatacggtcacctaaatgcttgggagtaaatacaaatttaatttgcaacttttctcaatttataaatctaccaaaaccctaaaagaagaaaaataggaaaactttgaaaaatatataataataataagaattaaccctgattaaaaattcaaataaattatataaataaaatatgagtaatattaatctagaataaatccattggttggaatgacacaaatattgggtaacttcatttatacaaaatctaggatttatagaatcaaatttacacaaaaaataggctaaaatagggattaaataggaaaagacactattcatcggccaccaggtgttcgacgtggtcccctaacccagcccctcctctttccccctctctctgtcgcctgccaccgcgccgacgtcgccatcgccgtccctgccccgcgctgccgtcgacgtcactgcctcgcgccgcgcgccgccgctgccacgccgccccgcgcccgcgccccacgccgcgccgcctgcccgtcgcgtcgccgctgccgcgccgcgcgccatcgccgtcactgcctcgcgccgcgcgccaccgctgtcacgctgtcctgcgcccgcgcgtcgcgtccgtcgtgtcgccgtcgtcttgagccccgcgccgccttgtcaccatcgccgcgcgccgagccccgtgccgcgccgcgccgtcccgtcgacactccgccgtcgtcgtcgcgtcgcccgtcgccctcaccgcgcgccgagccccgcgccgccccgagccccgcgccgccgtcgcgtcaccccctcccttctcttccctcttccccttattccctctctcccctataagagccaccgttctcccctctcctcactccatcttcctcctcctctccctcttccccctctccacgcgccgccgcgtcgccgccttcgagccgccgcgccgccgccctcgttctatcgtgccgccgcattcgtgaccgccgcgccgccgcctcagtgtgccgcgccgtgcgccgtcgtcgccgccgccgtcgtcgccaccgccgccgtcggtgagccgctgccccccccccccccttgtttgtcgccgtgccgccgggtagagagggagccaagaaagagagaggaagggagaagccgagggagagaaagaagagggaaggaggagagaaaccggaaagaagagagagagaaaggaaaagaaaagagagagggagaaaggagaagaaaagaaaagagagagaaaggaaaagaaaagaaaagagagagagagaaaggagaggagagattagagtgggccccacgtgtttagtgaatagtaatccccttcttaatctttattagttgagtctattacatgtgggtccgggtggttaaaaatctaattatagaagttttatggtctcgagtttatgacatgtgggccccacttgtcattagctcttcctatttccctttagaaaataattcggtaggaaaaaggaataaacccggggtcctacttgtcaatggatatgtcttggattaaaaataaatcgtttatgaacagtagcttttcgcaatttctcggattaattcaaatttgaatctttacactagcataacttattcattttaactcggatttgagtgaaacttgaacctaaattcatctaaattcataagctttccaatgatatataattcactattcaataaaatatatttataattataaattaattaatatcaaatgattagataatagttaacctaaatagtgtgccaataaataaaaaaatggatattgtatagtagcataattatctttaatatgtcttgtcactgtagcaaccaaataaattagttataatcaatccttcaaattaatgggtgtaaaggaaaatattagtgccatttactagcctatgtccaaatataactaattccatgacttataaattatttacataaagtttagcctcatattttgtaactaaaatataaacacacatagatgagtctttaacttgtttaggagagtaatcacagagctagttgtatttggaccacttaaaaaaattagttgatacaatgtcatgtgaagtagaatatatatatatatatatatatatatatatatatatatatatatatatatagtcggttgatatccattagttaaccaaatagagccatcttaaaatcaacatgtattgtatagcttacagtaaaaagaaactactcaaatatatgatccaataataagatattgttgcttacacatacactatacatcccattatagttgcatatatgaaattaagagggagtgtatgacaaacatgtatattagataaatactagttataaatcttgacctcatataattataattatagttcaactgtaaattaggattattcattataaaattatgtgatgggataatctgtaaccataatatgattaacctaaacaattctaacatacaaagcaagggtaattgttaacctttataatttattttgacaagtaaaatatgtacataattaaaataaagcctccatcaataaaataataatacaaatgattcacagtaattatttgaccgatccaaatccatctggcaacaaaatctctagtgtataaccgttctatttagatagatgcatgaatagccatttgctagactaaaccacatagtagccagatacgtatctcattcatactacattggctagctcctaaatagaccaccatgataacagaaagattaagaaactttagcccttagcatgttggaacccattagcaagcgcgaataatatgagcaaccttaggttcaacctcaacaaatatattttgtttgtgtatatttgattgttgcttgaatattggtttttctcgcgtattatagactttgtgtattggttagtcgtgaggcaatatcagcaacttccaggaggtgaaggttgatcaagaattatatcaagaataaggactatcctgagcaaggcaagtcatcactattccttgaacatgttgatcccaattgcgaaattgttttgtttacaaataaaattgcatgcaatgatgaacatcccacttgtgattatgccatgccttgattattgtttacccttaaatctttgtaaccatgtttacgtatgagtccctagtcaactatgacaattgcttagaaatgctattctagaatcatgcatactcatatttatcaaatgctatatgcttgggcaattacctttgggaaggtaattgagatgcggcatgtggagacatgagcgccacattgccatgatgttgatgacatgatttgtgaaaggagaaataaaattaaacaactgttttcgactggggcggacggaggatttgggtggtatctggaaaaggctagtaccgtccccggtcaattaaggaccgagccatgaagttaagcatgaaacgacccccgtacaaccgcacttctcgtatgggtatagacctagcggattagatagccgagcggaggcagtatccctgcatagatggttcacccctgagtgaggcaggtgcgctacggtgggacagccgttgaggtagggccgagaggcgtgccctacatcggtgtcgccattggtaggactgccatgagtgtgtgagagagagaacttaacttgaaccataatttaatatgtgtgtgagacttctctttcccgggagcgccaaaactcctctcactgctagaaacatggacgcctagagtgcatgaggatttaagttcatggagcgggtactgccaatgcgaggttatcgaaaagctttgccgtgacgcgtctcatgtgttgggacgaggctcatgtgttgggcagtcgcggagtgcgggtaaagtgtacatccactgcagtgtgagtaaaccaaatctattcgaatagccgtgctcgcggttattgagcaccgggacatgtattacacttggctagactctaaattcttaacttgtgggggatgggatattgcatgatgaattttatgctgatggagccacttcccgagaggagggaaggtggacatcctcagaaaaccatgacgattcaatggcgggaagctatccttggaatcacaatggatggtagacagaaccgtcgttgtttaaagtgaacactggtactaaaatttgattagtctatgctaggttttaggcttgtgaaaagaattgtaaaattagctttatgcaaaagaatctgaagccattccttgaaataccctctatcatacgcattgttgttgtggtggcttgctgagtacggttggtactcacccttgctattcatatatcttttaggagagtgttgaagagaagcccttgtcggtacgcttgcgtatccaacaagatgatcggagtgcggtcttgttctaggtctcgttccccggtcgactgcctgtggcatgttaaccgggcccttatattattttgtcttccgctgttgttctctgatagttgttggcctacctggccctaatgtaagtatttaacttttttagcctgaattcattcgtgatatgttgtgattcaactatgtatgtgtgtaccaactactgatctagagattggtacggataaacacagatgatttccgatttccaaaatcgggggtccacagtttgttagccttgcaaggaaacgaaacaaaggtagtcccaagttttggagccacactgttttctgtttggaagatcgtttgtatcatgcgcttcgtgctcttcgtttcctttgcattcatccggtgctcccatcatgctatgagattctcagaaaggttttgaacagatgagaatttacgcgtttgtgaactcgccccgttccttcacactccctccgtcctgaaatataaaagattttggttagataggatatatctcattcaatcagaatcccttatattttggaggagaaattgacaccattagccacaaaactattgcaactttgataaccaataatttttaatgattagattatagtaaataaatgtttagtgcttatgtatagtatgtatacacagataatatgacacttatttttaagtatttagatttttttaaaaaaaatacaatggttaagagtttaaatataaataatgcttggtgacaaattataaagaaacggagggagtaattagcaatctttactgttcttgatatattcaattgagatgccaaggaaaattgttgttatactatcttaatatattctacccctgttcgggaaaaatggtggcaatacaaattcaattgagcacacatcgcgtgacctcaaataaaaccttcaattgagcgcacacgtggactccgagtagcgtttgcaagttgggagaagaaactataatgttcatcaacatttatatgcgttttcatcagcgagaaattttgactgaactttttaaaaaacaaaataagcaagggcactagtttcacggaaacaagtatttgccagccagctgccagcttgagaaggtaaacaaacagagctggctctcatatattccagagacatggatgatcatatgcaatctaactggtacaccaaatggatttgagaatctcttatctgggcacagatagatctgattcgtgcaatccatttagacctcactgacatcttttcaatgacaactagctaatgcaataatgacagtttagacggcccatgagaggaggggcttaacgtctccagcaattttttcatggacatgcttgccgtgccaaaaagcaatacacagatttgcgacaaagttcaggagattctcaccttggtctgcttcaacaaccaacatggcatgtcgatgcgtttcggaaaagctttgtctgaggttttctgaaacagaaaaaggggaattgcaaggcatgtcccacaaatttttgaggcgcaagtcactttattcccatcactagagatttgacagcccaatgttaagactactattacactagaaaaaatatatacgcatacacagaaacctgatagtctataatgctatctcagtgagttcttatatggtatccacggtgcaatctatcttcttttgctaaagttttatatgacaaaagtaacgaaattcaatgtgaaaataaacaggctaaaattcaaggtgaaaacagaagacatagagggtgcgcgtactaccttgatcgccagtcgccagctctctggctcattcaggacagcagcttggagcatctcctcatttgctctttacaggcttactctggttcaactttatccctgcactccaggtaacggctgcaagaatccttgcagggcacaatgagctccgctatctgtttccgcaaacccaaagagaatgcaagaattcattttcagcttgctgtaattcaagttcacgagtttgccatcatggagtactcagatactgatcaggtctagcaatgcaattcctgttgtgttttgcttcagttcaagtgaaaccttcgtctgaggctctgagcacacctgcaatatgaatgaacttagacttgagacaaataatggcaattggcaaaagcaaacaaagtaatttcctgttcagttgtctaagatctgacagttattcttttttatttcaagtctattctgtactaccacctaaaactgtgaattgaaatatatttatggtacattccttgtaagccactagaattttgctcaatgccttatttgccaatttagctcaggtcatatcagtggcaaataagatggtagcgtgaaagcaactctactaaacaagaattggtccacatatattctatgctgttgaaagcataaccctctcagtctcaggtgaaacctccatctgagaaggcctgcaatatgaatgaaattagacttgtgacaaataatgctaattggcaaaaaaaaaaagcaaccaaagtaatttcctgtcaggtgctcgggttgtctaagatctgacaagctcttcttttatgacagactatatagcacatctgaaattgtggaaatatattcacgataaattcctcgtgagccacaaaaattttgctcaatgccttctttgccaatctattctcaggttataatggttatcatgcatgtcttgcccacaataattgctacttctcaaaatgttttttcttaatgtaacaattagtccacagagaatgcaactgcatcctagagataaaagatcttatttgaggacactacagttgtatgaattgtgatgaagataattttgtaggatcaaagtaaatttccaggcttccaaccaaagaaaaagagtgcgttttgaatagtgagcaataaaagcttttccagtttctctatgctccaatatactccatgacaacactagatcaacaggagaaacccaggaaataacagtcaaactcaacatgttctatttcagcctttgttttttacaggaaagggggaattctaatgcataaagtggaaactaacatatcagcttagcatctagggaggcactcgagaattaagacatcctacattgacttctcttctaagtctcaacatatatatgaaaaaattgtgctccctgtattacattgtatcccttatctattacgggctttatggtaacaaccaaaacacatgtccaacagaatatctcgctaacagtctgaaacttgacacccccaaaatgattcaaccatgacaataaagcaatggtaataaaatttataggtggtactgaagtaacatagaatcccttttgcaagaatcagtttatcctgcacgtaacaaataaagatcaccatctagcaacaaggcaaaaagaaaaggcacgatttccaagggaggttaccattctgaagtcggaaacacaagagaaaaaaacaactgtgtcatgtaatttattgaggagtgctgcagcaaatagtgtgtacatcagctgtaaggtgaaacaggctagtgctaaatgtctgagtcagcaatgcactcatcttcacacaagtatctgaaacatcatttgatgtcataaaactaagagaacatgcagttaatgacacctgataagcgatactgcatatggttgcagaaaaaaatgcacatatatacttctgctttaaatactgagttctgacacagtctgagttactacggcaggggtcaactgtttattggactaatggcttcgataaagagatgtcaaaactaaagatgacagtataagaggacagatatagcacagtttttaaatatctttgatccacataacatgatactccaatatattctgtattttctttaaaatcgctcactgaaaatagtggcagtcataccagtagtgtcaagtaatgtgaatccaattaagaggtattccaccacattcatgtcaacatttcttgatgtggtcaacaaccattctgtgctttcatgtttgtttaaatgggaataaaagagcatgggacctgacaccacacaaattgaagctccacacacataactttctgatcacggaaagtgcagtaatacaaacacaaaacgtagttctaattcaaagtttctcttatatctattgaagaggggttatgtccctttaggtatgtcaaagagacatgtccagtggaaagttgacagtaataccaataagcagcaactaccaaatataattgctagaagtaaacccaggagcacaatacctggtacaactaacatgtgcaagggcgctgttccaaactttgtcctgaaaaaaaaatgtgaaagtaaaggttgtgaagaaaggaaaatattaagtagagcgaagaggaaatttcaccgaaaggatgtcatccactgaagtccagagaggttcaaacggccaatccgatacactccactgaactgtgtactgagagtcacgcatttttgtctccaggatgcacaaaccagttaaccacttcgacagaaggcacttggatggtacaaaaatgccaatgaaaggcagaaacataaatagatatccacaagcttcagttcaaaattaattgattgatcatgtttaaatggacctcatacaggcataatgtccattgaaaaaagagtgcaacgaggggggaagtaaatataataaataaaaaaagaacagccataaagctgtaaaacagtgattgtgatctactaccgatataaatatttacaaacgaaaagaagaaaattgtaaagttaatctgcaaatccctcccaagtgcacgatttcagcttttctgtggcttgagcacagatgcagaagcagaacaacaagcaatgctgtcaaggtaatcctgtgtcaaatagcagtgagccttatgattcaattccaggcttccagcatgggtttgctttcccattcaatcatatctgaaaggatttttattatcttctttagttccacgaggcaaatccacacccagctgcctcccgaagcccctgtcaaatctccgagggcttccccttctttggggttctggggatctgggagccgaaatacatggacgaagtttatctcctgtatgatttctgaactgctttgtggcaccattcctgtcatatggcttggcagaatgagtttcatatctatcagcatactccctttgatcatcaccattcccatcatgcctatttcccctccccctttcgaagccataaggaagtcttccctgtgttgggcgatacaactctccagaccttggccgtccatgggagtccacatcaaacctgtcatttcttgaggtaactctcaggggtgggctcctccttgaatatcgctttttatgatcaggaagatcaacagttgagcagttcctcccatcagcccatgtagaagcatgttgagagtaagcacgatctcttgatgaagggctataacgcataactcgatcaccaaatccaggttgtctagaaggcgaagtcattcttcccattctaacttcagtcatgtaattaggcggagatctacttctactatgcctccataaacttgaactaccattcaccataacttcccttctgttcctaggtgatgtccaagcatgcggagatcgagaccttgaaccagaaggggatcggctgtgagcacgtgataggttaagtgaggctctatgttgcgggaacctcctttgtctactggccagtgagcaacgagctgagctcatatttacattagcatgatctttatccatatcaggcccatatctaacagatcgattaccactagtactgaagcgtctttctggggatgcttccctagcatgtgcaggacctctagacaccccacaacctccatctctgtcaattggagaaccacgtccagataaagggcggtatgagctactcaaagtgttgtttctcaccctcctagccattttactagcatttgcagtatcaaccgcctttaccaaggtgccatcaggtgcaacaacaaagccattgctctgcatctttgcaacagcagcttctgcagcattccttggaccaggcagtccgtaattataataatcaggtgatttgcgccaggtagtgcgagaattgtttgaattttccacccactgttccacccggctgctaccttgaatatgtcgtgatgctccacctctttcatgtgatttacgaatatcaatggttctttcagcctttgaacctgagccataaccatcatcagatctggatgaaaaaagaaaaggggtcataagattagtaattggggacatgataatggatcatcagtgtcgaattaccagcaagatgacagctaaaaaagttcaccagtaacttacctgcataactcatttatgtgggctctgtcaaatgatcttggccgatcagctcgtggttgcatatctccacttgataactccatatggcgcaatgattcaccacctccagctgtatctgatgtgctcaaaacacaccggttagatgaatcaactgtgtcccttgaatcatgttgagaatgccgctgatcttcaggtaacatatcccatcctgtgggctttgttctcagacttgaaagatcgtcccctaaaccatcattgaccctttcagactggttgactgttgcggaagatccagctattacatggcctggattcatctcatacattcgagtctccccattaactctcaagtgaacactaagagccttttcaccagtgcttccagcacacatcgttccagatccatcatctatgcaggtagttgaccatgaacacttcaatgcggctggtgaaacatcaccacctccattcctggaatgttttccattgaaattagcaactcgatcacctgtattctttgacatggagccaagagggaagggagaaatgcctggggcatcactcttgcaatctaacacctggtaattggcaggtttaacttcttcataacaatcatctccccaatactcgccagattcccttagttccccatcctcatattgagaatcatcctcttcagcaacaatatttccagtcccagcaagatctttaataatatgaggtgcctccgtttcattacagtgctccataaaattattcgatagaaccttcccgaggtagctttgttctgcagattgtgaatcggcaatgctgtccatgtcagtagttgatggttttatgcattctgaattgatagggggagctacacaggcaccatctatacgacatattaatgcattgctactgtcagtacaggtgagattattactaatagttgcatcagcaccctcttcttcatgggcatgggacataccacgatcagaagaacctgggttgtcattcatatgagaatcggagaggtccaaatcatcatctacatctgcagctttcttggagatgctcaattcattggtgacatgttcaactttgtcgtgacctgactgtccaattttactagttccagaatcaacatccaaaagatcctggttcttcaattcagatatgctttgttgagatgtttgcccaagtttatcattgctccagccaagatcagtagaacttttattgaaaacagttactgttgcaaggtttgtgctttcctcagaaactaacctacttgtgaaaggcttcactctggatcccagttcactcatttgaactgaattgatcccatcacagccatctgtagaaaccatctgggacaaacctacacaatcaagggctgaggcatgtgaaacatcaagtttctcctcaattacggtcaaagcaaaacgttcagtcataggaggcaaagagctgcaatcaggatcagaccctagctgtgattttactttggagatatcattgttatcaggcaactcctttgttcctgcagataaaccatcgcattctagcggtctcgattctaatactggtacattttgcggagacaggctgcacaaaggttgagatgaaccgtcaccagcaaaatcactttcgctctttgtagaagcatcttttggtgcatcaatcacaggagttttgtcctctgaaagatcaggaatgttaccagcaattgttgagtcaaaaggagcttgacacacctgcagcttgttcaacacattttcagcatcactacaactgcttatagcaaaagcaacaggatcaggatcagccgcatcaggaacatcatcaccaccacagtcagtgtcccatgcctccattgcaacattaagatcccagtgcaatcttgagtcacgggtgccattggaatgcttagtttccacaactgcatcctgcaagccgcctacagatttgtctggattacttgcgttgattgacatggtaacacctgaagacttcgtgtcagaagcagttgaagaatcatctgctttgtttgcactgctcaatgcagaaaaagacgcggaacagtccttctgagtgtgtgtagattcaacaagattttcacagttcaatctagtggcaaccacaggcttcgtatcaggaacagattcagacgactccagcagcgggtctgatttgcaatttgaagcatccagactatttagcatgtcctccttgatgttatttaggaaattcaattcagaactaccagtgatattttctggtttcctttcaacacagtgggctgacttcgaacattcgacattcaacgtgtcatcatccaactcgctcgtgcaggcagcagccgcaagtattgatatgccagaaaaatcatctacgccaaaatgctcttttgtttcctccatgtaatcaagtctaggtgttttaaccttatgatgctttccatgtgacgagatacctccacaggatctgctcaacagtttttcatatggatccactagcaatggagtgggtggaggtgatggagaacaatccataagaaatcttctcttttttattggaacatttcccacaggatcactaaagcgccgaccaagaatagataccccaaactgcaaagatgtcattaaatagttcataaaattggcattcaagaattgaattgactcttacttcattgtactctaaaggagaaaaataagaaccttctcagactcagaaacaggagcatcatcttgtgccaattcttgattagtagcattgccacatgcatagaaagatctaatttcatcccttattctgtcttctccagagaaagaggtccttgctctccttgcagctctttgccttctgtttacggtcttccatctcacctcaggatctataggccttggaagctccaagcccatggtgttgagcttgctgctacacgacggcccagctctgtctgttgttgattcaccaccacagcctttgcaggtcattgaaacacctgagttattaagattacgaagtgatgatggccttccagtacaggtgcacaatcgaatctgccaagagaaccaaactagtcaaaagatccatatccagtacagtatcagtaaaaaaaagtttaggcggaacatcaacccatagcaaactgaacacaatgataggctttcaacttggttgggaatacaagcagagcatgaacaacataagcataccatgaaaccaggccttcttcctgttgctcccaaagaaacaagagactgtttcacatcaactgcaccctcaggtccaatagatcccttaaaatcctctggaaaacaaaaacaacataaggttccggttgagcaccacaccaccaaagcgtacgatactgcttgaagaataatagcatcacaatccacatagcatgttcgaaagcaataggaaaaaactaaacgacgcttctgcagccatgccgccaccgcgcgccaattatatcagaaaataacttgaacccctcctgtagcaaaatttttaggaaaaactttgaactcccccgctccaaggctacttgagcacatatgggagtggagcaccagaaataatggaaaaccagaaggcttttacttccaggactgaatcccctatggcatcaacacggaacaacagctcagtcaactgccctcttccatcagcatccgcaccaacgagaacatctccttcctagaaaatcgatccccatgaaaaagaagaaaagcaggcagatctggggagctggacgaattcctggcgagcaccgcacgaccacctccatcccagattccacaacacgcagagagagaaccagattggttgattgaccccgagaagtccaaatccttcagacaaggcagatctgacaaccgaacctgttcctccgtaccccaggcgccaacacggcgaaacacacggcgatctccccagcggcgactggcggcggaggccaagcagagactactaagtcagatttcttaagatctagggttgcgtataccttttgctcctccggccttcctcatcaaaccccaagggcaaaatctctccctcctctcttcccacctgcgcgcgcgccgccgccggggctcagctttttcagtagaaatcgcgccgccccatccgctcttccgcttgcccttctcctcctccccttcctcgacggggattccttgcgtgcgctgctctcctgcgcgaagaaggaattcttcccccccccccccccccccaacacggctgtggctgatgctgctcctgctgctgccttttcccttccccctcgccttttgactcccgccctcgccggggcgggacccgatcggtgggcggcgccgcctccccctgccttccgtccgtccggtcgccgcgagccgcgtcgccgctgccgccgccgccgatttttttttttttttttggttttggaccctttccttgtgctacttcgccgcctgcggaggctgggagggggagaagaccaagaccatatttttccgtgatttttagggtgcgctcgatttacttatatataataatactcctatatatatataagtattttttttctcttctctccatggtggtggtggtgggtgtggagctatatagggacgggaatcaaagcctttggtcgatttacgggattgcccctggtgtgcggtgtgttggggatgagagaggtggaggctggttttgcttttactcctagattgttttagctggggtggatctcggccgtcggatcgcatcgggattgaccataatcagcttcagcggtagtctctcctttccaaattaatcatcatatatgttttttttcgaggaatcattatatatgtttattatgcaccaacaccaagataatttaaataacatcaatcaagatatcatacacatattctcccacaatgaatatatcattctattacatgatgattaatttgggaaagagggagtagttttttaaaagaattaaaacaagggtacctttaatggaattgtaaagttttaggccacttctaaaaataagttgtgaatcggtacttatagtatgagaacatgtatgatgatattagacaatagtgtactctttttgttccataaaaacccggatatgacgcattctagtattacgaatttatagaatggagagagcaacagtgcatgattttctcgatatgggctttgtacttagaccatgataggccaatgaatgaagtttgtggcaaataattgggttggactcaggcttttgaatttatgaacccataaaactttgcctaacctaagagataacatatatgcctcattaataggtcaacatcgaagacccaatgatcttaacataggtggtgtttgaatcttctgaagatgaagataaaaattaagtgtttcatgtaaaacgaggtggtaataatgaattaatatgatattttagagcaactttcatatagaattgtttcgcacaaaacacaccgtttagcagtttgaatagtgtgccatgagtatccaaaatttaatccaacttttgttggagaaaagaagagggcctagtttcttcttaataaatctacttgttgcacggtgctacttgttgtgttctttcccattagttcccaactcatatccatcgttttccgcgtgcacgcttttcaaactgctaaacggtacgcattttacaaaaaggttatggatgtgtttagttccacgccataattggaagtttaaataaattagaacgatatgatggaaaagttggaagtttatgtgtgtaggaaagttcggtgtgacggaaaagttggaagtttgaagaaaaaaattagaatctaaacagggcctatataggaaagttgctttaaaaaatcatattaatttatttttcaagttttttatagctaatacttaattaatcatgtgttaatctatcgcaccgatttgcgtgcataggggaggggttcccaacccctccaaaagcactagcccatggcccactgctctcccaccacatcggccatgccccacgactctcccctgtgtggttctacccatcaactaataacccaacataagcctccgttggctgtagctttgtagcttcttgtacccctactattgggaggatgctacgcgtcggacgtccaatttttcgtaaatatcggacgcccaacccctgactgccgcacgcctacgcatgcatgcacaatctctaccgtttctactctagttgattagcacatgtaaaaagtctatatgcttgcgcatgcatgactgcatggttcagcacttatctcaaccccactttttatttctttaaattaaatttccttctaaattaattatccgatttatgattcgatttcaccattaaactccttgcaattaaatcttcacaacaagatctcgcacggttatattttgatgagaaaaatcgaactttgtttcaccacttataaaaaaaatgtttcaccactaggtcaaaatgttccaactcactctaaaaaatgtttcagagaaatgcaacattcaagtaatactaaatgcaacaccgataatatcggtatgaaacattgactctcaatgagtgagacataaaaatcttgctcaaatgtttcaactcagtctataaaaatatttcagagaaatgtaacattcaagaaatactaactgcaacaccgataatcacaattaaatctttacgacaagatctcacatgattatttttataatttaatcataaggtattaacaattgaaacatcatataatatttgctgaaacatgataccgtgtgcaatatttttaattaattaatgaatacttattgaaacactcaatcaacacatatgcaacatttataaataaactagtgaaacataataaactacttactgaaacatacaaatagcaccatgtgatgcattaaagaaagatatatacattgcgacaataattaaatatgtgcaacataatagaatttcagttgaaacatcttattctcacatgtgaaacattaaatttaattggttgagacatatgtgtgttttttattataatatagtcatgtgagatcttgctgtaaaaatttaattgtaacgaatacaatggtgtaaacatatcgtagattggatgagtaatctggaagaaaaatcattttcaagtttgctaaaagggtgttatgtacatgcaaataatcttgtatcctctctcctccatgcatgccaatgctaagtaagggagcatatgtaacaggtgtgaaaagaaagtatctgacaaaaagaatacgaggctgcatgcagcaaaaccacaatgagacgcgtccgatttttttcaggagattagacaaccgggtggaagcattttccctactattggccacatttgcccatggcttcaccattcaccaactttgcatgtggttgtgtcctaattttttatacttgcaatttgatctctgggatttataaaactaagttatgccaagtttttagtgtagacttcaagcttttggtccattgtgcaagccaggttcacatatagaaaatgcaaccaaaaaaaagcatggctaaagccggtctcaatttggttcaaagatcccattttcttatagaacttgcttggaatttgaacatgtcaacctagcacctaacaataagataggtgaatgtatgatttaaggaggtttgaggatttgagggtgtgaaagtctcatgtattactaacagctatatgttttaaccaagaaactatgacaagtatctatcttgaaaacaagaagagctggatatgttttgatcatctagcttttccttgtatcatagcaaccatgaagagaatgtgtagaagtagaagtgatctatactttttgatttcaaaccatgtcatgtcagtgtattggtaaataacataatttaacaatgagcatggttatttaatcctgtagtagcttgttgccaatttcactagttcaaatttgttgtctcgtaaaatctttgacgatatcaaattagttccacaacttcgttcaaaaatctgttccaaaaccaacgctgactttattggctagccatggatgacaggccaactgtttcgcttatttatatactccctccatttcaaaatatttgacaccgttgactttttagcacatatttgaccgttcgtcttattcaaaaatatttgtgaaatatgtaaaactatatgtgtacatgaaagtatatttaacaatgaatcaaatgatataaaaagaataaataattacttaaattttttgaataagacaaatggtcaaacacgtactaaaaagtcaacggtgtcaaacattttgaaacggagggagtacttatttgaatcgctaattagtaaataaaaatatttataagtaaaacttttatatgcgtattcttagtgactcaagaacaagaacaaatgttataaaataaactatgataaaaaatcaaattataaaatttaaaatttcactatataagcctaatcaccatgagcgaaacaagtttgcggaccaagtggaccgtcgaatgaattttaccgaccaaaatgtacccttaagtacggatgtaactgggtcgatctacgaacccacttgtaaacaaaacttagtgggtaacctattaatttggtatatattacctccttttttaatatatgatgccattgactttttgtcacatgtttgaccatctatcttatttaaaaaaattacataattataatttattttgttgtgagttgtttatcactcaaagtattttaagcatgatttatatcttatacatttgcataaaatttttgaataaaacgaatggtcaaatgtttgtttaaaagtcaactacgtcatctattaaaaaacgaaacgaagggagcaagtggattcacgggttgacccacttatatccttaagtacgacaaaccgggccataacgcgggaaccaacgagttacctacttatttaacctgtaagaacaagttttgtaatagaggtgattgtcacataaaatattatccatatcatcgactaatttatagtgggcatctcatacaccacattacctctaatgtactaaccctaatgcaacataactatttattttatccactctcatgcaatcaacctcattcttttctctttcttccttaaagtttgtgatgagattacccttgcatgatggtggctcatcctgttagtgatatgccctaaaggcaatcatagagatgattgtatcacatactatgtttacatattgatccgactttgttccttgaaatggacaactcattattggttaatgaatatgtgattctttcatgagactctttatgttgtttgttactatttctaaaggatccctgatcaaatatcatatatggaacaaatatgtttaaatgatcaacacatgtattaattgatgatcatgtctcatggatcatggtatatgtcagggttatggatattacatacccaatagtaatcgactaagctcggcagggcccaccacataccatgtcttatacggaaacaaacctcgtatatagagggagttccggataaggaaggacaagaagagttatatatggaaatgataaggactactcggattgtatccatatttatctccctagtcttacttggacaagggggcaactatgagtataaatacaagctcccctaggaggagaggggacacacccaccacaatatacaaagccataagccaatacaagccaatacgccgccgtatattgacatcagagattagcctaggcatacaccatccggcacctataggggccggcaagagggatctagcaccatctctgatctcgccgagtacggattcaaggaggaagactaccttgtcgtcgactatgagttaattatttagtcgtcaagtcgacgacggatagatagattatcccagatattatatttgtgtgatccagatgaataaagagcaacaccggcttcggccaacaggatgtagggctattacctgtaagataaggggcccaaacctgtataaaaatccatgtctccatcttttttatctcaatctcgcatataccctggtaccaatgatccccataccatccaaatatcgtagtcgtgatatcaaacgtcgacagtatagagataccaaattaataatgtggacacatgttggggaacatgttattggatagacccaacatgagacacttcaaaagctatatgtgttgtgtcatcagtgatctcatttagtgctggtgttgaatccttagacctaagattatcatgattcccaacatgtgtagtagcttacctagggactgctaaatgctactccgtaattgggtagttataaaagtagttttcgggtatgttgtgaaacatgtagtgggatatgaataatcaagatgggatgtggtgggccccttgatgttgtagattatggaagtgcatggccatgccaaaggtgattgaggagtcaatcacaagttatataatctatacaggttcgagtgaacgattgagctattagaggatggcacatatctaaccttgagcttaatcgatatcgtgaggcaaaggggttcatacaagtatacactagaggttcagccgatatgatctttatgtatgctcggtgggtcaatacgttctgctaggggccgttgttgacacgtggaccgaaaatgagttttcgggttacagccgagtgtacatgaacctccaggatcgtacgcttaatgggccggaataaggggattggatggagatccaatatgagcttaattcggatagggatccgaataggagtcctatgggccttggaggctcgagtcatagatcctatatattcgtgagaggtgtgattggcggaggtattgcatcacgagcaaaaccctagccgtcactcccctccccgagcaaaaccctagtcacgcacgggtgctagcacatctacgcgtggcgttccgtccctgtacgtgtggataccggtagaggcgccactactttgcggtgctgatcggcgtgggaatacggcgaggggaacgcacgaggaggagaaggtcgagccggtgcgatcgactacttcctctacatcgacgtgcgctacttcgcgggagtttcttcgacttcttagcgcattcttccgctgcgcagcgcgtcgagtggtaacgatctatgatctaatacttgcatggttcctggtttacatgatagaaaattttgatttatgctatcgtagcctacgcgtattccatcacatcccctatcctctattctttcctccaccttatcatttaagcttaagggcccctttgaatcgtaggaatgaaaaaaatgaaggaataggaaaaacacaggatcctaacatgaatgaaagtataaaatagaggattgcaaaacacaggaaaaacatagaaattaccgtttgctcggaccgtaggaaaaaacacaagaatcatatgagggagatatgccccgtttggcacagctctagctcccaactcaacttacctggagccggagttgtgccaaacggtccagatcctctgtttttttggagtggagctagtagaggtactcctaaaaactgaactacgggggtggagctgggtttttctgctccacagctccactccacccccacaaaccactaccctttaattttgtagtctatttacacaaaaataccactcaactacccttcagtcatcctctcatcctgttctctctcctccccatctcctcccgatcccaaccgagctgcgggggcggcggcaggggcagcggcgtcggtggcgtgaggcggcgaaagcggcgggcggtgacgacgggcaggcggcgcgcggccgacgaagcacctagggacggcgaacgttcggtgggctggcggcgcgcggccggcagccgacgacgcgcctgggccgatggctattttttttcttttttttccagatctggagctgaaacgtatccaaacacttttcaacgagtcttcaactccaataggagctagctctcactggagttggagtttggagcccttcaaaaaggaaattttctaagagctttgagctctggctaagttttctccaagatctctataggattccattccataggaatttcaaaggattttatatgatccaatcatttgattcaaagacattcataagaatttttcatatatagtattgtaattcaaaattctctaaaaaaattgtttttcctcgaaatcaagatcctaccaagatgcttgtgcttagatactctctccgtcctagaatataaacatttttagagttggacacggttattaagaaaataggtagaagcgaatggtagagggttgtgattgattaagtagtggaggtaggtgagaaaagtgaatgatagagagttgtgattggttgaaaagagaatgttagtgaataaattgttatattttaggataaatcttatgtgataaaaagttgttatattttgggacgaatggagtatttatcgaccaacttgcattcttgcccaaagccctctctccctgtgtttccttcacatccactctcccatccaaattcccaagcccatctctctctctctctctctctctctctctctctccactccagtcgaggcacggccggctccccccgcgtcgccggcgagcagggcacgggcgtgtcgcgctcgcggacggcctcccctcccctcccctcgtcctagccttctcctccgtgcggcgcacggccggcgaggccacccagggttggtgacccaaggggggcgagagcgcggagacgcggcccccccatccatctccgtctcccccgtccggatcgaatccgaggtatccgctcttctttctctcttgtagcgctcgctcgtcgtcctccgcgcatgccatccccatgagtgagccggcgtgcgcgtgggttggagatccatcagtaattagaatatctagattggtttgtatcatccccaattaacctgtccacgcagcgaaccgtcttccggagaattggtgagcggagtggtgctgctgatatcaaatcatatagttgcgtgtaatttttgtatgtgttgctgcaggattgatgtagaggtgtggaatcaccgtaccatgttggcacatagtatttgtcgatatggccgtatggggtttatttagcgtgaaaccgattggcattacttggatcatgtcaacatagtgtttttttgttcagatatagccttttactgatcggtctgtgattgtgtgcctacctttgaagttacttccttcatttttttttctgctttcatatgctgatgcagcttctcactaaagcaacttctgcaaatattttctgttggatgtaaatgcacacttttttcgtcgaaataaatcttccataaaagaggagcacggtattaggtgtacccctgacactcactacaacttaagtgtgcttctgagattcttccttttctcgcaatttcataatatacataccaactactattgtgctacaaagatctattgtaactctagcattacacggtgggacttgctacctttttctttaacataaacggtatacatcgttggacaattccactaataagggattttctcttcaccttgcataatgtttttggttgtattgacaagcactgttttaatcctaaaactctctctctctctctctctctctctctctctctctggggtcttatatgtcctgctgttttgttgcctgctatagcattaggcatcaagttccttccagttactatgtgctggtccttttgttaggtttgtaaaatcatagttagttaactagccagatggacatattgcacattatctctctttttccccactttctgatatattacagctggtatatgctcatccatgccacacgttattgtataagtaaaacacactgtggtgaacaaaaatgccattctataacgcgcagctgtgaacattttttattggtgattttttttttggaaaatttatacagaaccagagcaagcagaaatatgccatgtttttccttctttattctactgaagaacaggacaaaattgtgtatatatgttctggtcacacaaaattatattgaaatcctttgaacacattggttgcttttcatttgtcaagtctaaggatgatcaagctggtcttttgtttcacaaagtcacttgtatgcttcttccatgagaagtcctttttattagttttatcagttatcacatcacgataaactcataggcagtgaagtcatgtttgtgtggttttgactggccccagatgacacaccctttttgtcatcttggatcgcacgtttgttattgtggacttgtggtattgtctgtgcgtgctacccattattccctttggctctttattttctaaaccaccccaagtttgtgctagcaggctagcattgacttacatatcttttctagcattattattaatataaccatggtgaacaaggtttctgaaaagtttaaatgcaaacatgatgataaaatgccttgttaataaattcagtctaatctaatggctaaagaaattaccttcactgaagatattaagcatgtgaatgtgtgtacatgttctgcagagtgaacacatgaacctatggaaaccaatgacattgccaacaaacaaactttatgaagttccctattgtagtactacctccgtcccaaaatataagcatttttagctatgaatctggacaactgtgtgtccagattcatagccaaaagttgctatatgttgggacggaggtagtatatattatgagaaagtgactatggtacatatgatgtaaaatactacctctgttttttaatatatgacgccgttgacattttgagatacgttttttgtaattatcatttattttttatgacttaatttattattaaaggttatttaagcatgacttatatttttatatgttggcacaaaagttttgaataagacgaatgatcaaacatatgtttaaaagtgaacggcatcatacattaaaaagcggagggtgtatgtgctacatgacctttttcctccatacggtaattatttcttagaagtggaagtggttaggagtggaaaatatcaagtgagagaactttcttttagctgaaaaatgtgtgtaagagccttgtttgcttttctgtgagattttccttaattcacactacgttcctttttttttttgtcaccgtgtatgaatttcaaaagaggggtcctattcatgttctaatgtgtgacattcttgagtaggtctataaatggcaggaagacaccgcatacctcgtgaatactatgatgaacgtcgaggatttcgtgatggccccccacctccacttgctcgagcaaggcccatctctccacgtcgcttggaggaggagctgtctagccgccgtgctgagatgcgcagaatccatgatgacaatcagcgcctagctgatgaaattgttggtctcaggcaggcaatgcctcgtctgaaggaagatctccatgccgcaagtcaagctatacccaagcttcgtgcagaaaaagaacttgagtcaagggagctgactcagaggaatctgaagttggaagctgaactacgttccttagaacccctcaggcaagatgccttacagctacggtccgaggccgggaaactacagtcaataaggcaagagatgactgcaaaggtgcaggggttgttaaaagagcttgagcatcagaattctgagaaccagaaaatacctgtcatgatagctgaacgtgatgctcttcggcaggaactagtccgaatgaggtactgaactattctgcatcatatttcgtgtaaaatgattgcttcttattgcttttcttgatggatcaagtgttagttctaagttgctgcttgaaggagcgcatttaggatcctttcctacagtttcaattctaaagaaaaaaagtggggtacttgagtatcatcttcctcttttcaccaggtggaagatcaaactgattaatatcactgtaggggaacccttgagtacgagaagaaggcaaggcctgatctgacagcacaggtgcaggcaatggagaaggatcttgtttctatggctcaggaatctgagaagctgagggctgagattaagaagagaaatgcacccagtaggtttcttttcttttgctagcttgaaagttatggaaatcaatggcgctgacccacaacaacatactatgtttgattttaggtttcagcggccatggagcttatggaccaccaatggcgactccagggatgggcctgcaaggcgtctatgatgatggctatccttccataggcagccgctatggcactggatcttgggcaccacatgatccccatggttatccacaactgtgactgggcttctgatcgttcttccctgggcagtgctttatcttcgtaatatcgcttgatggttgatactgatcgtgacaaagcttttctcttagtagaacttgtggtgcacagtagatggtcttttgggggtgcacttcaagtgttgttagtttagcatatgtagcaatataccagctatggttgccttggtacctctccaaaaaatgtaatcaatgatgactgtaagagggaattcagtgcaacgaagaagaaaaataggaactt

SEQ ID NO: 10080 - DNA, 6596 bp, Oryza sativa
cagtcggccacgcgcgggcagcctcaaagccgacgcgcggcgacacgacgcacgacaaagtcggctgctagagagcgtgcgcaaaggggaggagaaggccaactaaaccacggtttttgagtgggatgtggtcccctaggagcaaatctaaactttgtgcaagattggaagggatcgggctgctctagttgggctaggcattctaccgaacaccttttgtgcaatgaacagtgaatttcataatttttgaatattttgctagaaaagatttgaattcaaactaggagtttgggagggtttcactagggtttagagtatagcaaaactccactaataatagagtaagctaaagaaataatctatggtttgaatttgagagaatttgctcaaattcactagggtttagaataaagggaataattagggtaaattagtaggactctaatacttgaacaagttttaaatcaaatagatttttaaaccaaacaaatttaatcaaaagctagcatgatgcagtcaaatttttagttttaaaatttgaggatgttacagctatccatttgatttagcgagtcaaagtcgttgctcgcttcaacagcctctctatctaccctctccattacaattctatgacaaatgggacccatatgttatatctattaaccttcttcctccatttcctccctattttccccgctcatactactgcctcctcccccacaccctctcctttgatgcggcgacggcgggcgtgcgaggcgacgggctgcagcgagcggcggggcgatggactacaacaagcggcgaggcgggcggaggtggggcgacgggtggaggtgaggcggcagggcgatgggcggcatctcaatgggcggcgtgacgacggctacgacgagcggaggccggcaggctgcagcgagcggcggggtaggcggtggccgactgttgacaggaaacacgaggcctgggagatctgcttaactccagtgcacgttcaaaactcgccttcggatgtatgagcgtgccagttgatttgatcctgcaatcaacaagaaacaaagacaaagaaaccgtgatcaaatccataaatgatagccgatcagctaaataccgatgacacatcatttatctttgagccgatgtcatatgtaaatcgatcggcaagtgttaagtaaacaaatcaaaactaaatctattcgatcggctgtagatatcaataatatataatccttatatcgatatatacttgagtcaagtgattgggatagatcggtcaccttgccgagacagtataaatcacttagatcgaaatacatattaataatgagattatatatatattcatagcatagccgatcaagtagatctagcatgtatcggctaatactccgataccgcttcgtgttaagatattaaagcaaatagaatataccaaacataagcctaatatacttaaatgcaataagatcttaatataaagggcagatctaacatgtcaatcgatcatataggataaaagcagttagatcagataagatcggctgtaactccgatactaccctaatcggcaactagtaggcaggctagagattgaaattctaagcacgacttaatagatcaaactcaactgatacagcattaagtatgaaaagaagaacaatatctagacaatcaagccgctggatgtttcataaagtggtggatatctcatataatctaagccaacgtcgttatttaacctaatcggctgccttctagtaacagatgttagccgattgtaggttagatgacgatattgtcaagaattatgcaagatatatgataacttgacagattacataaacaagattagagtatcataaggatggaagcactaatcttgagaacacaaaccgccataacaagttttacctcttgttgaagatcgaaaccgatgcagctcaacccgaaagcaagaactcgtcgaaataaagcaaaaagggtggcgatgcgccgaaattgtattgaacatgtgtgtccttttttttacatagggctcggggtctatttatacccgagaattataagatatgtccatattggacacgactcttatccctaacaaactctaagataccataagtctttgcggcagacttttgcccacatttatctctaaggaatttacataaatatcctaattaatagatacaactgcctttccaggactctatccatgcatggcaatcatcttgaagcacatcaattcaaacccgatgtcgtacacaagtcatattatcggaatcggctgtatcacttaactcaacccgactcaaacctagccgatcccaatcgtagccgatccggactccagccgattcttactctgtttccgcaacaacccttatcttcgattccacttcgaccccatcttcatctccgatgctgatattaccaaatttggtcgttaacaccaacggctacagcgggctacggcgagcggcggggcgggcgccgtcttcacctcctgtagcaatgctcctccccatgtctcatcgcctagttgccatgctcgagctcgccgcctctcgtagcagtgtgccggcgtcgagattgggtgggaaagagacagatgcaagagagagagggggtggaggagattggtagtgtggggcccaccattggccagccaaatagactggccaaatttagctagcaaggaggaggatttggccagctaaatagcttgaccagtgagttggagaggctgttggaatatggtttttttagaataggtaaaatttaacttgaagagtcaattggagaggcagatggatatgctcttaatatactactactaaataggagcgagatgtagcggccatattgttttgctgccattgaccgtcaagttgaatgggtttacttttccctgcgacggttaattctcttctagtaacaaagaacaagttgatcgggttttcttttcgttgggatggtcagtggcagcaaaacaatttggcatatcttgggttggtgtacctggcctgatccatttggtctttggcttcaataaactaataggagcatttggcctagtgcttgcatacgacgcgtacatgccaacataaatcttctgaaatatttcaattaactagtcctaggtgcatgatggtggtccctggtcggtggtcaagctttagcttcatattgttgttttgatattgaaaaggaaagggactgtctactcctcatttgacagaaaactcctcctagtatcttgcaaatttcagaccattggattgatttaagatttgtgcgaagtccacaaaaccctaaccagtttttcttttttctctctgccgccgcacaacggcacaagtcactcgagcctcgagagctcccctcctctcagcaccgtacacctcctgcaccgccgccgtcgtcccacctggcctcgccggctggtcaaaaggtgttaacggcgctgacaagccccccaggctaaccccctccctctccctttccccctccctctcctctccagtggcggcgagctgtcccgtgccgccgtcttccccgttgccggtggtggggcgccaccaccggccgcctccacctaacactctttccgcttgcccccgccacttacaccggccccccgcccgctcccgaccccgcggtttcagcggcggcgagctgtgccgccgtcctccccgttgccggcggcggggcgccaccaccggccgcctcctcctaccactctttccgcttgcccccaccacttacaccggcccaccgcccgctcccgaccccacggtttcggcggcggcgccgccgcccaccgccggtctgccgcctcccacggccatccctctaaagcctgtgaactcccccctcttcctcccacccccaccccgggaccctaattcgtcgaccctctgccggattttgggttgtcgccggcgccgtaaaagaagaggtcgccggagttggagaagatgcaactggagcacgaatcgcgaagcatatccagtggtccaaaatatgcaagatttggggtcgtattttctatcgacagaagtatagccgattccgtttttacaagagtggagcacttattatggtcagcttgagtagcgagacataagcgagagagaaacagacatggattttctacacctaggtataatcacacctattatttgcatgtcgtctaaacatttataggaaaaaaaaaatatctggttagattgagtgtcgtgtaataatcgtacccacttgctgcttgatttgccccagaaccttcatatccttgatccttcccattaaagtgcagtgaagtacactgatagtgggcgtaagggcctatagcctaatggttataagagtctcaatagtaatttaggccctagattcgacttctcatggaaacgaatttttcagaaattaacgactttgtgctttcagtagtaggcgacgtacccatcgatagcgaaccactccaggatggatgtgtaattctcaaaaagtagactgatagtggaacggaaggaatttgtgggtgcgacgccgaaggccggagtccctccctccctcctatggccggcctgaccatgctggcgttccatgcatgatgacatggccctccccaacatctcccgccttctcattgaggatgacatccaaaatccacaccctgtaaccattcgacgatgaaccgcctagtgaagtcaggcattgtcaaacaccaccagagacatgggcaattctctaaaaatctatcgattgtgaaacttaaaatcttgaaataaacttaaaaagtgtacaagttggatgaatttcacgagacaagagctttagagatcgattatatattgtgtaaattaaagcaagagttgaggagctgcgtcttgatgctgtcgtcttcctggaacctgcctgcctgcctttcatgatccatccatccatccatgtctcatgtgattggtgtctccctcgtcccctccacgcaacacacagacacccatcatcgcctccactctcttcccctccatccaaagtacctggagagagtggaggcatcgggaggccatggctgccgcgccgaagccggaggaactcgtcgtcgccatcgagcagccattctccccgtcgctcttcctggacctgcccccgacgccgcaccacgatgacgaccccaacaatgtcaatgacgacctcctcctccccttcatctcacgcatcctcatggaggacgacatcgacgacaagttcttctaccagttccccgaccaccccgccctcctccaagcccagcagtcttacgcccaaatcctccatgcccctgccacatcttcttcctccgacgacaccaccatcaacaacaatacgaccaactccacctccgtccccgacacgctcgccatgcccgaccacgacgccgacacccagagcgcgccggacgacatggagatgctctacatggcgttcctcaagggcagggaggaggccaccaagttcctgcccacaaacaacaccctcttctctggcttcaaggcagagccggtgctggatattcaacccaccttcacgttcggaccaagcggcggcggcaggggccggaagaacaggcacgccgaggaggacgacctggagacggagaccagcaggagcagcaagctgatggcgccagaacatgacgacgccgccgccgccgacgagatattcgacgaaataattctcaatgggtaccagatgatcattaaggggatagatgagctgcgcgtcgccatgggcagccagagccaggccgacaagaacggccgaagagcgtcacgcgcgaagacggcggtggtcgacctacacaccctgctcatccactgcgcgcaggctgtggcgacgggagactggcggagcgccaccgagctgctgaagcagatcaagcagaactcgtcggcgagaggggacgcgacgcagaggatggcgtgctgcttcgctgaggggctagaggcgcgtctcgccggaacggggagccagatgtaccagtcgctcgtcgcgaagcgcacgtcgacggtggacttcctcaaggcgtacaagctgttcacggcggcctgctgcatcaagaaagtgagcgtcatcttctcgaacaagaccatctacaacgccgtcgccgggaggcgcaagctgcacatcgtcgactacggcctcagctacggattccagtggccagctttgttctttttgctgggagccagggaaggcggaccgccggaggtgaggatgaccggcatcgacgtcccgcagcctgggttccggccagccgaccagatcgaggagacaggccgccggctgagcatctgcgcgcgccagttcggcgtgccattcaagttccgcgccattgccgcaaagtgggagacggtccgccgcgaggacctccatctcgacccagaagaagaagaagaggaggtgctcgtcgtgaactgcctccatggattgaacaccctgcaagacgagagcgtggtcgtggacagcccgagccccagagacgtggtgctcgacaacatccgcgacatgaggcctcacgtgttcgtccagtgcgtcgtcaacggcgcgta

SEQ ID NO: 10081 - DNA, 2340 bp, Oryza sativa
aagatcaagcagcacgctttggcaacaggcgacgccatgcagcgagtggctcactacttcgccaaggggctttaggcacggctagctggcagcgggaagcatctgtatcagaatcatgtgcgcatgtcgttggtggagtacctcaaggtgtacaagctctacatggcagcctgctgcttcaagaaggtggcgctcatgtttgctgccatgacaatcatgcaagctgtgcaagggaagaagaggctgcacatagttgattatggcatacgctgtgggctgcactggccagacctgttccgccggctggggagcagggaagacgggccgccagaggtgaggatcaccatcgttgacatcccccagccggcgtttcgtccatttcagcgtattgaggaggctgggcattgcctgagcagctgtgccaatgagtttcgtgtgccattcagattccaagctgttgcagcagcaaagtgggagacagttggtgccgaggacctgcacatcgagcctgatgaggtgcttgtggtgaatgacctctggagtttcagtgctctgatggacgagagcgtcttctgcgacgggccaaaccccagggatgttgccctccgtaacatcagcaagatgcagccagacgtgttcatccaaggcatcaccaatgatagctatggtgcctccttcctgtcacgcttccgtgcagtgctcttgtattactcggctctgtttgacatactggacgcgaccaccccaagggatagtgggctgcggctggcgctggagcagaacgttctggggccttacgccctcaacgccatcgcctgtgagggtgcagacctggtggagcgccctgagaagtacaaacagtggcaggccaggaaccaccgtgcaggcatgcagcagctgaaactgagaccagatatcgttgatacaatcagggacgaggtgaacaagtaccatcacaaggactttctgctgggagaggacgggcagtggctgctgcagggatggatgggacgaatcctctttgctcactccgcatgggtgcgccaatcacaagacacttcctccggatgactgtttggtttctttcttttcttctttttctgcataaaaaatgcaagttagtagacttatctttggacatgaaaagtgcatcactcttcttgtgtgcacagaatgctacagtgatttgcattttaacagccaggcaagtttctttaattataaacgtgttagtattgtcaacatgtagagcatggacacctagagtaatacttacgcgtacttctagtactttgattgctccagttgcaacatggcctgtttatttttccttgtaagagccatcagctgtataatatgccaaaaaggaggagaaggtgggtgatgtatccaagccaagcatggaaaacatcaaaccctgtactcagcaaaattaaaacaccaccatgctatcaatcaccaggaaaattgttgggtatgaatgggttgaaggaattgatgcctccatccttttccgtcttcttcggccttaccaagagcaccacaagaaaatgcaaattagaaaaatgaataatactggaatagtgttgctgcatattatggttctattctgcacttgcctggattttgcctctacaaactgcagtctacagacattatgtgttgagtcctttcaacttgaagaattgactgagtacagtaacatagttcagggtgaagttgttaagttgccttgcacctgccctttttacaaagatttgacatctgcacatatttatctgtcaaacagcttggattgaatttgcaaattgcctttgcattatgagaatatacaatacccaggtcacaggctacatcattcactatgttacatggtcctcagctacatcattcaatcagataagactggtgtagttttggctgcttccttgtatcaatgcaatagagtcctctgttctccatcaaattatatttaatgatcattgcttctttagataggacaagggaagaagtggctccaaaaccaagatttgcagattgttaaggatcaaagaaacattgaggaatggaagggccaagccatcagtaccacaaggtaccagtgctcctagcctatcagattaaaattctatactattattgtgctaatacaacaggattccagggtatacaattcctcagcggtactgataaaccagcacaattgttagtaaagacatggtttccaagttcatagtagaaagtcaattaccagttatcacaacaatcctcctggtagaaattctgaacatctgatcaccttctcaacatggcatgagtcgatactattgtaaacaaatt

SEQ ID NO: 10082 - DNA, 1939 bp, Oryza sativa
gcagggaagacgggccgccagaggtgaggatcaccatcgttgacatcccccagcctgggtttcgtccatttcagcgtattgaggcggcagggcattgcctgagcagctgtgccaatgagttccgcgtgccattcagattccaagctgttgtagcagcaaagtgggagacggttggtgccgaggacctgcacatcgagcctgatgaggtgcttgtggtgaatgacctctggagtttcagtgctctgatggacgagagtatcttctgcgatgggccaaaccccagggatgttgccctccgtaacatcagcaagatgcagccagacgtgttcatccaaggcatcatcaatggtggctatggtgcctccttcctgtcacgctttcgtggagcgctcttgtattactcggctctgtttgacatgctggacgccaccaccccaagggagagtgggctgcggctggcgctggagcagaacgttctggggccttatgccctcaacgccatcgcctgtgagggtgcagacctggtggagcgccctgagaagtacagacagtggcaggccaggaaccaccgtgcaggcatgcagcagctgaaactgagaccagatatcgttgatacaatcagggaagaggtgaacaagtaccaccataaggactttctgctgggagaggacgggcagtggctgctgcagggatggatggggcgagtcctctttgctcactccgcatgggtgccacaacaacaagacaattcctccggatgactgtttggttttttttttcttttcttctttttctgcataaaaaatgcaagttagtagacttatctttggacatgaaaagtgcatcgtgtgcacagaatgttacagcgatttgcattttagcagcctggcaagtttctttaattatgaacgtgctagtattgtcaacatgtagagcaaggacacctagagtaatacttaccagtactagaagtactttgattgctccagttgcaacatgacctgtttattttccttgtaacagccatcagccgtataatatgccaacaaggaggagaaggtgggtaatgaatccaagccaagcatggaaaacatcaaaccctgttctcagcaaaactaaaacaccaccatgctatcaatcaccaggaaaattgttgggtatgaatgggttgaaggaattgatgcctccatccttttccgtcctcttcggccttaccaagagcatcacaagaaaatgcaaattagaaaaatgaataatactggaatagtgttgctgcatattatggttctattctgcacttgcctggattttgcctctacaaactgcagtctacagacattatgtgttgagtcctttcaacttgaagaattgactgagtacagtaacatagttcagggtgaagttgttaagttgccttgcacctgccctttttacaaagatttgacatctgcacatatttatctgtcaaacagcatggattgaatttgcaaattgcctttgcattatgagcatatacaatacccaggtcacaggctgcatcattcactatgttacatggtcctcagctacatcattcaatcagataagactggtgtagttttggctgctgccttgtatcaatgcaatagagtcctctgttctcccatcaaattatatctaatgatcattgcttcttttgataggacgagggaagaagtggctccaaaaccaagatttgcagattgttaaggatcaaagaaacattgaggaatggaagagccaaggcatcagtaccacaaggcatcactgctcctagcctatcagatgaaaattctatactattcttgtgctaatacaacaggattcctgggaatacaattcctcagcggtactgataaaccagcacaattgttactaaggacgtggtttccaagttcatagtagaaagtcaattaccagt

SEQ ID NO: 10083 - DNA, 11078 bp, Oryza sativa
gcctcccccggggtagatgggccgagagaaattcggcccatcgaccctgggggaggcaaaatagacttttgcggaggaatttgatttggaaggatttggattcggaaatgaactcgacgatagatcggggattgagatcttgagatggcacggacacaagacgacaagcgaagaaacaaatttcgcaattagggtttttaagagataattttcccgctaggcgccacgacggaacgggcgctacagtacagctattcgaatagtttcaaagatattctactgcagtagatgtacgctttacccgcagtccacgacttgctgataattatcggctttagtcatggcccagtattaagtcattgacaattatggcacctgttccatgaacttatatcctcatatgctctgaacgtaatgttaacagcagcaagaggagttctggcgttcccgaggtatttaaggggaactgatcatatgacaccacgtcatctcgatcagggtttagaaatataccatataatttatactcgagtatcataaaccatttacctgtacgtggtaatggttaaagttgcccttcgcggctatagttgcctcctgcgcgaggacttaaaaataagaaccactatacagaggcgccatattgccaattaacctaataactaggtctgtccccattctagaaactgcggtcgtactcgttcgttcgacataagtacctggtaaaacttatgtcgattgagacaatactagccacccggaaatcatccaaatcttacgtattgtcccaatctaagtatagggtgttttaaccagattgtaagcaaaataagcaatactaaattatctgggtttctatgattaatttatgcatagaaaatagaatattgaatagaatgctataaataaataatttataaaatataggcttaaatgatcaacaggtatatggtaacttgccttgctcgatgtcctgagattgattgatattatctaaagtgtcagaggaatccttaagacctagggttagacatataaaattcaaattcaaaaggaattcaaataaaatccaaaaatatgaaaaatagagaaaataaaataaaatgcaaaaatagcaaaaaggggcttaaaagatagagaatgattttagaagaatattggtccaagtttcactgggattggatctatattttaaaagatatgggcttctaaagtttgaaaatcaaataaatgtgaaatggcactgtgtgcgggtcccacctgtcagtctctctttctcttctcttcttctaccttcggccgttccccaaatcgggtcggcggtgctagggtttaggattgcggcggcgttagagggagaaagtggttgcggccgaggaggggagggagctagggatctccggcgacggcgagcggcggtggaggagttaatttgatgcgtggacggtctagcggctagggcggcgaaggcatggttaggccgagatggcgatcaaggtgataagagttagacatggctaggtgttgacagaaaacacgaggcctgggagatctgcttaactccagtgcaggtccaaagctcgccttcggatgtatgagcatgccagttgatttgatcttgcaattaacaagaaatagaacaaagaaaccacaattaatcctataaatgatagccgatcggctaggtgccgatgacatatcatttatttcaagccgatgtcgtgtgtacatcgatcggcaaatatcaataagcaaaccagaactaaatctactcgatcggctgtagatactaatgatatataatccttatatcgatatatacttaaataaaatgattgggatagatcggtcgccttgccgagacagtataaatcacttagatcgaaatatatattaatagtaggattatatacattcataacatagccgatcaggtagatctagcatgtatcggctaatactccgatactactctatactaagattttaaagcaagtagaatatactaaacataagcttaatatacttagatgcgacaagatcttaacataaagggtagatttaacatgtcaatcaaacatatagaataaaagtagttaaatcagataagatcggctgaaactccgatactaccctaatcagcaaccagaaagcaggctagagattgcaattctaagcgcgacttaatagatcaaactcaactgatgcagcattaagtatgaaaagaaaaacaatatctagacaatcaagccgctggaagtttcatagagtggtagatatatcacataatctaagttaacatcattgtctaacctaatcggctgccttccattaacagatgttagccgattataggttagatgaagatattatcaaagattatgtgagatatatgataactcgacgaattatatagacaagattagagtgtcataaagatggaagcactaatcttgagaacataagtcgtcatgacaaattttacctcttgttgaagatcgaaaccgatgcagctcaacccgagaacacgaactcgtcgaaataaaagtaaagcataaagggtggcgatgcgccgagattgtattggatgtgttcctttttttacatagggctcgggtctatttatacccgagaattacaagatacgcccataacggacactactattatctctaataaactctaagataccataagtctttacggcagacttttgcccaaacatatttctaaagaaattatatagaatatcctaattaatagatacaattgccttcccaggactctatccatgcgtggcaaatcatcttgaagcacatcaacttgaacccgatggcgtacaccgagtcatattatcggaatcggcaatatcggctaatcagctgtatcggctagcctcgtccgactcgaactctgtcgacctgaccttagccgatttggactacagccgattcttactttgtttccgcaacgatcttcatcttggattccacttcgatctgatcttcatctccgatgccaataatgatagaatttacgaaatttggtcgttaacactaggggaggggttctagagcatctacgaggtgtctagagggattccggcagcttgccaacctttggcaaggcgcggagcatagttgccgacgagcgcctccataggcagcggccgtgcacatgtcggcagctcagagggtggcaagatagtgcaaaccgattgcaaaaatggactctaggtagtatgtagatggttgaaacgaaaaaactcaccgagatcagttgaaacaacggattgtggccggaaaaacttcgcggcggggaagaacagagcaacgcgggggcggcggtttctgcttggtgcggcgaggtaaaactcgacgcagggctttggttagggcttattatgctagaacatggtaggatataggtgttctaagggttatttagggcggaagatggatggagaggggtggagtcgatcgcgcacaatgtgatcgaccgacgggcgagggtggttgatgagatggattggtgaagcagagcttcggggttgtggggctatggttgttgatgatcgatgatggacagggaagggattggggtcctatttatagggctaggaggagcggatgagctcgggcaccgtcatcgccatggatgagctcgggatttggatgaggtaaaggtggcagaggttgagagagggcgggtaagatcgatttgagtggcaggaggccacgttcgaatacttaccggcgaaggattttgacttgaccacggttggaatcggctggcgacgtgttggcgccaatccgggcatgacgcgcggcggcggcgagggtgaaaatggccggctcgggggtgaatggtttgaattgtgagaggggataccaccgtctatctccaatccaaccgtgcggcaagaattggcgcgattcaccccgggtagaagcgaaatcgcactcggcggcggcttggacgggagcgcacggcatcgagcggcgatttcgtgcggcggtcgtcgtcctggctttgtcgccgtcaagattggcgcggcggcggtgggctgagagcatcggacgggtgacggcgcgccaaggcagtcggccacgcgcgggcagcctcaaagccgacgcgcggcgacacgacgcacgacaaagtcggctgctagagagcgtgcgcaaaggggaggagaaggccaactaaaccacggtttttgagtgggatgtggtcccctaggagcaaatctaaactttgtgcaagattggaagggatcgggctgctctagttgggctaggcattctaccgaacaccttttgtgcaatgaacagtgaatttcataatttttgaatattttgctagaaaagatttgaattcaaactaggagtttgggagggtttcactagggtttagagtatagcaaaactccactaataatagagtaagctaaagaaataatctatggtttgaatttgagagaatttgctcaaattcactagggtttagaataaagggaataattagggtaaattagtaggactctaatacttgaacaagttttaaatcaaatagatttttaacccaaacaaatttaatcaaaagctagcatgatgcagtcaaatttttagttttaaaatttgaggatgttacagctatccatttgatttagcgagtcaaagtcgttgctcgcttcaacagcctctctatctaccctctccattacaattctatgacaaatgggacccatatgttatatctattaaccttcttcctccatttcctccctattttccccgctcatactactgcctcctcccccacaccctctcctttgatgcggcgacggcgggcgtgcgaggcgacgggctgcagcgagcggcggggcgatggactacaacaagcggcgaggcgggcggaggtggggcgacgggtggaggtgaggcggcagggcgatgggcggcatctcaatgggcggcgtgacgacggctacgacgagcggaggccggcaggctgcagcgagcggcggggtaggcggtggccgactgttgacaggaaacacgaggcctgggagatctgcttaactccagtgcaggttcaaaactcgccttcggatgtatgagcgtgccagttgatttgatcctgcaatcaacaagaaacaaagacaaagaaaccgtgatcaaatccataaatgatagccgatcagctaaataccgatgacacatcatttatctttgagccgatgtcatatgtaaatcgatcggcaagtgttaagtaaacaaatcaaaactaaatctattcgatcggctgtagatatcaataatatataatccttatatcgatatatacttgagtcaagtgattgggatagatcggtcaccttgccgagacagtataaatcacttagatcgaaatacatattaataatgagattatatatatattcatagcatagccgatcaagtagatctagcatgtatcggctaatactccgataccgcttcgtgttaagatattaaagcaaatagaatataccaaacataagcctaatatacttaaatgcaataagatcttaatataaagggcagatctaacatgtcaatcgatcatataggataaaagcagttagatcagataagatcggctgtaactccgatactaccctaatcggcaactagtaggcaggctagagattgaaattctaagcacgacttaatagatcaaactcaactgatacagcattaagtatgaaaagaagaacaatatctagacaatcaagccgctggatgtttcataaagtggtggatatctcatataatctaagccaacgtcgttatttaacctaatcggctgccttctagtaacagatgttagccgattgtaggttagatgacgatattgtcaagaattatgcaagatatatgataacttgacagattacataaacaagattagagtatcataaggatggaagcactaatcttgagaacacaaaccgccataacaagttttacctcttgttgaagatcgaaaccgatgcagctcaacccgaaagcaagaactcgtcgaaataaagcaaaaagggtggcgatgcgccgaaattgtattgaacatgtgtgtccttttttttacatagggctcggggtctatttatacccgagaattataagatatgtccatattggacacgactcttatccctaacaaactctaagataccataagtctttgcggcagacttttgcccacatttatctctaaggaatttacataaatatcctaattaatagatacaactgcctttccaggactctatccatgcatggcaatcatcttgaagcacatcaattcaaacccgatgtcgtacacaagtcatattatcggaatcggctgtatcacttaactcaacccgactcaaacctagccgatcccaatcgtagccgatccggactccagccgattcttactctgtttccgcaacaacccttatcttcgattccacttcgaccccatcttcatctccgatgctgatattaccaaatttggtcgttaacaccaacggctacagcgggctacggcgagcggcggggcgggcgccgtcttcacctcctgtagcaatgctcctccccatgtctcatcgcctagttgccatgctcgagctcgccgcctctcgtagcagtgtgccggcgtcgagattgggtgggaaagagacagatgcaagagagagagggggtggaggagattggtagtgtggggcccaccattggccagccaaatagactggccaaatttagctagcaaggaggaggatttggccagctaaatagcttgaccagtgagttggagaggctgttggaatatggtttttttagaataggtaaaatttaacttgaagagtcaattggagaggcagatggatatgctcttaatatactactactaaataggagcgagatgtagcggccatattgttttgctgccattgaccgtcaagttgaatgggtttacttttccctgcgacggttaattctcttctagtaacaaagaacaagttgatcgggttttcttttcgttgggatggtcagtggcagcaaaacaatttggcatatcttgggttggtgtacctggcctgatccatttggtctttggcttcaataaactaataggagcatttggcctagtgcttgcatacgacgcgtacatgccaacataaatcttctgaaatatttcaattaactagtcctaggtgcatgatggtggtccctggtcggtggtcaagctttagcttcatattgttgttttgatattgaaaaggaaagggactgtctactcctcatttgacagaaaactcctcctagtatcttgcaaatttcagaccattggattgatttaagatttgtgcgaagtccacaaaaccctaaccagtttttcttttttctctctgccgccgcacaacggcacaagtcactcgagcctcgagagctcccctcctctcagcaccgtacacctcctgcaccgccgccgtcgtcccacctggcctcgccggctggtcaaaaggtgttaacggcgctgacaagccccccaggctaaccccctccctctccctttccccctccctctcctctccagtggcggcgagctgtcccgtgccgccgtcttccccgttgccggtggtggggcgccaccaccggccgcctccacctaacactctttccgcttgcccccgccacttacaccggcccaccgcccgctcccgtccccgcagtttcagcggcggcgagctgtcccgtgccgccgtcttccccgttgccggcagcggggcgccaccaccggccgcctccacctaacactctttccgcttgcccccgccacttacaccggccccccgcccgctcccgaccccgcggtttcagcggcggcgagctgtgccgccgtcctccccgttgccggcggcggggcgccaccaccggccgcctcctcctaccactctttccgcttgcccccaccacttacaccggcccaccgcccgctcccgaccccacggtttcggcggcggcgccgccgcccaccgccggtctgccgcctcccacggccatcctctaaagcctgtgaactcccccctcttcctcccacccccaccccgggaccctaattcgtcgaccctctgccggattttgggttgtcgccggcgccgtaaaagaagaggtcgccggagttggagaagatgcaactggagcacgaatcgcgaagcatatccagtggtccaaaatatgcaagatttggggtcgtattttctatcgacagaagtatagccgattccgtttttacaagagtggagcacttattatggtcagcttgagtagcgagacataagcgagagagaaacagacatggattttctacacctaggtataatcacacctattatttgcatgtcgtctaaacatttataggaaaaaaaaaatatctggttagattgagtgtcgtgtaataatcgtacccacttgctgcttgatttgccccagaaccttcatatccttgatccttcccattaaagtgcagtgaagtacactgatagtgggcgtaagggcctatagcctaatggttataagagtctcaatagtaatttaggccctagattcgacttctcatggaaacgaatttttcagaaattaacgactttgtgctttcagtagtaggcgacgtacccatcgatagcgaaccactccaggatggatgtgtaattctcaaaaagtagactgatagtggaacggaaggaatttgtgggtgcgacgccgaaggccggagtccctccctccctcctatggccggcctgaccatgctggcgttccatgcatgatgacatggccctccccaacatctcccgccttctcattgaggatgacatccaaaatccacaccctgtaaccattcgacgatgaaccgcctagtgaagtcaggcattgtcaaacaccaccagagacatgggcaattctctaaaaatctatcgattgtgaaacttaaaatcttgaaataaacttaaaaagtgtacaagttggatgaatttcacgagacaagagctttagagatcgattatatattgtgtaaattaaagcaagagttgaggagctgcgtcttgatgctgtcgtcttcctggaacctgcctgcctgcctttcatgatccatccatccatccatgtctcatgtgattggtgtctccctcgtcccctccacgcaacacacagacacccatcatcgcctccactctcttcccctccatccaaagtacctggagagagtggaggcatcgggaggccatggctgccgcgccgaagccggaggaactcgtcgtcgccatcgagcagccattctccccgtcgctcttcctggacctgcccccgacgccgcaccacgatgacgaccccaacaatgtcaatgacgacctcctcctccccttcatctcacgcatcctcatggaggacgacatcgacgacaagttcttctaccagttccccgaccaccccgccctcctccaagcccagcagtcttacgcccaaatcctccatgcccctgccacatcttcttcctccgacgacaccaccatcaacaacaatacgaccaactccacctccgtccccgacacgctcgccatgcccgaccacgacgccgacacccagagcgcgccggacgacatggagatgctctacatggcgttcctcaagggcagggaggaggccaccaagttcctgcccacaaacaacaccctcttctctggcttcaaggcagagccggtgctggatattcaacccaccttcacgttcggaccaagcggcggcggcaggggccggaagaacaggcacgccgaggaggacgacctggagacggagaccagcaggagcagcaagctgatggcgccagaacatgacgacgccgccgccgccgacgagatattcgacgaaataattctcaatgggtaccagatgatcattaaggggatagatgagctgcgcgtcgccatgggcagccagagccaggccgacaagaacggccgaagagcgtcacgcgcgaagacggcggtggtcgacctacacaccctgctcatccactgcgcgcaggctgtggcgacgggagactggcggagcgccaccgagctgctgaagcagatcaagcagaactcgtcggcgagaggggacgcgacgcagaggatggcgtgctgcttcgctgaggggctagaggcgcgtctcgccggaacggggagccagatgtaccagtcgctcgtcgcgaagcgcacgtcgacggtggacttcctcaaggcgtacaagctgttcacggcggcctgctgcatcaagaaagtgagcgtcatcttctcgaacaagaccatctacaacgccgtcgccgggaggcgcaagctgcacatcgtcgactacggcctcagctacggattccagtggccagctttgttctttttgctgggagccagggaaggcggaccgccggaggtgaggatgaccggcatcgacgtcccgcagcctgggttccggccagccgaccagatcgaggagacaggccgccggctgagcatctgcgcgcgccagttcggcgtgccattcaagttccgcgccattgccgcaaagtgggagacggtccgccgcgaggacctccatctcgacccagaagaagaagaagaggaggtgctcgtcgtgaactgcctccatggattgaacaccctgcaagacgagagcgtggtcgtggacagcccgagccccagagacgtggtgctcgacaacatccgcgacatgaggcctcacgtgttcgtccagtgcgtcgtcaacggcgcgtacggtgcgcccttcttcgtgacgcgcttcagggaggctctcttcttctactcggcgcacttcgacatgtggacgccaccatcccgcgcgacaacgacgatcggctgctcatcgagcgggacatgttggggcgatgcgccctcaacgtcatcgcctgcgagggcgcagacagagttgatcggccggagacgtacaagcagtggcaggtgcgcaaccatcgcgccgggctgaggcagctgccat

SEQ ID NO: 10084 - DNA, 4908 bp, Oryza sativa
cctgcagccctattattattattattattattattattattattattattattattattattattattattattattattattattattattattattattatatagtatattatagttgctgctacgctatactatctctttctcatatcaactaatcgctttattatcagctttgcttgctaggaatataaataaaaatctgcccctcacattcaacagtctgtattagtccccacgctctctccgtattactctaatctcctctgccactgcacgctgccgcctccaccatctcgcccaaccatagaaaaaaaaaacataccaagccggcccccaacttgaatgtccattcctgtaatgtaacaaacccgtttgtgcacacaaaaggcctttgccatccaaagtctcagggatacctccataagcacccacataatcatattacaacacaacacaacagttacaatcctctaatgtttacatcactcaaatggggatgcacaccaagggattgcttccttatcaacaacaaaaaaaacctgctaaaacacttccacctcatctcatcaggtgtccagatagtttgcagccatcatcagctccagagttatctccggttcaatttgaaactcagatgtctccttcccactatcaaccaaccaaacaaaacaacaaccgagtcacttcagttgacgttaaacatgagcgccttaaatttgaatgaagtaaaatattaaaacaacatttgttaccctgagtaaaatatacaagacacatctagactatcgatagagaaatatgacagaatcagagtaataaacgactggttaggttctctgttctaccctacaaaaaaaaaatgtaagactcattttggtagcataccaaacactcagatcgaaacctacaagacacctccatctccaccaaaatttggcaatgccaaaacataaatctaaaatctggactggagagtataagctagaaaacactcaagatcgcattctacttgatatgcatatgtgctatttgagttatttcagaagcatatatgagttaaggaaactgccccaagttttaatagttttggatcacaaaggcctccacaaaatacatgaaccacaaagtcgatcacaaaaccagttgacaaattgggtagtgcagggattgagagatacaccaaagctaaatccctaccatgaaaccataaaactacctaaagaagacaacaaccttttggtgcaccattatttgaaaggtgtataatgccttccacaattttaaaatgtttgataaccttatacactgtacacaggctaaaaataatgtactgtatgtaagttatttattgtattctgaagtaacatttgcatgtttcataaattccaaacaaccaaacatgagagtgcaatatgcttatatatcttatagtagttgaaggttcctggtccaaaatatcacaggcaactatctctaccaaggcttagttctagattttgaaatgagatgtatcattataaattttgaagggactaaagtattgatgcagctgctgatgctaaaggtttatgcttcccttttcaaagcaggatatcttaatgcatagtccgatgggtcttagaggaaggcaggattcgagcagttgaaaaacaagataactggatggattttttttgaaggtgctcccaagttattttacaacatttatcctacataatccaatggctaatatgactattagccgcataggaggttgtcatcacttagcactgaggggcaataaaaacttttgacagcatacctacaaggaagtaattagatgctaaattagcatcccattatagaattccgggggatcatacttttcaaaaggatataatttgatcatttacttttattcccttatatcaagtataaacattagttaagggaaagaatagcatgaaatttatcaacatttgaacctatagatgttgaaaaaaaattagtatcataaattaaatgtagtggaacatagattaggtgaaattcaaacaatatcaaatatattgaatcaataaacttatacttgaaactggagaaataaaagtggatgaaatgcagacttaatctttcaacatcctcgaaattcagtccaataaatctcgtgtatacagtaaatcaaattcaataggtgaatgtgtataattgttcgctgcatgaatggtaaccaatccgatcatttattgtgttgacttgtctgcctctaaccatggatattaatgagtatcaagcataaacaaggttttgttggcatagtactgcccatagacattggaagggtaggattaatccaaactagatccaactgcataagagttaggactagtatgggattaggggtggtgtgaggactgaatgaggatgtcatgtggaaaaggtggaaagatttacctggagtagtggagcgaccagtagaagtactggcagatcttctcgaggatgggggtgctgatctcggggaacctaacctcgccctcgcgcgtctcggagaagccgcctgtgttggatttggatttggtggataattcaaggcaatctagggtttgagaaagcaaagcgaatcggatcgatagatggggaaggagacgaaccgggggaggtgagcatgttgcggagcgtgttggagaccatggcggccttcttgtcgacgacgaactcgaagccctcggcgctgatgagcttgacgaagccggacggtgcgtcgtcgtcgtcgtcgccgtcgtccttgtgcaggtggggtggggtttggtgccccggcgcctctcccttccgcagcatcctagcttgcccccttcttcctccgattcttcttcttcttcttcttcttgtcccaggcgagacgcagccacgcaggaggaggaggaggagatcggagaagaagaagatgacggccaggcctggtcaggccttgtgtgttgggcctcatccaggcatatgggcccgtctccatgtataggcccaacggcccaagcgtagcggaggctcggcaccaaaactaaggggggaaatagtaaatttgacaaaagaaatacttttatcaaattattattggaaaattatagattcaagatttaacactaagtttattaagaaatgaggtttaaaacttaagtatcacaaaattatagatttaataataaagttatcactgattacatattatggggttataattatttaggctttgtgattaaattggtattaaacatgtaattttgtgataaatttatggctaatatatttgtagttttacaataatctgtattaaattttattaaaatatagcgaaatttactctaataaaagatgcgagcacccatcatttggttctagttaggcatacccatttggtactacttacttgttgctactagttaggcatttgatattaatagtagttaggtatcgcatcgtattcctaattgatattcctattgtacatcaagactagagcatcgtatcccttacgaaatgaaaatcaggctaacatgttatatatacactagtagagggaaggtatatgagtcgaatccgagtcatttgcattaccactagtctagtgatgtgcatccgagtcatggaacaaagcaaaaaaagatgtccaaactagcagaagataattaacctgctcatttttgtatgtgcagaaaaatcaaaacaccgaccaaaagcaaaaaaaccaataaataagggtgtagggagttgttgagttgggtccgcgaatcgtggtttcccactagcaagcgcaagcgcaggcgcaaacgcaaacgccgccgccggtatgccggagcacgggtcgaagcccgacatctccttcgccggccgcttcaccgcaagcgccatcgctgcatgcttcgctgaggtatccaatcaatccccttcgatttctccgatttctcctctcctcctcctagagagagcattattataggtagatcgagaaggaaccagctgacggatcgatgatttggttccgatccgcaggtgtgcacgatccccctggatacggccaaggtgaggcttcagctgcagaagaacgtggccgccgatgccgcccccaagtaccgcggcctcctcggcaccgccgccaccatcgcgcgcgaggaaggcgccgccgctctctggaagggcatcgtcccgggactccaccgccagtgcatctacggcggcctccgcatcggcctctacgagcccgtccgtaccgtactcccccctccttcccctcatttccttttcatcctgtcgctattattcaaccccacgctttcgcaatcgcaacgcaggtgaaatccttctacgttggcaaagaccatgtcggggatgtgcctctcaccaagaagatcgctgccggcttcaccactggtactctaccaactctgctttgcttcccattcccaactagtactcactccgttatatgctgcttcttctcatctcaggtgccattgcgatcagtatcgccaaccccactgaccttgtcaaggttaggcttcaggcggagggcaagctggcgcccggcgccccgcgccgatatgctggggccatggatgcctatgccaagattgttaggcaggttgaccttctgcttctttcttcgcatgcgcttgcctgttccataccaacacatcattgcttgcttcacatctttattatattatcctcaggaagggtttgctgctttgtggactggcattggacccaatgttgcgcgcaatgccatcatcaatgctgccgagttggccagctatgatcaagtcaagcaggttccgtccttgtttctcgcagtgactgtaccatcaatttcacagttcgcacgcgtcacaggaaagatgacactgttatcctcgccttgcagactattttg

SEQ ID NO: 10085 - DNA, 12300 bp, Oryza sativa
agtaaccacatggtatacaccaactaagatggagtaagaatcctcgacgtatcgttattttgagctgtgggtagttaacatgaaaaagaagggcctaaaaagataaatcggtgtgggatccaaatacaacagtacttaagttatataacaagattacaccagacaaacgtagaagcagtgaaggagaagaacttactcatcaaaaccattgtcagcatcctggcattcattatattcaggagtataggatctgcgcatatcatcatgtccttttgtctgtcctgatgattttgtttggtgctccttcctctgcggggaagcatactggtcatcttgccttcctggggcaggagagcatgacctacagtgtgaataagatcgttaaggacaaaggtactgcacggaatatcatgaagatacactggcataccgtgttctagcatggtcatggagatgaagagaatgggaacgtgagtatgagcgagaatgagattgccctgaaggaaacatagcaacttgtcaatattcaaagatgaggaaacccatacactggattagtggccgctcacctggaggggatggcctgggtgacctgcacagagcccagggtcgctcactatcaggtgcaggcggcgtcctgtcagcacaatatacaatgttataatcacggattgtattcatgaaatgttgttgttattatttacgcacgtacaacaagtgaacattcgaaacgtgaccagcatgccagtagttctaaactaaacacgcgcacatgctaccatctgttacaagtaacaagtcaacaaccagcatgcacgcagcacactatttcaagaaaaaaaaggaatcatatgcaactacttacctcaactctggggagatcaacaattgaagacatttttttctcaccaaaaaaaaagaatatactaacaccagtgatttttacactggtccaagagataataaactgtacaaaaggctacagtattgatatatcactgacagtatagtacattctcgcttggaatgagcctgcacctaatatgacatgtagtcctatcggcagtgaaggaattatttatgtacaaaccatgttgatatattttgacagatgataaaatgggctactgcaatagaacagggctaaatttaggttgcatgaatgcacagacagtttaagatagggtcctggaattcataagtacaccattggttaaaaatatattaagttcgcatatgtcctggatttccatctgaaacaatctgccattgtgtgtgaggaatcagctactgtgcacacaagacttatgttatagacatgttatatagtactccctctgtcccaaaatatagaactacctttggactttttttggagggactaaggttgcggtaaaatttaaataaaggatggttgtgattgtttgagatgaggaagtaggtggagaaaataaatgaagattgttgtgattggttgggatgaggaagtaggtggagaaattaaatgagagatggctgtgattggttgagatgagagaataggtcgagaggtagctatattttgggacaaaattgaatgctaaaggtagctatattttggaacggaaggagtaactaagatgtacaaactctcgatgtcttgtgattttgagctgtgactgagtgactgactggtggactggtgaataggatttgtgacttatggagtgatgaataagtatttaacccaaacaaaacaatatatataaaaatattgcatgtgacgtgtagcaggcagcgcacaagcagaacttactcatcacgaccaatgtcagcatactgccgatccttatatttgggagtataggatctgcgcttccgcttctcatcatgtcctttaggctgtcctggagagtttgttcggcactcttcctttctctgtggggaattatgcctgtagagcagccacgagggtcatctcaaatgaaaggattttcaaaacctttgggggtgtggtgttctgttgtacccttggagggcaggtgtcggagtcttcctctaataccgtacaccttttcttctctatcttaatgaaatgatacgcagatctcctgcgtgttctaaaaaaaacagtactgggtacagtatacctggctccaattattcttcgcatttcctcgggccttttccgtgtctgcacagcaaaagcaacactgatctcacgtccagaaagcatcttacggttcatgtgatatcgcgctttagaagcatcagaagagtgagcaaactccacaaatgcaaatcctcttggctccctacatatatggtgttataaaatgttggataagtaatactatatatatttacgttcaacagagaagagggtgcatattcatggtatgtgctcaactagttaccaccaaagttccatgattcagtgaacgttccatgattcctcatgaagcatagccaataactaacattttcatcaaaacatgtagcatgcttcaaaaaaaagcagctaggagaccaagttcttctagtagcatcttcataaaatggtcacttgaaattcctcaaatgtttcagaaaatcatgaaagtacttgaaatcaacttctcttcaataaatcttctcatggaagacaccagtaaaatccaatcctcttcgggaaataaatttgtgaacaaaccaaacctcctctccaaagaacaactttatttgcacaatactctacctcaccaagacaccaaacaagtgaacagttaggactgtgaaagagatcttcaacaagtctagtgcttgtagttacttcaacacaacacaacccgggtaatcatgccagaacaataattttgccagaagaagccacataactagtacgtacaatattaacaccaatgtatgctgtacagagtacagtagtacagactacagggtgctatattttttacaaaaaaagtagagtgaaaggaaagtggggtctttgtgggggtttgtccagacatgacagaagttagacatctcaaaagaagattacagttgtagattcttcgctattaaaggcacaccagcgagagaagatttaaagcttctcagagtctttgagccgtggctggctcaacatgtgttaacatctaaccatatactccatagtatcaaatgagaaggataaaccaatttcttacccagtgttgtagtcttttggcagataaacatcccgaacaggaccaaacttttgaaatggaacttggacatcctcaggtctggaagagaacccaagtgaacaaccaggagcaagtgaaatgatgcagaaattggtattgtattgtattgtatacctgcagcttcgcggaaggttgctgacgaagaggcttacagcagcaccttccttatccttggcacagccatgtcgtgagcttggagggcttcttcccctgctgccatgccttctcctcttgctggggctgcggctcctcatcgctcttctgtgcctgcacaatacagtacatagccactgaccacgattatcatttatcaaaggcacagatggcgaaatctttcgtccagattgagattgtgagatacgcagatgaatcagcgcaagatttctttactgaaaactgaaaagggattggcggcgctgggcaatgagaaattagggctcggagtttaggggaaacacgaaccgtatcttggtattctacttgctaggcagcgccgccgccgccgccgccgccggcggtgccggaggaggagcggagacaggtagggcaggcgagacacgcgacgtgggaagaggaggagacgacagatggtggcctgcctgttatgggccttatcaatcgaggcccaccaagcctacttgaaacaaatggactttgcttcacaaactagcaaattattaaagctacttcatctatcccaaattataaggcatatatttttttacacgcccttaatagcatgctttgatcagtattttattatattcaatgatcctaacaaatatgaaattagcatcacatgaaagtacttcaaaatatgaatctagtgatataacatgcataatacttaatatagatatagttaatataattattagttaaaaacttccgagtttaattttacttaaaaaggagcgccctataatttgggacgaagggagtacttctcatctatactcctctctgtgtttatgtcgctagcgtgtggttcttggatatgcagtttggtacctcgacagtttctatattttttatataaaaaaaatctctttcttataatatatttgatggtctccttcggtcttcccggcgaataaagcaacttctcctacagtctacagagaaggaacatcacttatactccaggacaattcagaacccacaaagaagaagattatataaatggcactctgcatagattcaatcggtgtagtattcttttcttcatatgtacagcaaattcttttctattctctgtctgtcaaacatgatgtattcatgtacacgaagaatgaaaaatgtatatactactagtagtagtatttttacaagcagatcaactcagggagggaaccaagattctgctaactgcaaagttggttgcagagttggttgatcttatcttgcgtggcatccgctataaggtagctccggtgtacgtttgtgccttcacatgtcaagtttaatgtattcgcttgttgcattacctgcaaaggggaacaatttggtcataccatgaactgtcaagagatatgtccttcatagccattttcagaatctagccaaagcaatttcgatgcaattaaatgcttcagatttcaacaattcagattccaacaatttagttgagcttcgattagataccaaaaactgtagtattatgcaggagcaatagtctattactcagcaagaacaacacatttcttgtctacattatacttcaaatttctttagcttgtttctattcattctttgctgatggcactatcacttaaaaaggtaaacaaataatgatatttgaactgtcttaccgtgcaatatgttggtgatgagttgcatttccatcttttcgtaggaacacagctgagatagtgacaccaagagcagtggtcgtttgcattatatcctcggagaagcagtactatagccactgtaaatctgtcaagttcaaaattgggagatttcatcaagggaggaaacatgggtaaaatacattgccactattcattagagcccaaagaggaaggtcagtggactaacccgacaattagcataatggcagcagctaaccacagtatatattggtatgtcttgtgcttgcgtttcacaggagcaggttgttgtccaggtgctactcttctctgattaatccatgcaaactgtggacgaataaacataacaaatccaagaaggaacccggatataaggcccccaatgtgcgcaaagttatctaccctgggaagtatcccaagagccaaattcaccacaattacaaacactagtgttagtagtgctgccacctgacaaatgagaaaaaaatcacacaatataattcaataggaatttagaatggaaagaaaagctaatgaattggtgatgtagcagtagttgtttctacaatcaaaaaacagaccttgtttgcatagagcgaccaattcgttatgagttcagaaagcatggacccaatcaatccaaacaaagcaccagaggcaccaacagagatacttgatcggatgaagagggcagacatcaagctcccaccaagaccagagatgagataaaccagaccaatcctcactgcataacatagagaaaatcagacttcagaaagttgtctacgctgtgaaactacatattccgtattcattttaccactacaccattacttcaatgaacattgattcatattcacagaagttattgcacataattaacatgtattgtacctacattcctattacagttcaaggcatcgactcctcttgtattctaccaatgcaagcaagacagtaaaaggtatgatattatactcccaatccttacttgaacaggaagtcgtcttactcattaaatgtctgaggatttatatacaatgtattagtgtgcatccatcaaatagaattacatttataacaaattgtacaaaagaagctaattagccattatccaagcaaggtcatggctgaatagttggcttgtctgggacgtaaagttcagatgaaatatgcaaagttaacttaccaaacccaaactcttgttcaagtcgaatgccgataaatagaaggcatagcatattgatgagcaaatgaacaactccagcatgaagccagatgcatgtaattagacgccatccttggtgaccatggacaaccttagttacatctagagctcccatcttcagtaacctggtagtaagatgaaagcatttttatcatcttgaattcaatatgcatagtaaaatagtactattgtcttagctccttttgcccccatctccctttttttccctcaagttttgtgttggaaaaataacactgactcagttcattgtacctctaagcaaacatctgcttcttaccaacaaaaataaaagtaccggctcgtcctacaatccttaatctttttttttgcggggactacaatccttaatctaaacaagacaaaactctaagtttgaagtggtaaccctttccagcttaataataataaaaatggagccacggatcatgttcaccgaacaaggtacttccaattccaatagttgactttgcaaatccaaaatattatcgtaaaatatccaccgtgcagtaagatgagcaatcagagatttgaaaagaagaagttttcaatctttcttcggggttcaacaactctccaactgccaccatgagtacaaagaatagactgaatcaatacagtagtaatcaaagaaaaaccaaaccaagtctaattaatggtttcgtttagacaatcctacatttgaattgggaaaccagttggcagcttgcatattttttatgttcttttaataaagcaaatttttatttttgagctgtcagtttcatattgtgatatcacccaaagtcaagttgcaaggagcttaactctctagttaaagaaataaaaacgtatgttacaaatctcacctagagtagttgctaacctttatggatgaagtaattacagaaatgtaatgaatgttttgtaaacaaaagacagtaggttgttcatggtgcaaataaaaaaaggaattgaaagaacagttgcagactcttcattgcattgcacagtagacacgaagtacgttgagaccaaccctattgaagtggagtacataaacagaaggctttcttaaatgcaatgcattgcattggtaactgacgagagaatggatgagcagagttgagaaatggctcattttttatccattgttcgttgtctatagccaattgaagcattggttgacccttacaaacaaattatttagataatgagatgcataacagaatactactaccatgtttggagtcaggttcctaattgcaaccagccaaccaaccaaatgaagtggatgtattgaaattagcaggcagatatgaaaagcagaagaaaaataaaatcttggttggagtagataagagtttgctctgcatctgtaattggtgattgtatctactctagaaagtaaagaatggatggtgtacgtagctaggtacattaacattaagcagctatacgtcgtttattgaacaagaaagatcattatctaaaaattaagcaagaaagaaagaaaggggggcggagggattgaaggcgatcgacgtacgtggcggaggaagggccgaggaggggattctccttgagcggctggaaggcgaagcggccgaggaagccggcggcgcagtccccggagttgcggcgggggcaatcgttgacatacatggagacgaggaagacgacgacgcaggagagggcgatggcggcgacgatccagggcgtccatcggcggtagtaggggcgcgccctgagacttcccggccggtgagggtgcaccggcggtggcctaggcctctccacgcggacgtccaggttggcggcgggagacggcttcatgggacttggagacagacagacggaatatggaaatggaatgaggattggagttgagaatggaagagacggcggttgatgaatgaattggagtttgcttgccagcgagagaggagaagaagaaagaatcagcagccaccgcgtttaatttctactactccagtactacaagttgtagtatattgtagtagtattggtttggtaagcaaggagaagaaacaagtaggtgtattactccatgtcagaggaaattcgcagaagaagaaaagaaaacctctgacggaaaggccggcgcgagggttcagattactcctttttacttgtgtgcggtgcacccaatcagaatcagccaacaacaacttgcttaccgcctactacgtgttgaggaaggaaggaaggaacgcgcaaaattaaccaaatgaagaaacgcgtttcgtttcttgttggtgttgttggccaacctcgatctcttctatacgcctccatcgcgccttgtataattctactaccgccaattaaattcgaagccacctaccgtgatgagaacgagagagcgactttattttttaacggaattgctagaaaacttgctactgtcaaattttcagcccttagatccgcttcaagattcgtgcgtgcaacaagataaaaaacagcatataatgtgtcgtggacaggaatcgatccttggccttgctcatacatatggcagcattcaaaccactaagccagcacaacttcatgtttcttaatctacttatatagcatttacactctagttacatagtgtcacgccccgaactagtaccgaccggaactagcccgtgacgctccaaattaacctgttaatcgataccagtatcaggaaacagtgctggtatcacaggaagacagaatatcacagcaacagaggtctctttattatagagtaggagtacagtcatgttgggctgcggacagatcccgagctcacaactgcattacaaaagggaagcggaagccaagacttgggccaaacaacacaggcgcgacttgggaactaggccgaaaccctaaatctcatcgtagccggcttgctcctggaaaaactcctcatcagcaggatccgcttcatcttcttcagcaactggggggggattatttatatagagcaagggtgagtacgggagtactcagcaagccatgggaaataagtgtttaatgcaggcttcaaggaaaggctgttgtttttgcaattgattttatttgaactcttttctgaaaacaactaagtgagtgcttttcaaacgacacggttgagatagtgcgtctcgtccggtcggagtatgtgcaatgtatcagtctttaaaattgatcaagattggcacccggccaacagctttcaaacggccacccgggccaacaactttcaaacggccacccgggccaacaactttcaaacggccacctgggcctagctgatcccatcagctgcagattttccaaacatcgatcccctttccacaacagcaatttcacaaacagtaggcaaacaaaactacgctaggaatcacctcacatccacccatgaccgtgggcacggctgttcgaacagtttgttaacctctgcagagggggtacactttacctacacgacattactaacccggatcacccagcccgtggggatcagccacgtcgggagacctccaagctttcatgtcaaggcatttcgaaagccgacacaggtttaccatatgccgacgagaggggtcccagaccaacaacaggttaggtcccagactatactgtgccaggaagcccaagggtcctccccgacaccaccccggcgaatccacatgtctctcggcatcaaggctcccctgataagctagttactcagccaggggtgtcccattccacccatgtggtcatacttgtcttatattcggatgaaattccaaggaaacggtccttaagtgcaagagcgggaaaccgtacacccggtacgttcctcggtccgcggttttggaaaattcatttagttcgtaagcaccgacccaggtgtcgggttttccaagtcttttgtaaaacccaagttttacccaagatgttttttagattttaagtttgaaggcgaccgtcgatactcgtgtagagtgcacgatttccgaggcgcaactgggtggttacaaggaaacatggtataacaattaacagaggaaggatcaaatgcaacaagctaggtaggtccgccaatctgccttgcagacgggacaaacagattaagtgcgatcctatcaatgcataatatttttcaagcaacataattaaattcaaatataggctcaagatgtttaaaggtggcttgccttgctcgagatttggagcttgatcctcgaaatcctcgcactgcgggtcttcgggctccgaaactacgcgcaaaacgggacaactcaacaaacggcgaaaataaggccctattaatgacctctaagcgtgccattagatagatctcgagatttgaggaattttggaagttgaacggagtcaaacggatttacggttgggaagatattgaatttctaagattattggatttttggtctaaaggaaaaaggatttatttaaatcctttttgaaaaagaaaagaaaagaaaagaaggagagggaaaattagacttccctcgggcggcgagggcgcggcccgagagaaaagaggcggctcggccgagctaaatgggccggccggcccaaaaggcggcccaaagcgcgcgcgctggcggggaggggagagagagccggtgggccgggtccatcctgcgtggtcccgggtgggacccgcttgtcggcgactcggctcaccgtgcggagcgaacacgcggcgcgcgctagggttcggggagggagacgcggtgcacgcgcgcggttcgcggaggatgcggtgcggcgggcccacgcgcagcctcacggctcaccgcggaccatgcgcacgggggggaaaagggagggagcggctggccgggtcagccgatccggtcgcggccgaggtggcgctgacgtggcgcctacgtggcagccacgcgggccggcgggaggtagacgacgacgccggccggaacggacggcggacgacagcagcgagcggcggagcgaaccacggcgatacaggcgaaagcgagcacaccgggtggttgcacgagacgaggggagatgagccaacggctcggattcgccggagggagtgcgtcggcggcggattgcggcggcggcaaccggcggggagggaagagggaaacggcgacgaggtcacgaggggccgattcctggcggcgagagcatctacgcggctacgggaatccgtcccttgtgccggattaggaggaaacgcatcgagggaggccggcgacgagaggcgcttccgagctcgggcggcgacggcggcgagcacacggcgagcgacggcagcagtcggggcggcgccggctagctacggggaggctactcgtgctactacccgagtctaaggggaggagatggaacgaggagggagaacggggagatgcgctaccgtgcgggacggggggcagtgacgatgggccgacggcacgggagtgatctcttcggcctcgggccggggaagaggaagaagagggcacgcccagagtccccttccgcgtccttgctcgtgccggctcctctgacacgcgcaacgatgaacggcgacggcaaacagagcacgggaggcggtggcaatggagtggaggcgagagacgaaaacgagggagattggaggagggaggagcttgggtttataggggcgacagtgtcggtttgggagaggggaaccgacattggacggtcaagccggcgagctggcgcccggctagcggccaacacgacgacaggaggtgacgccggcgagagggaaacgggaggaaaggaagggagaaagggagcttgtcccttgccactttgggaaaaggaggagggagcgggggtgacgtggcagagggaggaggggctctgcctccgtcccttggaagctagcgcgcggagtggcggggtcgggttgatgacgacggcgatgacggtggggcggtttggagcggggcgacgacacgggcggcaggcgcgggcaggcgtggcagaggctgacggcggcggcgaccaggcggtcggccaccacggcgcgcgcgcgcggaaagcaacggggctgcaggaa

SEQ ID NO: 10086 - DNA, 19297 bp, Oryza sativa
atgcaagttttttttaaagagatttcttatatggctcatgtatttccaaaagcgaacgaacttaagaccccactcaaatgcggatatgtattttcaaaagtgaatgcacttaaaaactgactcatacacggatgacgtaccaaaataccgacaaaaacatcttcaatttttttaatagtagagatattaatttttccgtcatgctagatttttctcccaagccaaaaagtgtgttttttttttaattctgatccgccaatataacccccctctatttcacaatataaggtgaggtgctttagttttatcctcaacttaacttctttttaggtttaactaagtttaatttataggaaaaacattataatattctaaaagccaaataaatatattcgatagtggatcttaatagaattgatttgatgttacgaatgttgttatatttttctatgtaattaatcgaacttaaaaaaagtgactttaagactaaattaaaacactttacattctcaaatgtagctggatatatatatatatacacacacacacacacacacacacacacacacacacacacacacacatatatgacactatatatatatatatatatatatatatatatatatatatatatatatatatatatatgagggttgaaaatatatattacgggcgatgaacagtactgtggactcttttctctgttaaatagagtatatattgtcatgttctacattaggacatacagttatatctgtccatccatactgtgaaagattgcaaagggagcaaacgcatgatcaatggatgtatgagccaacatgcatgcatctacacatttgtggctgggcggctatagcgcccatataatattcagtcggtcgcggccggttgatttgtagatgtgtgctgtgcatgcacggatgggtgccttaatcaatttggatgtgaatgcatgaatttaattaaatttctacctaacgaaagatgcaacatatatatactacgtactgttacatgtataaatatattagtagtagtatatacttgcatgcatgaggaggagttatgttggagtggtccatggcaacactgtgtgcattcaattcgatcattcgtactcatacgtatatgcgtatgtactaacgccccagacacatacagtacaaacatacatatacatagctagtactatctccgtttcctaatatataaaaacgttaattttttcacaaatatttaaacattcatcttattcaaaattcttgtgtcaatataaaaaaaaataagttatgcttaaatatcatttgatgataaactacatcacaataaaatataaataataaccacgccataataaaatataaatgataatcatataatttttttaataagataaatagtcaaatatattttaaaaagtcaacaacggtgtatatatatatatatatatatatatatatatagagagagagagagagagacacacacgtacagagtactgggtactatatccatccatggatgcatccatcacacggccggccagttgtaccccatgcacatgaccactgtaatgacacgatgacacttaattagatactctatttattaatttacttaaaaaagtacctttagctaattgtaaggcatcatcagtagtctctctaaacataccccaactagtggtatatatcgatatagtagtatatatactatcttggttttatatgacaccgttgttttttaatatgttaatttgattatctatcttatttaaaaaattaatataaatatattaaagtataaattattatttttcttaataataaaatatgttgtaacaaaataaataatatttatatatttttaataggatgaatgattaaacatcatgttagaatttaatgacgttatctatatctatatctatatctatactattataaaaattgaaaatatttttgtcggtattttgatatgtcatctatgtttgattggtttttaagtacgttcgtttttagaaatacatatccgtatttgagttggattttatgtttgtttgtttttaaaaatacaaaaggagtcgtataagaaatctctttaaaaaaacttgcgtgctaacttgagatgaaagtcaggctcctaattgcagctcaagattttctaaaataaaaatccaagtaaattcctacagtgaatttcatcctagctaaaccgtataacaatgataagattaaaatagcactcatccattgtaacgtacgagtattttttcaagtctattgaaaaggaagtaggagaactgacttgctcagttagttacgctaaattattttttcatcatcgtgcggattattggagattaattgaagaacgcgcggcattaattcgtagagtagtattcatagggtacgtacaacgccattgaataatctgacagtagcagagacaagttcagtctgtacagtgaagtgcaaagcttctcttagaccctgaattccaacctttttctttaaatttttaactttttcattacatcgaacttttttacgtacacaaacttctaatttttctattacatcgtttcaatctcttcaaacatttaattttagtgtggaactaaacacatccccttatagtagtagccgtatgttgattagagagacagcccaggccggctcctcatgattgaggaataagtctactttgtctctctcaaatttacgccatccaatctaatttgtatctctcaatcataataccatatatcttaagcactcaattattaaaaccgatgcaaaataactccctcgataattttgaggatggttttcgctgacgtagccggttgacctaggccaaccattgaggaagtaagtagggacccacatatcatactatttctccttcccttcctcatccctcctctctccccttctgttcctcctctccacaacgatggtggctggcggcaagttcccattgggacgaagcggaaaccgggggcagttgttggcagctagcacaacagagccaaggaggacggcggcttgacctcacggaggcttacagaaaggttgaggggaaggtggaggggcgatagcaaggtgatggcggcggaggagtgtagcgcccgttccgtcgtggcgcctagcgggaaaattatctcttaaaaaccctatctgcgaaatttgtttctttgattgttgtctagtgtccgtgccatctcaagatctcaatccccgatctatcgtcgagttcaaatccgaatccaaatccttccaaatcgattccctccgcaaagtttagtttgcctcccccggggttcgatgggccgaattccgctcggcccatctctctctctctctcccgggctctctttttctctctctcttcccccccccggcgcgctccttcccccctgctcagcctcgcccgcgcgctgctcgcgcgtgcgagagccgccccgagcgtctctctccctcgctgccgctccccgcgtgccgttgctcacgcgcgcccgcgctgccgcccggtcccgccagcccgcgcctgtcgcccgagccgcgccgttcaaaccaccgcgcctcccgctgttttcccacgcgcgcggccgaccgctcggtcgccgccgtcgtcagcgcctgcccgcgcctgtcgccaatgtcgccgctccgctccaaaccgccgtcgtcatcgccgtcgtcatcgcccggcccccgccactccgcgcgcaagccgccaagggacggaggcagcgccccccctccctctgccgcgtcgcccccgctcccctcctcctctttcccaaatcgacaaaggggcaagccccttttccccttttcctccccgccggcgtcatcctccctgtcgccaatttggccgctagccggagcgccagctcgcgccttgaccgcgcaagtcggttctcaaaccgacattgccgtcccctttaaacccccggcctccccttacccctcctcttccattcgtctccgcgccatagccgccgccccgtgctctgtctcacctccgccgtccttcgccgagcgccgggagagccggtgcattcgaggacgcggaaggggacttcggccgcgccctctccttccccttccccggcccgaggccggagagattactcacgcgtcgtcggcctctcgtcacagcgcccctcctcttctcggtgatgtctctctccgttccccctcctcgctccgtctcctccccctagctttcggtagtagctcgagtagaccccccgtagctagccggcgccgccccaaccgttgccttcgctcgccgtgtgctcgccgccgtcgccgcccgagctccgtagcacccgctcgtcgccggcctcgctcggcgtagttccgcccaatccgacgctagcgtcgagttcccgaagccgcgtagatgctctcaccgccgggaatcgacccctcgtggcctcgtcgccgtttccctcttcttccgccgccggttgccgcctccgcaatccgccgccgtcgagcgacctccggcgaatccgagccgttggctcgcctccccctgtcacgaacaactgcccggtgtgctcgcttttgcccgtatctccgtggttcgctccgccgctcgccgccgccgcccgccgtccattcgcggccgggtcgtcgtctacctcccgccgtcctgcgtggcagccacgtaggtgccacgtcggcgccagctcagcttagaccgggtcgagccgaccccggtcggtccctccccgtgcgcgcgttccaccgcaagccgtgaggctgcgcgtgggcccgtcgcatctgcgtccgccgcggaccgcgcgcatgcaccgcgttcctccccgcccgcgtctaaatttcctccctccttccttttctttctcttttccaaaaaggatttaattaaataatcttagaaattcaataatcttagaaattctatatcttcccaaccgtaaatccgtttgactccgttcaacttccaaaattcatcaaatctcgagatctatctagtggcacgctcagaggtcattaatagggctttattttcgctgtttgttgagttgccccgtttcgcgtgtagtttcggagcccgaagacccgcagtgcgaggatttcgaggatcaagctccagatctcgagcaaggcaagccacctttgaacaccttgagcctatatttgaaatttaattatgttgcttgcaaaatattatgcattgataggatcacacttaatctgttgtcccgtctgcgaagcagattggcggacttacctaatttgtcgcatttgatccttccattgttaattgctataccatgtccccttgtaaccacccagttgcgcctcgatactcgcgcactctgtgcgagtaccgacggtcgccttcaaacttaaaatctgagtaacaacttgggtaaaactggagttttacaaaagacttggaaaacccgacacttgggtcggtgcttgcgaactaaatgaatttccaaaaccgcggaccggggaacgtaccgggtgtacggtttcccgctctcgcacttaaggaccgattccttggaatttcatccaaacataagacaagtacgaccacatgggtggaatgggacacccctggctgagtaactagcttatcaggggagccttgatgccgagagacatgtggattcgccggggtggtgtcggggaggacccctgggcttcctggcacagtatggtctggggcctaacctgttgttggtctaggacccctctcgtcggcatatggtaaacctgcatcggctttcgaaatgccttgtcatgaaagcttggaggtctcccgacgtggctgatccccacgggctgggtgacccgggttagtaatgtcgtgtgggtaaagtgtaccccctctgcagaggtcattaaactgttcgaacagccgtgcccacggtcatgggcggatgtgaggtgattcctagcgtagttttgtttgacttctgcttgtgaaattgctgttgtgaaactgggttcgatgtttggaaaacctgcagctgatgggatcagctaggcccgggtggcagtttaaaagttgttggcccaggtggctgtttgaaaagagttggcccgggtggccgttcaaaaagcttttggccgggtgccaaccttgtttcaagatctaaagactgacacattgcacatactccgaccggacgagacgcactgtctcatccgtgtcgtttgagaagcactcacttagttgcttttagaaaagagttcaaataaaatcaattgcaaaaacaacagcctttccttgaagcctgcattaaatacttatttcccctggcttgctgagtactcccgtactcacccttgctctatataaatatttccccccctcagttgctgaagaagatgaagcagatcctgctgatgaggagttcttccaggagccagccggctacgatgagttttagggtttcggcctagttcccaagtcgcgcctgtgattgattggtccaagtcctggcttccgccttccttttgtaatgcagttgtgagctcgggatctgtccgcagcccaacatgactgtacttctactctataataaagagacttctgttgctgtgatattctgtctccctgtgataccagcactgtttcctgggactggtatcgattaacaggttaatttggagcgtcacgggttagttccggtcgggactaattcggggcgtgacaaggagctcgtgggggttgggacatgatggccctcacctagtccgcatatacacgggtagagagtggcatcgtgaaggaggacgcggttatattactccaagccgcagaccactgtcagtgggtcgagatggatgggccaataggctccttcatgacggccgcaaagtagaggccgacggctttgtcgaggctaccgtggcagaagttaaagtgattagcggcgacgtctcgaccgtccaagtcgtgggtcgctgcccccggttcagcttcgctttgctgggagctagccaccagccgatgctgctactatggagaaggggggtattttacttattgccacttttaagatgtggcgatgaaggatttgtcacttacaatctatgacgtgtggcccttgtatatttatgacatgtggatctagtggcaaatccttaattgccacttataagagtgacaaatagttaaatatcttggagagggggaatgtaatgggaaagagagagataatggagaaagagagaggaggaagaaggaaaggggagagagccagagagggagggggatgttatgtgggtctgcacatgttggctcaatgattggactaggctaacatgccacgtcagcgaaaatcaactcaaaactaccgagcgagttattttacacctgttttaatagttgagggtttaggatatctgatactgtaaccgagggatacgaattatattggacatatatatttaagggagtctaagtgtacatactctcacgtgattgaaacatgtggatgtgtgggccacgatcacagaaatatgggccacttaaatataggccaggggcctatgtgcatttacgttggccggcccagaaacgtggagctgggatagtgggcttaatggacctggcccagaatctatcggataccactccactacggagtcccctcctctcctcccctcacctcacgatatgatgatatccatccatcgctgcgattcgccgccgactccatccgatcctcctcaactccgatggcgatggccctgctgctgctgctgcttccgctcgccacccaccctcagccagcgtccaccgatctctttcgtgctgctgcttgcttcaccgatggtgatgcatgcttgatctgtgttcgtccaaatgcctcaaagggcgatcccatcttcaaccgcgattgcgatggcgattaggcgatggcgctgagccacctcctcctcctcctcctcctcctcctcctcctcctcctcagcgtcacctcttccaccgattcccctttctttctttcatgctggtgctgctaatgcttgctattccccttgtgtgttcgtcacaatgcttcacaaggaaggtgcgtcatcactcatcaaccctcgcacccctgccttcttcctacctgtttgattacattcatcggtactctctctctatctctcaattttgttccatgaatgtcacatgtgaattagcattccactctcccaagttttttttttgaaacgaaaagcggcaaaagacttgccgaataaattagaaggagtgcaaaccgtattgttcccattgcttaatttagcattttggctgacagtaaaccgtcttacagtattgttctaagaaaacactggatggacacagaaattgacaaatgatacccaaatgaaatatactcatgtatagtatagcccatatctttatattatattattattaacaaaaacttgtcatgcccagctatggcttgggcgcgatctgatacacagaacaaagagaaaacataaaaaggagaaataattaatagcaagcgtcaagccggcctgcttaaaaggtgtaaaggcagctgccgtcgtcgctcctcgccgttgggtcgaagttcttggcaacagggtcggtgcaaccttccggcacaggcaggttacctgcttgctgtgctccttgccctgatccaaattatcccaagtactaactttaatcagcaacctatcgatctatatagtacataacataggagtatagtattatatgtttgagaaaatgcagacaagatatagtagaatataatatatatatatatatatatatatatatatatatatatatatataaatatatatatatatatataaatatatatatatatatatataagggaaatatcctttgaaaacgagcttagtgttggaaactagtgaaaattatatctaaaaattttataaattcatgaaaaaattactagagaggtgtagatatgaaatacattgttaccaaatttaagtccaaacttaacttcatttgagagaaacaaaaattctcacaaataaagttgagtttgaacttgaaatttggtaagaatatatttcatatctgcactatatatctctagtagtattttcatgaatttacaaaacttttttgtatgattttcattggttcctaacacatagattgttttcaccggatatgtcttcatacatgcatgtatgctgaaggactgtatacaggaattacaaaatggaatagtgaagagttaaggggttaaatcacctcctcctcctatgcaggccgcctacgatgcatcgatgggatgcgaatagctagagatcttttattcagctggatggcgcagaacctatagacaggggcggaggtagaattttgtcatgcatagggctcaatcatttagtataacaaattgtaactagaaatttatgcttttccggccctaataattttcttgccacgtgtggagctcaagcctaattaagctgctcgacacgtggctccgcccctgcgctatagatagaataacatgtataacaaatcttaatttgtgcgttttagctggtcataattaatttagaggaagctatttttgtttctttcataatatatatatatatatatatacagtgatagagagagatgtatcatatatgatgatggtgtagagtagtgggagggtgttggatctaaccgtagaaggaaccagtcttcatggcgtcggagttagcgtcaccaagagcagcctcgctcaagtactgctcagccagctgcacacgcttgacgttctcctgctccttcacaagcatgtatccgtactccatgagcttttcgatcgtcatcttgggctgctcgaactccggtgggccctccctcgagttcaccagcctcttgccaatgttctccacacccgtgtccgacacccacttgcgcacctcgtcgtcgtaaacacgggcacgaagagcgccgaagaaatctgcatgcagcaattcgaccattcagtttcagtttcctttaattttaattaatttggtcattgatagcatttttggttgcagatggatgtaccgatggattggcctgggaagctgtcgacgatcttgacgatgtcctcgtcggggacgttgtcggtgcggaagatacccttgcagacgccgacacggtcgtcgcgggtgggagcccagtagaacttctccatacgcccgtcacggatgagcggcgcgtacagcgtggagaagtcgttgccggtgacgatgatggggacacgggggttgtcctccttgttgtacatcccggggagctgcacgttggttgggttgtcggcgatgttcatcagggtggcgttcaccatctggttgttcaccgtgtactgggtggtgcctcccatgcgacctgcacccgcgtccagatcgttgatgaagaggcagcacatcttccccttcttgatgatgtctgccgcctcacggtaccgctgcctgatcagcttcgccggctctccggcgttgccgctctccagctctccggcgctcatcatgatggggctgtaagtacgtacgtacgttgtaagtcaattagcaacaagcaagtacatacatactactaattaattcgaaagttcatactaacttgatccccatcttggcgaagacgagctcacactggaaggattttccctgacccttgcctccccagatacccaggatgagtgggaccttgatgttggggagggtcatgaagttcttggagatgtggacgacgagcttgtccatgaaagcaggggcgatgtagaagcctcccatggtgttgtcgaagtcgtacctggaggtatgtatgcatatatccagtcagtcaattcgattcaattcagcatatatatgaatatgatgaataaaatcgattggtgtggtgtacaaattagatttagtacgtacgttctgagaccctggctgaggtactcgtaggagctgaggacggcctcgtgggtgccatcacccgtgggagcctggaaaagggagtcgacgaaacccttccccctggtgatgtcctgctggtcatcggagatgtcgtaggcgagacccttccacctgtcctggtcggtctgcttgccctcgtccagctccttggccatcaccttgaacctgttgatgttggagctcttgccatggtagttcaccgccgatgtcacctgcttcttcagcttcttccccaggaagttggtcggagtggacgcctgcacatccattaatctcgcaagtaagtatcctcatttaatttgcagcaaaaacatgtacttatcaagctagctagctagctgcgtatgtatgtgtaccggagctccaacggtggaggagaaggcagcagccatcttaatttgctgaaagtcgatgattgtagaggatcactgatgatggccggccgctgctgctcaaagtgtagaggccgagctgcggtaggccttaaataatacaatagaattggacgtcgccatggaagttggaggctgtgagaggcacacactcgtccctgtggatcagcttccagatcctccacaggccacacgctgaagattgggttctgcacacgtggcgcaatctcggccggccgatccacagcatagcatgacttggacctggatcggagtctgtgagcgagttaggagtatattgtattagtgtaggtaggaaggatctcttggcttcagttccttgacctttcctcaccacagaattcacccatttctgatcaactctttctctctgttttttcttttctttccttgcctcacattcgtctcccggccggcagctagcgaccagttgcttcatcagctcagctactacataacctcttcattttgcatcaccacagaaaagccttttgctgcctctcgttgcccggcttcttggatgaggcatggcatgcaaattgtattctagttggactaccacaaatattttgctctgctacctgcacatattctgctttctcgataaccatcaggctaggactgtcatttggcaccacacaaacttctcttaacatacaacataagcattgtacgttttttcccctttgatggtttccgttaccacaaaaatacaaaaattctaattttgcactgctgttgatattgttttttggtgaagcatcaatcggaggcagctaaatctgcagcagtgccttaagatgaatttatttgtggttcatagctttcgttcctcctaagcctctatattgcttttcgtaacttttgaaaattaattgtttgctcatgtcatgtcagtagtaatcttttatgcaagtcatgtgaaatttctcctagctagcttgtccctactaagacgtttgagatggaggcaagtgattggtaacgacacttgtaaggtcgagtctccagtacattggaaaataacagtcatctcactaggcaagtactagcgcacatattggaattggataacattccccaacttgtgcatcattacagatttacagtgatacgctaattgttatcgtgcaacatgatgaatagcacaggaactttgatatagcatgcatctgtagtaacaaatgcaacccgcaagttgagaatacatccatatatagggaagtggatttggatccctcaaggaaatattccctcgttgattgcatgtcactcaagtggttatgaaaaaaattgagaagatatattaacatgtgatatatcactctacaaacatgcaaataaaaattcaacttcgacatctcgtaacgaaaaaaacaaatttaactctgaatatacattaactagctgttgtttaatttgtatttttcattacaatttgtagaagttgaacttgaacttgtatatttgtggagtgttatatcacatgttaatagaccttctcaattttttttcaaatttttttataatcatttgaatgacatgcaaataactaggggatatccccgtatatagtcagcatgtgtatatatcaatcagcgatatgatggcacatccacagtatccagagatcgtacgtatcgttgcatatgcatacagtactgctagtacactagtggataattaatgaactatgtgacaaacgattggattatgtgcaaaaatactaataatgtattagtatatgacaagtgtaatttcaccacatatcacatacttcgaggtattaaaatttgtagtgtaaaattttagtatgtactatactttaaaaattctcatacgattaatttaaataatactagttaatttgggtgcagtagtgacaaattaaacgttcctctttgttaagggtacaggctatatagggtgcgaagtacaaggaagcatatcgatggtgttcatatatatatatatatatatattcattaatcaagtgcaaaattaagaagctggtggtgaattggtgatggattgagttcagttgtagacgcagctgccgtcgtcgctcctggcggtagggtcgtagttggcggcgcgttggtcggtgcatcccgccggcacggggacgggcgactgctgctcggccttgccgtagaactcgccggagtcgtggttggcgtctccgagcgccgcctcgctgaggtacttatcggcgagccgcaccctcttgacgttctcctgctccctcaccagcatgtgccggcccgtactccatcagcttgtcgatcgtcatcttgggctgctccaactcgatccggcggagttcaccagcctcctgccgatgttctccaccccgatctccgccacccaccgccgcacctcgtcgccgtacacccgcgcccgcagcgccccgaagaagtcgatgggaacgcgtcggggaccttgtcgctgcggaagatgcccctgcacacgccaatgcggtcctcgcgggtgggagcccagtagaacttgtccatgcgcccgtcgcggatgagcgggagaagtcgttgccggtgacgatgatggggacgggggttgtacatccctgggagctgcacgttggtggggttgtccgcgatgttcatcagcgtcgcgttcaccatctggttgttcaccgtgtactgcgtcgtgccgccccgcgtccaggtcgttgatgaacagcacgcacatcttccccttgttgatcatgtccgccgcctcgcggtaccgctgccggatcagcttcgcgggctctccggcgctcatcatgatgaggctgcatgcatgcagttgtactactattacaacacacgcagcatgcaatgcagttgtacttcctactctcacttgatccccatcttggcgaagacgagatcacactggaacgacttgccctggatgttgggcagcttcatcaagttcttggagatgtgtccatggtgttgtccaggttgtacctgcagcaattaattaattaattaatcaaaatgtgcatgcaacgcagcattatatttcaagcattattgaatgtgcttaattacgtacgttctgagaccctggctgaggtactcgtgcctcgtgggtgccatcacccatgggagcctggaacagggagtcgacgaggcccttccccctggtgatgtcctgctggtcgtcggagatgtcgtacgcgagtcccttccaccgatcctgctctgtctgcttctcctcgtcaacctccttgctgctgccgcccgccatcgccatgatcttcctgcacctgcacctggacctgcctccatggtggctgtaccccgccgtcctcagccaattcttcaccaccaacccgcttccctgccaagccacaacatgtcagcttctgcatgcttttaaactttcaacaggacactcctctgtttcttactacagatctctcattgcaacgttaacgggtctcctctagtttttcctttctatctttaaatttcttgttgcttgcttcaaatcatgatatgcttttctatctttctgacaatacctaaaactttattatatgaatttaacaaaattgttattttctcaacaaatacaaatttttaaattgtaaagttggcgcgacaaaataaatggtaaaattggcgggagaattatataacttgcttaattgcaaaatattcagactcctacagaattatatagcagcaacaggtatctctcatccatttgccagcctcgttttcatttgccagtctcctacgagtactaatttatatcggccgattttgacaaatactactgtgcatacgtaggaaattaaccttgtcgtgtaggaatattattagaggctagctagctaacagcaggagacgagctagcgtacgtaccggggctccgacagtggaggagaaagcagaagccatcgtcgtcgatgtcgctgccatcgatcagctggtgggtatgtatgtatgtatgtatgcacaagatagtattttaattagcttcttgcagttgtactaactagctagctgcgttaccgatcttgcttgctagctaggtactaactgagtgagtgatcgacgaatgagctaggtgcaagaagaaattaaattgtgcaattaagctggctcagctcagctcagctcgatcagggacacccggttgatgagagctggcttgctgatggagcgagatttatagctactggcaatgcaaggcgaacgattgcagctttgctagtgtccaagcgatcgagtgtgtgcccgactcttccagaccgtgcctgcatattccctgcattgatttattacgagtactagttaaattgatcaccaattaggctgtgtttacttccaaccaaagtttagaatttggttgaaattggagacgatgtgactgaaaagtcgtgtgtaaatgaaaggtttgatgtgatggaaagttggaagtttgaaaaaaaactttggaactaaacacacccttagacacaaattctgtaagcccaagtagctatactatattcactaccagactttagagctatcctgtgggccgtgatattttctgtgcgttttgcagccaacccacagaacatcgctatagttctgtcggttgtgctaggactcatagaaaattaccactgacaggtgggcctaaatccatcgtatagaagtccagcagcccacacaagaaaacctagtttttcatccctcacgtcccaatccctcgagccgccgccgccacccctctcctccttctgcagtccccatcgccactcgcgagtagatccagcgccggcgccggtgctttgacgaatggagaccacgccgccgccttgtgccatcgatgagccatctcttccccggcggtgccagccaacccaagttcagggtcttcagatccatatgccccattctcaatggtcacggatccagccatcccgaggctgggtgttccagatccggtggctcccatctccggcggcgccaggtctagcctcgaggtgagtggatctgcggcagtttgtccccagcaagcctcctcgtctaacagctggtaggtttgctctccggattattttgcaaggatttgtagtatgtgattaccaagagtagatctggatatttgtcttgatttggagtaaatgatcaccgtatagttgatctggatatttgtcttgatctggatagtctagacaattagacttcaagaccgataattgacttgcaatatattattttgcttcgggtagcaaatcatctgtctactaatattgttgccaattactttacctttaggtgccaattacgaaatacagagatgttctgatgactttaggtgcccttttttgaattagttaatcaattaaaagtataagtagaatgatattttattcaccttactctttttttttcaaagccctgagacagccctgattcccggatattaagcaagaaaagttgattcccatattagtctacattatgtaacttagtccataatagaaacttaattttcttggattagtctagtgtataatgtccattttacatctaaataatttgtttcttgtttcaacttatatcaggaccatctaattttcctctctcaagccattttgtgaagacctaatacagtggcaccacaacaggtactcccacattagagtcccttgctactaaaaaaacttccctgttttatatttaaatgtcatgagacaaagcttcatcagttacagtaaagtgatctgcttgaatgtgttgctaaatataactaacaaatgtgcatgacctaaactgattctttgtatagctgatttgcatattcaatttgtccatcttgcagagtccattccaaaactacagaagaacgccaaatttcaacgaagtcttaggtacagattaagtgccacatcttagtgcatatcttgcaagttattatttttgttgcacatcattcaacacctgttgcctttttgcttgcagctgattgaaaggtgttgatcaatcagaattttcgtacaatgtttggtggataattttatcttgaaagataaaatatgaatctttataagtgtatctttataaattgtaacatagatggagacttgcagttcctttaccactgggtggctattttcttagtgtttgtaaacaggattgacacaaagttgaaactttgatatgtatatctcactgaagttgatgtatctgtgcacaattgtactatgaatatttgattgatgtaaataattatgtatggatctaatcatgagtgcaatatccaaatcaatttacttgtgtattaatctgaagtgcatgtgcatagcattctctcttctttttttttttccttggaaagccaatttttctgacggtgcactcgtcagaactatgttctctcaaacccggcgtctcagtttttttctgtgttccacccacaggaaaaggccgtcagaaattattattctgtcgggaaaccgacagaacaattgaatttttccatggtaatttttctgtcggcaatttctgacggggcacctacaggaatattttttctgacggtaaaaccaattttcctgacggtttttctcctacaggctagatgcaaagtctggtatgattggctgctagcttgccagctacatgcggccgattgggatggatcggatggatgaaccaattaagctgtccgtacgcacgtcgttggtgtggatgagattggaggtgcctcataaaccacacacactaaacacgctcaggaaataatccatccgattaataactatcgtcgttgcatatattttgtggcgcgtatgtatgtgtatatacgtggctactgctccacctcccgatggatgcgatccgacgatccacaaaaaagccggccaagggcccatatccatcaatccatggaagcttgcagctcctttacttttgtcgcgtgcccatgcataatttcatttgcaattttcttacatagtgctagattataataattggctgtaactcttttgaacaaaggccacgatgtaattttatttcattatctacaaaatatttgttgataaattttctcctaaaaatttaacatatgtaattacaatataatcatagtataattacactataacttaattgcatgcgtaattacactgtaacttgcatgtaagtacaatataacttgtatgtaactttcacataattttgaaccgctagatttgtttcaagatttgtgcaagtgaagaagatcaaaggatagctttcacataatcttgaattgaaaggtttctaagaacatcaaagaacaaaattatagaatcaaacatgcacatgttagcatccaagaacacaaatatggaaggacaacaatgaacacatccaccgccacttgccgtggtaaagtgcgtcgtcgatcgccttttctcgccaatgcgtcgatttgctgccattgtggccccctccccctaccccaccctaccatagatggatcttgccaccactgagacggtggtggccgaatctagccgatgccaaccttgtggtggcaggatctggaaggtagtgagctcccaaggaggaggcgaggcgactgatcgaagctaaccgccgaccgcacctttccccacgccagtgtgggccttataggctcgagccgcaactagatccgccaaacagagagaagagtcattggcggatgtggaagggcacaacggggattcggtggagaagcacgttggtggcattggtgcagatctggtggagaaagctcgttggtggcattggcgggatccgatggagaggggatagatggctgtgttggccaaaaagggttgatgtcttcgattccaattaatccttgtcgtttgagtaggggagagcagcaaagaggaggcggaagcagaggcgg

SEQ ID NO: 10087 - DNA, 12955 bp, Oryza sativa
gtcttgtgttcatttgattgtatattgtactagtgctactactacgtggagagcagagcactagcagagtgtgagaaagataaacaaggaaggcagatgtggacggagggagggagggagggagaggggcaagtgtgattgatgcacaaacaaacagctcaagttgaggccaggtggacgtgcagccacgcaagacaagacaagcaaagcaaagcacgagaggagcgagggcgaggaggacacgacgcaccgcacggatcattcattcattctctcctcctccgttcctgactccaccactcacattcattcccttctctctcctccctccctcccccgcccctctgctcccctcgccggcgagcccaatggcggcgtccgccctcgactccgcctgggaggtacgctaccccccaagtccccaacccaacccaaccctttcttctacttttcgatttgctcttctcatcatagattagattatatacgatatgatacatggatagatagatctctcatctcatcctgtcaacaatgcgcgcagggcctcaccggcagcttcaccgagttccagctcgccaccgtcgtcaccttcctcctccacgagaccgtcttcttcctctccggcctcccctccctcctcttcgagcgcttcggcctcttcgccaagtacaagatccaggtccccttcccttttttctcccatccattctttcctatctcgtctcctactacaccccaccccaacatagcatctccagtacctacggttttttttttctttttgcacaattattattattattattattatggaggacctaccaaccagatcaaacccactggaattgtctcttttttttttttttacaaaatcacccccaaccaacatggaaaggtggatcacggaaccaaaaataatttatgatttcttttccagttgtatgagtgtcttaattccacttcagggagccttctggtttctgctatgccaacgccacgctgatcaatatgcctcgcaacaagtcaaactcactgtgcgcagaaaacgaaattaagtatcacctttgtgtgtgtgtgtgtgtgtgtgtcttagcatctccaaaaaaaaagtcaaaaggccccttgaacgcttcagtgactatgggatgggatggttttaactgttgcttaatttcactctagttccaaactaccaaaaacctcgtatgtgaaatgcttcggcaataaatgttttgaggattaagctctacagctttgtcaggataaacagatgactttgtttgcactgatcagagtggaatactacttttctgaaatattttttttaataaacgaacatagtgaaatatttgaaatgcagtattgaatctatctggcaaaactagatctttgttgtgttccttatgcgtattcccccaaaaaaagatctatgttgtgtaggctaggtaccatattattacttgaactatcacccatcatttataggaaactcttcttgcacttttaagtaccatataaatgccctacctactaggctactacaaatcttgaaaattctcattcacagggaaagtaattaccgagaacattgtcgataaatatccttgctcgaagatatatgctgttgacttgtatactctgcaccttagttttatatattctctgaacaagaagtcaaaaattgtgaaaacaagttgcttccagataccaccaagtcatcaagaaatactcaacctccgcgtgcatgtttcaaggcagatctgttcgctgtcgctaaatgcttctaggttgtactttgtttcaccacaaatcagttttaaagtaaagcatgcttgtgattgctcttgttcccagtttacggtgctcgacttacaagtcatatcagtacgatttgagctgttggtgccatgccactttgttgatcccaaaatcaaattaagaacaatatgagaagtctctcctgtccatttatggttctcctgatgaaactaacatgcattgccttttttttaattaaaaaaaaagagagtatgctcttgttctgtccctactttctatttcactcattgctcccctctgtgccttttctttttgggggccttctgtgacaacagttaaactgttgaacactgtgaaactcagcagagatttatacttgcttgctgccatatctggtctcataaaaaaaaattgtgtggatctttgcagaagaagagcaataccccttcttaccagaatagatgtgtgctgcgtctcattctgtaccatgtctgtgtgaacttgcctgtaatggttttatcctaccctgccttcaaattcatgggcctgaggagctctcttcctctgccacactggtattcaagtttcaatctttaaaccagggtagcacttcatttattgcaatgtttaacattccacctatgttgatgcaggacggttattgtttctcaagttcttttttactttgtactcgaggattttatattttattggggacatagggcactgcacaccaaatggctatacaagcatgttcacagcgttcaccatgagtacgtaatgctacatcttggcctcatacttttacattttgttattgttccagttcttttaaataacaatttcctgggcagatatgctacaccctttggcttgacttcagaatatgcccaccctgctgaaattttgttccttgggttcgccacaattgttggtccggccctcactggtccgcacttgttcactctatggctgtggatggtgttgagggtattggagacagttgaagctcacagtggataccatttcccatggagcccatcaaatttcttgccactgtatggagggtaagtaatctagatattgtaagtgtgatataaaatggtatggggactctattggtgtcctgaatgccgtcttttcctatgaccagctccgactttcatgactatcatcaccgtgtgctctacaccaaatcaggaaactacgcctctacttttgtttacatggactggtgagaaatcattgactttgctatgtgtaatcatgcatgtttacctgactctttacatgaggagccttcctgtttgtgataggctgtttggcacggacaaggattaccgcaatgccaaggctatcgaggagaaagacgggaagcatttgtaaattgtgggggctactctctttctctttgtccaaatcatcgaaacaagggtttgacatctcgcagtggtgatagcattgtgttcatgggaggaaataggtgtcctagccacaggtatctatctcctgagatgatcctacagtttagattttctttccccaaattcactatactatcatcatgagacctttgtgtttctggaggccaccatgatgtaatttgtcataagcttaatttgatgcgtgctattttgtggtttgcttggacgggggtacatgccatgacagaagtgaactattcgaatcagaaagttgtcagattagtgagttaacgttgagatgaggtttactggttaaagtgctgcgtgttactttggtgcttttgttggttttatcatctttttctcgttcttatcgatctcgaagtcgaagtttgtttgtttgtttgtttgtttgtttatattttataactgctggctttatgtatactgcgtagcctgatgaagggttaattaatagcagtcaagtttacgtgtcaattggacacagtgttagcattaccctggcgcgtcgatcagaccaaggaattgggcgctgtgaccggcttacggccatgccatgcctctatccgaaccgaacaactcccgcctcggccagcaatgggtgtgtttggttgggctgtggcttttaaaaaagcagctgtcgactgtgatttttttgaaaagtagctttgaaaaagtagctgtgaggatttttttgaaaattagctttgaaaatgagcatgctggcggctgacgacgacgacttcgcacgcgcgacctgctagctcggctggaggaggagtggcggtggcggctcggcgaggaggtagaggcagacgcgggcggcggcggaggcagtcgcgggcggcggtggaggcagtcgcgggcggcaaggctgaggccactgcgcacgcgtgctcgccattgctggagctccaccatggccacctcccatgcccgccgatgacgaccgaacaacgacgacttcgcacgtgtgggcagctcggctggagaagcggcggcggcgggggacggtgtccgtgcagcacgtggcgaaggcgtcgtcagacaagctcatgcggaagttcaccgacccggacgcgcacgccaagcagatcacgccgccgcgccgtagccttgcgctgcggcggaagcagtcgtccagcagggtggcattggggctccgcgagggatttggagctgggagcggagctcgtggcgcctaagcggaggcggagcatcggcgggtccacctagtggaaggccgggctgctgctgccgatgaccacggcctctgcccgcaagggagatccgccgcgagcacctcccatgcccgccaacgacgaccgaacgacgacgactttgcacgcgcgggtagcttggctggagaagcagcggcggcggcgacggggcgaggaggagaggcggcggcggcgaggaggggcggcggcgacggcaacggggaggaggagcgccggcggtggcgtggtctgtttggtgacggcgaagtgaggaggacgaggagcgacgcgattggagaaaaagaacgaaccgttttttggtaatggcagagctgggtaattttttttttcccaaaagcaggtgaaagcgggggtagaggtgcttttgatttgtagtagaccaaaaactggctttgggcaaaagtagctgtagcatttgggctctttggttagcttttgcaaaagtaaaagctgattgaaaagcccaaccaaacacaccctcaattgctctgagccaagcccggctgccgccacccttcacgctcactctgagccttgccaccactaggaataggtaggggtgcaaacgggctagcgcctccctccatattaaaatatacttcttttgtcgtataatatagcaacttagtaccatattaaaatatacttctttcgtcgtataatatagcaacttagtaccagatggagtatttttaaagcacaataaatctgtccagattcattgtactatgaaatgcccctatgaaatgccccctttagttttaggttgctttattaagtagttacttctacttactagcagggtataaaaaatatgcggctatcacggttatcacgtatagtaaccttctccatttttttcgtgttaatcgcaaggttgttatggtaaccgtacggttactacgttaacagttgaaaccgtgggatgaaggtaatctcacccaaaacggtttgagaaccctgcatactagtagtggagtagtgcagtggtggtgcaagatgaaatgtccacccgtctgcccgatgcgtgagatgctgtatgtggaggcaggcagctgctttgatccagagcaaagcacatgagaacaatcttaattttagtgtgcagcagctttcagtcagagtactgagaacatgagacaagagcacaagaatctttgcctgcctgcctgtgcctgcccagccagcactaatacccaaccaacagtgacccctccttccctgtgctgtgcacattgcacagagaaaattaaagatcctactactatctcacagatcattgatcatatactgtagtatctatcaggagggccagttaacagttgcgctgccactgccagccaaccctttcatctcatctatctatatattcgaaatgcatgcatgtgtatctacagttgcagctagcctttggccctccctggacaaattaaccttttgtttttgtgaatttaacctgtccttttcgttttcttgatcagtgctgccatgctgcctgcaagcatggagcaaaacagatttacagtgcaatactgtgatgagtcgctattatacagtcagatcagatcgatgacagactatgccaatttatgaaataccaacttatattatctgtgacaatgaaagcaaataatgtgcactgccattaagtacaaccgaagaaatccaacaatgtgaatcaaccgatcactagagattatctagctatgctcagtaaattaaagaaataagatatcggaacgcggatgtggaaaagcggtgagaaaacaagacaaaatgaatcaggctaagcaagcaacaagacaaacgcatctcacaagcatcaactttttatggctctagcgactactcgctagtagtcgactaaatagtggagttaagtataatcaggtggaggccagagtgtaggacagtgagaagaaaacataccagctgctagctagatgtcatgctaattaacacactaccaaatcgatctacaattctgattccgtgtggttctgatcttgtccatctcaagaacgccacttcttgctttaatttaactatttaggtgccttgttcaaatgaagaactcatgtcgcgatgtgtaatcgatttggcgtcccttcctgcagccaacaatatatagtgctgctacctgctagctagcatctggggcatgacttgctagatatctagacggattaaatgtgtaaatgttcagattgatagataggagtagtagtgtagattgagaggtcaactgcaacatgaaaaataattagctaaattaatccacgcaggctagctagctactccctccatcccattttaagtgcaactataagtttccgtgcccaactttgatcgttcgtcttatttaattttttttataattagtatttttattgctatgagatgataaaacatgaatagtactttatatgtgacttatgtttttaaattttttaaaaaaattttcaaataagacggatagtcaaaaagtcgtgcatggaaaatcatatctgcacttaaaaatagaacagagggagtagcttgaaccatcactcaaattaattaaaggcagatttacccctcgagtaattaaactccaacaagactcatagaaacattcatacaaaaacatttatatgtattacatgaacttagggtttattaagtactaactttctcttattcatattataaaatgttttaagttttaaatagtttcatgtatggacccatgtatgtgttttatatttgtttaaattcatatggatattagtaaatctaaacgatggatgaaaaggccaaaacatcctgttgtcgtttgggtatttaactgagaaaaaaaatttcacgaataattttgaacttctctcaccgaatagctgacgtgcacctaaatccattggtattgtatagagaactcttttaagtcctcgagagatgtcccttcaatatttgttcaaaaataccatccaaaaaagttattaatttttcttaaaaaaatgacaacgttcatacaatatacatatataccactctgaaaaatttaactctaaactcaacttacattgagaaacacacacaaaaaagacgacaaatctaacgtataaacagtaccgacactgtgtgtagattgaatttgaactttggtggaaacagatgtcacactatactctacaattgtcaaattttatcaaaatttttcataaccatttatattagagaaaacgatacacacaaaacattctctcaagtgattaaaatcctctttttggcgacatgtacctctcattagctcatcgatgatgctgtataatcgggtgggagcacctcggatgcctttgcctattgaactgtcaacaacatctagctatcagtgtttattctctttcagtggactcttcttcgaactgaattattacctgaaaagattttagaagaaaaactattaccggcatttcaatgaaaacatgtacatatatgcatatgcaagagaatcaatttagaattccagattcgatggagacacactaccacctcgatagattaggatgactagctagctagctaggattgccttgaatgaattgcagagacacatcaatgaccagttagttaagatcgaccaacaaatatataatttaaaaacatgattttgccggacaacgcattctccaattatatatatgctcctggattttacattttgtccaataaaaaaacatcttaattacaccactggtgtgagagaaattaatttgcttccctctatacatatataatagcaaattaaataatgaattaagctacatattttttcctctgaaattaataaacccaagaaggaaacgaatgaataaattaaagaggagctagcaggccacatgtgcacagtgcagtaaccaatatatacctaaagaacaaaacctgatcgaggagaagacatgtcatccaatcatacactgtacgcgcacacacacatgagacatatatacaccgatctgatctgatccaatccttgcttaattcttctccggctggccggcctctcctatagcttagcttagcttgcgagacttcgttccactagtcttctcctaatttcttcctcctgcaaatatgcgtagtcttctgtcatcgtcgaccgtcaagtgtgtctctcgctgcacacggagatgcatgcacctcttgattgattgctcggtcgactgattgcttcttacacaccgcaactcgctctaattagttggtttagcctgtttagatttgtagtattagaatcgtcacattcaatatgtactagatttatttattttgagacgagctagagccgcttgattattgtcgatcggtactagctagtgctacttagtaagccggctagtggagtactcaatctctgctactactcggctagcagctggctgctgctgcagcagtagaacatcaagagaggaggttaattagctagtacgtagtaccttggctgctttaatgaactcgatcgatccacagctagctagcatagcagagcagcagtaatggaggagcaaagaggcgaggaggagtgggtgatgtggggatcggcagggagaagacgaatcatcaggcaatcggcgtcgtgggaggagcaggcgttcgcgcgcgatgcggcggccaacgccaacctcggcggctgcgtgtggccgccgcgcttctacacgtgcagcttctgccagcgcgagttccggtcggcgcaggcgctcggcggccacatgaacgtgcaccgccgcgaccgggctcgtctccgacagaggcagacctcctcctcctcctcccccagccaccaagaagaagaagctgaagcaccccaagatcagcaagctggcccttactatacctctttctctaaacctagcaccacctccaccgataatactacttgcagtaacgacatactactgctagcaagagatcaagaaaccatcaagaagagggtaccgagacagcaagtacaagtagttgcagatcaggacgaggacgaaccggccgggagaaggtacaagaggaggaggcttggtttggtggatcagctgccgtcgtcatgtgaaggaggagatcatcatcatcaggtactgatcatcacaccaacaacagccgccgcaagccctagctctataattgcttctgcttctgcccttgtggttggggatcagcagcatcaacaagcaggatcagtactagatctagagcttaggcttgggactagtactcctcctaaagctgttgtgcacgcttaattaatctgcatgaaattgattgacaagtaccccagtgtggatcactctagtctctccgtatatatatatataggtcttgttagctggcttcttcatttaatttctcagtttttcttccccttgtgacttctcttggatcaattcgtttcttaattagtttgcaaggcccagcatgcttacatctctctctccctccttccaaatgcgtgcagtgcatataaatatatgtatgccagtgttgtagaagaattaagcttgatattagtgtattgattacattctcttctgaagaattgtatccagtcgattcgatcatatcggtattaggattttgtattgtattgtatgtgtttgtatacaacttctatggtcaaatttgatcgatctctttttaccatgcattttaatttcttcctagtattatttatactgttcccgttccctccatatatacttaaaagctgatctgcagttctgaaccttagctcaatgtgtcgattactatcagttcaggctagactagaaattttacatgattaattaggagtatcaattacctagattcaagcaatatgattgatcatatccagccctattcctacaccgtgaaagttgaaattctaaattagatccttaaaataattatatatatatataaaggttataggacaatcagttatgtccaactgtgtgcatctttattaatcttacatattagtatagcttaacaaagactagctagaagctgatcgacagtacgtatagctagttagctagctagtgaggacgacgaactgacgaagtgatcatatctgttctttgtcttttgcgtgcacttccgatcctaattaaaagcgcgcatccatgcatcgttcaaagttggggcactgcatattgcagatgacattctgattcctcttgtatatagagtatattatacggattaagattttttttttgaaaagaaggcaaaagttttgcctcgtgtgtatactgatagagcaggggcaaaagataggtacatggcttctaaataggtaggaacccacaaaaagagagtcttaggtaatttttcccgaaacagcgaaccccctaaggtagacaacccccacttttgcctatgcagctgccactcttttattttggcgatgattgtgacatgtggggtggcgacatgttgaaagatactgacattgcactcgcaccaaatttcccgagcgatgaaggtcagaagaggcttgagcatcttcaccgggttatgaggtgtatgcgggaggtggtataccactcctccactgaggcatagtcatcccaagattgttagttcaaattcaagcctgtccaccactgaatcactacccagattcggcaggagagtctataacgtgcaaagaggtgcaatgccatttcctgtgtggtgtagtagaggggcatatttgctgatttgtccaactttttttagcctgtttgctgtccagactctgctttgtatgaccagccatgtgaagaacttgcacttcggcgatgcccatcatttccatattgtctcattgaaagttgaccttgccgcccccaggaataggagctggtaagctgattttgccttgtattccctatttgtggtgagtttccagacgatgttgtcgcgttgttgccctagctagcaggagagcattgcatatcaaggtccaaagctcgacgtatcagcaaagatgctctctcgtcgtgatatggtacaactggatgtctctctgacccacttgttggagaggagggcctcacagacagatctattcttgcttatggaggctgtgtagattgccggcgcaatcaatgcgagtgctctagaagcctgttgtcttcccatcgcctatggttatggtggtcgctacgctaccgcgaacagctctctgtccaaatgatcacctaacactagggtgccagcccaaggtcttattcgaaccacagatatcaatctgagggctcctagccctcctagctcattcggcttgcatactttttccaattaactttgcatttttctcccaagatatcatcccctcctgcccacaggaattaatttgcgtcttgttttgtctatagcgttcaggatccccttcaaaagcttcaggaccgtcatgtggtagatgggttatgcaaagaggactgactttataagagccgttcttccagccaccatcatcatctttccttgccataccacattaagattatacatatgtacatattttcatacgaaaaatatacacattttagttagaaattctgtaatcaacaaatgattttcttgtgtgtgtgtgtgtctttgcttgcctgcatggctgcagagagagagagagagagaactgaggagagggggcaactgtaaggtaggaacaacaacaaactggccttgcatgctggcattgctcttaatttgggcatttggctctagctacagaggatgatcgatgaattccaaaagttcagaggatgcatgcgtttgcatatggtgtttctctcgatttgcatagtaatatacggccagcagtacgtactagctaggatagatgtgtactacttatatatatatgatatatatatgtcccattagtaatccacacatggtttgcatttgctggatcgatgggtgctgtcctccattggaataattcaaatcaagacgccctgctagggcctcctgctgcctcaatgcatggattattcgatctcccatgaactggcactgcatgcatgccctacagctagctagctagctccaagactcctgactgctgctaatttattggcctgcacattgctactccggccgtatttagttgttttagcaaaaaataaaaacttttgacgtatacggacacgcatttgaagtattaaatgtagactaataacaaaataaattacatatttcgcctataaactgtgagacgaatatattaagcctagttaatccatcattagcaaatgtttactgtagcaccaccatgttcatggtgtaattaggctcaaaagattcgtctcgcaatttacatgtaaactgtgcaattggttttttatccacatttaaggctccatgcatgtgtccaaacatttgatgtgacggaaaaattggaggtttgaagaaaactaaacacagcctccctccataccattataagtgtagccataagttttcgtgtccaacgttaacgtt

SEQ ID NO: 10088 - DNA, 19428 bp, Oryza sativa
  unsure (1)..(19428): unsure at all n locations
ttagatgcacggttagagctacattagattttctttttttggtatatgtttgtgtggatgcactcaaaaagttgtgaaatctgttcttccaaaaagttcagtttcaattctgattgttgggatttcaaatcagataacagttagcagtgcatattaacaaaaataaatagtgcgtggggtattcaaagtatatgtctgctgtccgcaaaataaaacatgtcatacattcccccctgtttcccacaggattcacttccgcaggcagttcttgctggatatccttgtatttcagtcagacaagtacatcaaaagggaggagggggggttgttcaccagattcaacgagtgttatttttctgccatttttgtggagagttgatgacagctgggacttgatctgtgacatactccctccatacttataaaggaagtcgtttaggacaatgtttaagtcaaaccttaggaatataaatcataaaagttgttgagtttgaaaatataaaaaactatatgaatagatttatcttgaaaaataccttcataaatatacatatatcacttttcaatcaatatttttatagaaaaagaagtcaaagttgtgttttggagaccgtgtcgctgtcctaaacgacttcctttacgagtacggagggagtaggagtattatgtgaaattgacattgatgattccaaataaaaaaaatggctccttaccttgcaacaataaattatatggaaggtgaacttcgacgaagttcaggatgttatataaatcttgatcatacctgagaaaggtccactagttagaaatcttcaaatctgttgtatgatagatagtcaactgttggtccatggcttcatctgttaggagtgcttagtattttaagatgaacattgagttttcaacgcacaccggcacacggcacactgaacattaggcttcaaagtttaccagctttccttacaaattcttgtagtactacatatttctcggtagtgttcctttgtttactggaatagcaggtctgaaatactgctagtttggttcatcattccatgtgctgatatggtttgataattacagactgatggagtttgatctgtcctttttcgttaggtgactaggagtatgtcttttgctatgtccttgaagcatctgcttgtatattttagccatgacttctggaggtttaggtagtaggaccgtaggagtaattcagtaataactagatagtagcagttaatatactagtcctaaataggagcaggatataatttgttgagttgcttatggagaagaagttgttttcaataagagggaacaagttgattaagtttcccgattgcttgggacggtcaatagcagcaaacgatttggcatactagtaccagtagtataatatatagaagtatattgggttggtgcaacttcgtccattttgtcattggcttcaataaaactagttgtagtacagtggttgcataaataagtatttcagtaaattagtcctaggtgcaccatgatagtggtgaatttaaaataaagcttcagattcatactggtattgtagttgcttttaatttggtcttgaaaagaaaaccaaaccaaacctgcgacacaggcaggcagctagagggtagctgctctgctcgatccattccattccatgccgccgccctccttcccatcatccttaatccttcaatttaattgcacttgattaatagctagtgatagtggaaggaactggtaggcaatggctaccacgccggaggcggcggagtccctccgattccgatggccggcagcggaggaggagttcgacaacgacatggtcctcccctacatctcccgcctcctcatggaggacgacgtccacgaccacttcttctaccagtaccccgaccaccccgccctcctccgcgcccagcagccattcgcccagatcctcgcctcctccccctcctccgccgccggcgcctcgtcgtcgtcctcctcctccgatgccccgcccagccgccccttcttcgatgacgaggcggccaccgccaagactttccccactgctgcggtccacagcgttgaccaccagtactccggcggcctcgacatggtcaacatggcgttcctcaagggcatggaggaagccaacaagttcctgcccaccaacaccctcctcctctcgaccgactcttctactaccttgcagttgcaggttcagggtgaggtagtcgtcgacggacatggaatgctcgggggggtcgggggagcagctgcagctcatgctcatggtgcaatcaacagcaagaaagtcaactgcagggacgacgacttggaagctggcactggcagggccaccaaactgatggcgcccgagccggagctggaggaggaaggtgcacgccagatgttcgacgaaatgatgctccaggagcacgagatttgcatgaagggggtgaagcagctgagcctcaagtccaagagcagcagcagcaagaaggcgcgggggagacgcactgtgatccacaccgagccggtggacctgcacaacctgctgctccactgcgcgcaggcggtggccacggacgaccgccggagcgcgcacgagctgctgaggcagatcaagcagcactcgtcggcgtggggagacgccggacagaggctggcgcactgcttcgcgcaagggctggaggcccggctcgccggcacggggagccaggtgtaccagtcgctcatgtcgcagcgcacctccgtggtcgacttcctcaaggcgtaccggctgtacatggaagcctgctgctgcaagaaggtggccttcgtcttctccaacaagaccatctacgacgccgtcgccgggaggcgcaagctgcatatcgtcgactacggcctcagctacgggttccagtggcctgggttgctgcgcgagctcgcggcacggagaggcggcccaccggaggtgaggatcaccggcattgacctacctcagccgggattccgccctgaccaacacatcgaggagaccgggcggcggctgagcaggtacgccgacgagctcggcgtgccgttcaagttccacggcatcgcggcgacgaagaaggagagcgtgaggcgggaggagctgggcgaggcggaggaagacgaggtggtggtggtgatcagcctgtgccatttcaggaacgtgatggacgagagcctgcaggaggacagcagcaggagccccagggacgaggtgctggggaacatccgcaggatgcgccccgacgtgttcatccatggcatcatgaacggagcctacggcgcgacctacttcctgacacgcttccgggaggctctctactactacgcggcgcagttcgacctgctggacgcgacggtggggcgggagagccacgagcggatgctggtggagcgggacatcttcgggcgggcggctctgaacgtgatcgcctgcgagggcgcggagcgggtggagcggccggagatgtacaagcagtggcaggcgaggaaccagcgcgcggggctgaggcagctgccgctgaatccgcaggttgtgaggctggtgctggacaaggtgagggacaagtaccacaaggacttcgtggtggacgaggatcaacgctggttgctgcacaggtggaagggccgcgtgctctacgccttgtccacttgggttgcccaacactagctcttagcctcttaccaattatttataccaattttcagatatgcacatcataagtacaaccatgtctatgatcgatgtggaccatggttgagtaaaccctattgtatgtttcttgtatcacatttttgctcctccttggtcatggtgaccactgaccactacctgatttactactccagttaatcctataaataaataaaatggccatagaggaggaggacctcaacatggagacagccttccctgatgaggtactcacggtcaatgaccttttcaatttcaggatcttaatggacgagagtgtacgttgtcacagacagcaggagtgccctgggaaatcgtcctcgacacaatactaacataggccatgtttagatcacaccaaacttcccccaaagtcccaactttccatcacatccaaaactttcctactcacataaacttctaactttttttccaaactaccaactttccccaaacttctctccaatttcagaaactaaacacagccatatggaagatatgcagctggacgtgtttgtccaaggcattgtaaatggctcccaaggcatcacctttcttgtcacgcacccgagagccaactgcggttggtgctggagcaggacatctttggatgggatgcccatgaacgcaattgcctgtgaaggagggaaggaccgggtgggcatacaagcagtggcaagtcaggaaccaacaggcaggctttaggcgaattaattttgaaaaatatattgtctattcttttttctcagaaatactcaggatacaatttttttggcacaaatataaagtcgatatcgctgaaccgttgtgcgaaaatgataaaaatgtgacaacacggatggtcttgaacagcgacggcgcaagactgctcgggctcacatggcgcgggtgtgagaccgagcggtctcgcacggcaaaacagcaacaacgttttggaaatagattaattatccgattagcgattaattaacaataataagtgattaataattaattaatcgctaatcaactaattaatcaattagaatgtcggtctcgctgtttggccatccatccgcgtgatacagagcagtcttgctccgtcgccacatgacaccatgcgagactgtccacgtcatcatgccctcgtcatttttgcgcgacgattcagtgatatcgacggtatatttgtgccaaaaaattattgcatctcagatatttttggggaaaaattaaatggaacagtatattttcaaatttaatttggcttgaggcagctgccctagaacagggaggaaattatgatggttaagaaacactaccacaaggattttgtcattgaggaggatcaatagtggcttcttcagggctggaagagccgcatcctctttgcccactcaacatgggttgcacatgactagtccagttctcgctgtcagcattccctctacaatggcggatatatccccttcaaaaaaaatacatataataactttgtattcccatgcaaaaaaaaaacatatatatttaactgtgtgttgatacggggtaacaagtatttttttttcatgttctaaaattaatgtttccaaggatagtcatgttgaacaggtaaagaaaaataaaaacgaaggacgtatattattaccttgtctgcattctcaaagcaaccttggagtaatctccatttccatgtcctatttgtactaggttattggaatcatcacacattaggttggagttatggacagggtatttgctcctgcctcatgatatgacgagcaagagcaaaggctaccaccattgaatgattatcagcatggccaacccagaggatttcttttgggaggccctcctcaaggagaacgaagcaccatccccatcacctgtcttctttgaactccccccaacacccctcgccaacagtgatggcagtacagatccctcgtcattgttggacaaccaacttctctcctacgtcactagtatgctcatggaggatgagatgggttcttctgctgctgtcaccaacttgcagtgtgtcaacaggggcagcacagaggaggccaacaatatgttgccgggcagtgaagtggttagggcgttcttgaagggcatggaagaggccagcaagttgctgcctagaaacaacagcttcagaatgctggagacggtggatcaagtatcaagtcatggtcattgtaggggaggaaagaagaaaaaccatgacagggatgagcagcagctggaggaggaactggggaggagcagtaaattagctgccatgacgaatgcagggacggaggaggctggtgctcgcgagttgctggacgaactgatgctgcactcgcacgagacatgcatcaaagacatggagaagctgcgcatcgacatggacaatgaggcagataagaccatcaaaaagaagggcaagaaaggcagtagtagcaaggtggtggacttacggatgctgctgatccagtgtgcacaggccatggcgacagacaaccagcaatctgcaggcgagctgctgaagaagatcaagcagcacgctttggcaacaggcgacgccatgcagcgagtggctcactacttcgccaaggggcttgaggcacggctagctggcagagggaagcatctgtatcagaatcagatgcgcatgtcgttggtggagtacctcaaggtgtacaagctctacatggcagcctgctgcttcacgaaggtggcactcatgtttgccgccatgacaatcatgcaagctgtgcaagggaagaagaggctgcacatagttgattacggcccgcgctgtgggctgcactggccagacctgctccgccggctgggaagcagggaagacgggccgccggaggtgaggatcaccatcgttgacatcccccagccggcgtttcgtccatttcagcgtattgaggaggcagggcattgcctgagcagctgtgccaatgagttccgcgtgccattcagattccaagctgttgtagcagcaaagtgggagacggttggtgccgaggacctgcacatcgagcctgatgaggtgcttgtggtgaatgacctctggagtttcagtgctctgatggacgagagtatcttctgcgatgggccaaaccccagggatgttgccctccgtaacatcagcaagatgcagccagacgtgttcatccaaggcatcatcaatggtggctatggtgcctccttcctgtcacgctttcgtggagcgctcttgtattactcggctctgtttgacatgctggacgccaccaccccaagggagagtgggctgcggctggcgctggagcagaacgttctggggccttatgccctcaacgccatcgcctgtgagggtgcagacctggtggagcgccctgagaagtacagacagtggcaggccaggaaccaccgtgcaggcatgcagcagctgaaactgagaccagatatcgttgatacaatcagggaagaggtgaacaagtaccaccataaggactttctgctgggagaggacgggcagtggctgctgcagggatggatggggcgagtcctctttgctcactccgcatgggtgccacaacaacaagacaattcctccggatgactgtttggttttttttttcttttcttctttttctgcataaaaaatgcaagttagtagacttatctttggacatgaaaagtgcatcgtgtgcacagaatgttacagcgatttgcattttagcagcctggcaagtttctttaattatgaacgtgctagtattgtcaacatgtagagcaaggacacctagagtaatacttaccagtactagaagtactttgattgctccagttgcaacatgacctgtttattttccttgtaacagccatcagccgtataatatgccaacaaggaggagaaggtgggtaatgaatccaagccaagcatggaaaacatcaaaccctgttctcagcaaaactaaaacaccaccatgctatcaatcaccaggaaaattgttgggtatgaatgggttgaaggaattgatgcctccatccttttccgtcctcttcggccttaccaagagcatcacaagaaaatgcaaattagaaaaatgaataatactggaatagtgctgctgcatattatggttgtattctgcacttgcctggattttgcctctacagactgcagtctacagacattatgtgttgagtcctttcaacttgaagaattgactgagaacagtaacatagttcagggtgaagttgttaagtttccttgcacctgccctttttacaatgatttgacatctgcacatatttatctgtcaaacagcttggattgaatttgcaaattgcctttgcattatgagaatatacaatacccaggtcacaggctacatcattcactatgttacatggtcctcagctacatcattcaatcagataagactggtgtagttttggctgcttccttgtatcaatgcaatagagtcctctgttctccatcaaattatatttaatgatcattgcttctttagataggacaagggaagaagtggctccaaaaccaagatttgcagattgttaaggatcaaagaaacattgaggaatggaagggccaagccatcagtaccacaaggtaccagtgctcctagcctatcagattaaaattctatactattattgtgctaatacaacaggattccagggtatacaattcctcagcggtactgataaaccagcacaattgttagtaaagacatggtttccaagttcatagtagaaagtcaattaccagttatcacaacaatcctcctggtagaaattctgaacatctgatcaccttctcaacatggcatgagtcgatactattgtaaacaaattaatcaatttgaatgtcggtctcgctgtttggccatccgcgtgacacaaagcggtcttgctccatcacctcatgacaccgtgcgagaccgtccacgtcgtcnnnnnnnnnnnnnnnnnnnnnnnnnnntcagtgatatcgacggtatatttgggccaaaaaaatattgcatctcggatatttttggggaaaaaataaatgaaacaatatattttcaaatttaattcgggttgaggcagctgcccttgaacagggagaaagttatgatggttaagaaccactaccacaaagattttgtcattgaggaggatcaatagtggcttcttcagggctggaagggccgcatcctctttgcccactcaacatgggtagcacatgactagtccagttctccctgtcagcattccctctacaatggcggatatatccccttcaaaaaaatatacatataataactttgtattcccatgcaaaaaaaacatatatatttaacagtgtgttgatacggagtaacaagtattttttttcatgttctaaaattaatgttttccaaggatagtcatgttgaacaggtaaagaaaaataaaaacaaaggacgtatattattaccttgtctgcattctcaaagcaatcttggagtcatcttcatttccatgtcctgtttgtactaggttattggaatcatcacacactaggttggagttatagacagggtatttgctgctgtctcatgatatggcgagcaagagcaaaggctaccaccattgaatgattatcagcatggccaacccagaggatttcttttgggaggccctcctcaaggagaacgaagcaccatccccaccacctgtcttctttgacctccccgcaacacccctctccaacagtgatggcacagatccctcatcattggacaaccaacttctctcctacgtctctcgtatgctcatggaggatgagatgggttcttctgctgctatcaccaacttgcagtgtgtcaacaggggcagcacagaggaggccaacaatatgttgccgggcagtgaagtggttagggtgttctcgaagggcatgggagaggccagcaagttgttgcccagaaacaacagcttcagaacgctggagacggtggatcaagtatcaagtgatggtcattgtaggggacgaaagaagaaaaaccatgacagggacgagcagcagctggaggaggaactggggaggaccagtaaattagctgccttgacgattgcagggacacaggaggctggtgctcgcgagttgctggacgaactgatgctgcacgcacacgagacatgcatcaaagacatggagaagctgcgtatcgacatggacaatgaggcagagaagaagatcaacaagaaggacaagaaaggcagtagtagcaaggtggtggacttacggttgctgctgatccagtgtgcacaggccatggcgacagacaaccagcaatctgcaggcgagctgctgaagaagatcaagcagcacgctttggcaacaggcgacgccatgcagcgagtggctcactacttcgccaaggggcttgaggcacggctagctggcagcgggaagcatctgtatcagaatcatgtgcgcatgtcgttggtggagtacctcaaggtgtacaagctctacatggcagcctgctgcttcaagaaggtggcgctcatgtttgctgccatgacaatcatgcaagctgtgcaagggaagaagaggctgcacatagttgattatggcatacgctgtgggctgcactggccagacctgttccgccggctggggagcagggaagacgggccgccagaggtgaggatcaccatcgttgacatcccccagcctgggtttcgtccatttcagcgtattgaggcggcagggcattgcctgagcagctgtgccaatgagttccgcgtgccattcagattccaagctgttgtagcagcaaagtgggagacggttggtgccgaggacctgcacatcgagcctgatgaggtgcttgtggtgaatgacctctggagtttcagtgctctgatggacgagagtatcttctgcgatgggccaaaccccagggatgttgccctccgtaacatcagcaagatgcagccagacgtgttcatccaaggcatcatcaatggtggctatggtgcctccttcctgtcacgctttcgtggagcgctcttgtattactcggctctgtttgacatgctggacgcgaccaccccaagggatagtgggctgcggctggcgctggagcagaacgttctggggccttacgccctcaacgccatcgcctgtgagggtgcagacctggtggagcgccctgagaagtacaaacagtggcaggccaggaaccaccgtgcaggcatgcagcagctgaaactgagaccagatatcgttgatacaatcagggacgaggtgaacaagtaccatcacaaggactttctgctgggagaggacgggcagtggctgctgcagggatggatgggacgaatcctctttgctcactccgcatgggtgcgccaatcacaagacacttcctccggatgactgtttggtttctttcttttcttctttttctgcataaaaaatgcaagttagtagacttatctttggacatgaaaagtgcatcactcttcttgtgtgcacagaatgctacagtgatttgcattttaacagccaggcaagtttctttaattataaacgtgttagtattgtcaacatgtagagcatggacacctagagtaatacttacgcgtacttctagtactttgattgctccagttgcaacatggcctgtttatttttccttgtaagagccatcagctgtataatatgccaaaaaggaggagaaggtgggtgatgtatccaagccaagcatggaaaacatcaaaccctgtactcagcaaaattaaaacaccaccatgctatcaatcaccaggaaaattgttgggtatgaatgggttgaaggaattgatgcctccatccttttccgtcttcttcggccttaccaagagcaccacaagaaaatgcaaattagaaaaatgaataatactggaatagtgttgctgcatattatggttctattctgcacttgcctggattttgcctctacaaactgcagtctacagacattatgtgttgagtcctttcaacttgaagaattgactgagtacagtaacatagttcagggtgaagttgttaagttgccttgcacctgccctttttacaaagatttgacatctgcacatatttatctgtcaaacagcatggattgaatttgcaaattgcctttgcattatgagcatatacaatacccaggtcacaggctgcatcattcactatgttacatggtcctcagctacatcattcaatcagataagactggtgtagttttggctgctgccttgtatcaatgcaatagagtcctctgttctcccatcaaattatatctaatgatcattgcttcttttgataggacgagggaagaagtggctccaaaaccaagatttgcagattgttaaggatcaaagaaacattgaggaatggaagagccaaggcatcagtaccacaaggcatcactgctcctagcctatcagatgaaaattctatactattcttgtgctaatacaacaggattcctgggaatacaattcctcagcggtactgataaaccagcacaattgttactaaggacgtggtttccaagttcatagtagaaagtcatttaccagttatcataacaatcctcctcatagaaattctgaacatctgatcaccttctcaacatggcatgagtcgatactactgtaaacaaataagttccccttgtcaggtgcagtagaactcctgaacacccttgcttgcgacagttgcatcggtaaacaatatgcaatggaatccttgcgaatatataatctaacacctgaaaattaaagaagaaacaaagaggaaggggataaagaaaaggtcaacatgtgacatcaattagtgtatgactatttcactggcaggttgtttacagggtttagaaagcaacaggccagttgggtgttgagtctagtgagtgttgatgctaatgtgcagaaaataggtagaaagcaaacaaatataaagccgctgacacgcaagttgaatagggatggaatttgatgattataaaaaaattctcttagaaaacatagtgtagatataacactgtggcagcatttttgtcatcttttctatgtggcatttgcttaaaagatcctggaactacactgtctcatatcacacagaattgtatgcaaaatgaccatagggcatgcatgcacgttctctagtaattaccaggccatcattgctttggtaactcttcctcaccaaaccaccttgggggatcataaccatgaccacctgtttgttggaaaagaaatttaatagatatgatatgatgcaggtgcagactgcgactgtcaaagaaatcaaaagaactatgaaccaacgaaaaacctacataccaagaggattacaatggcatagacgccaagctgtcaagattgtaccctttgcaacgccgtattttttgtatgcttgcatagagtactggctgcaagttggcacataacggcagcttgagggtagtaagggcgatatttctcctgttcacataaaggagagcaagctatagagatatagttgatatcaaaaggcaagggcgcaaggccaatgattgctgcacataaatacaagatgaaaacagtaagaatgaacttacttttgtaaaattttagcatggatagtgccacattgactcccaagtcattgacttcctcttcttaaaatcaaataaagcacaaaatgcactcatatcgatcagttctatagttttactcagaaaaaaaaacacaagtttgtcttccattaaaataaagcccaatctgcaatctcctaatcccacaatgaattgcttagacttagtcctttacttaagtacgagatacatggattgggaaatttgcgccataatattccatgtagcctatgtacattttgctaaactgagttctgtgatgactcattatgaacttctgcagcacattttgcaggcattatgcacagccattcgcagtgtgtgaaagctcaaaacttagacacactattgtaccttgaaagtaaatgtggtgtgcaatgtacagcctagaaaggacataaatacttctacttattaaaaaaaagaattgaaatagtagtccctcatgtaagatacatcaaaagtttataaccacctcaagatctgagcctgggtataagaaatttcactcaagaataaaaaaactgtaaaataaaacatttgaccgctcctacaatttgccaatctccagttaccattagactaaccttcatcagcagcgcagtagacccgcatcgttgggatccttctcttgttttggtagggaacaccgaaggaaactataaatgaaaaaccaagaaaaataaagaggtgggagaactccagtctgttgatgcaaggaatgcaggattacacaaacagagagggtagcggaggagaacaaaaaagatgaggcataatgatgaaagaacacacaaagttgtttaaacacagtgaaattatatggcactagatagatcatcaactacaatttcctacatatatataagcaggtcagcaacgtcccaattaatgtttacaggcatctattgcaactgacggattgtcagtgttgcttcacaaagtaataaaccaaattaatcagcaacgtgcatgtgtgtgcatactgctagacacaattggccaataaggtagcaaagacgagtatataggggtagtccggtagatataacaattagctcgctcactgaattcttctgttcttcccatgcatcatcttgtactacaagctaattccattgtcagttggttaaatatggagtagtggatagctaattagacaacatggatattactagatcaaagaccaagttatcatacatatgcatgcgttggctggctcgccggatggatggatctagtttgatctctagctacttgttcagaaatcagaagaaggcagctgctcccgcctatgccgcccgccaactccagtacccccgcgcctccctacagacccgccgcctccccgtgctgccccatatctccccggaccctacgcaacctcgactaccacaagccccagcccacgccggcgccacacccagtgatcgatgcattcctccccgagtcggctaggagcgagagggggagggagactcacgtgtggttccggcgagaggccgcacaggcgagagaagggcggaggcggccatgcccccgatgtccggtggtcggagatttttcacagatttcttcttctctctgatttttttttttcaaaagaggagtgactgaactggataagatcgaacgtccctagctatttgctactccctccgtttctaaatattcgacatatatttaaccgttcgtcttatttaaaaacttgtgaaatatataaaaccatatgtatagataaaagtatatttaacaataaattaaataatagaaaaagaattaataattacttaaattttttaataagacaaatggtcaaacatatttaaaaaagtgaacggcgtcgaatatttaaaaatagaaggagtaatatactatataatatattttccaactacccatatatttctatcaattttttgaagatctatatatttgcagtgattttaagcagatgtttgttcgatttaagtgtagctacccatatattcctctgcatagaaagaatcacatgagacatactccctccatttcaggttataagacgttttaacttcttttaagtttgactaagtttatagaaaaatatagtaatatttataatactaaattagtttcatcaaatcaataattgaatatattttcataataaatttgtcttgagttgaaaatgttagtacttttttctacaaatttggtcaaacttaaagcagtaccaaagtcaaaacgtcttataacctaaaacggatagagtatatagctaaaagaaagccaattgaccttatcttctcaccaaatagaaaaggaaagaaagatagaacccgccacactcgttgtttcaggtgtcgcggcagtggcggaggtgtggctgatgggcggcgcagggcaaaggagcgatgtggcgtgggtggatgggcgatgcggctcgggtggcctggcctgacgcgggcgaccatagctgcatacacaacgactacgacaatggtcgacaacttccggatgggcgttttggcgttcctctctcctggatggctattttcaccaggattgtttaggctcagtgtagcatttgttcgaaaaagtctcttaatataggccagatctgattcgtctccctcaatcgtaaaaccagctttattgactcctctaactattgatatcgtttaaaatgactcccttggctatttctagagcggttttcactgatgtgacatccacgtggcagccaggtcatcacatcaagtaaaaatatagagtggggcccacatgtcatcccctctctcttcccttcttcctctacccctctctccccgtatcaatcttctttggtcttcgcaacagcgggcggcatcaggggatgggggtgggggaggaactcgagggagctggatgacatcgaacgagccaaggtgtccctctctccggtagcatcgatattatattctcatattccccacactcacgagcggtcggccacttccctacacctagagacaagttctccattggattctccactactacggaaacgattttctatacgaggaccctaataggttgcagtcggattgtaattggtcgcgtctgcaataattgaccttcattttagcgtgcggttccttaagacgcccgcatgtaaaaatctatttttgcatgtgagcctcttaaggaaccgattgcaatgagcctattttcgtatgcgggcctcttaagtggtccgcatgcgaaaatatcccctctcctccaaagatttttttctcccctcctctttcttttccttcttagcaacttgaaatttttttccacctcctatcctctctctcttcctctcctctcctctcttgatactattttcacctcctccttccttctttctttctcttctctcctctcctctcctctcctctcctccgagcggccgggagcaggcggtggccagctcgacgacctcgggtggttgtcgacgacaacaaggaggcagccgggagcgctacggccaggagttgctgcagtgggcaaggggctcctcctccaccaccgggcaggaggcgtggcactgacgtatctggcaccccctctccctcccgcgtggatccggctgctgctccgcccctacacacgtggatccggcggtggcggggcggatctggcgcaggcgataacgagagtggcggcggtggcggtggctgacggcgggagtagcggcagtggctgcggcgacctcggcggcggcaggcaagggcaatggctacgaggattttggtggtggcggctgcgatgacctcggtggtggtggcctcagccttagacggttggcaagcgtggggccgccgctggcgaaggagtggggagtggcggggctaggttttttctttttgaaatatttttcacgattttttgttgtcgcatgaggtcggcttaagcacctgcatgtgcaaaatcgtatttttgcatgtggttgtgctggccgtatgcaaaagtccgattttcgcaaaatctttgggtgtaggtgggctgcccgtcaacatgcaaagttcgattttggctgcaaaccgaattctgtagtagtgcgcgattcagcggttcggtgatgccgccagtatggcggatgctctctgctcggctagaactagtgagcgtacgtactcctctcttcatgcgtcttcgaggattatgggtccgtgtccagtggcatctgcagcaagcagtccttgcctgtcatgtcggtcttcctcgtgctcataagcatcagtgatcatctctagcttgatgcatgcggatattggatcgcgtagatatatatgtacaggacggatggagtatgtcaatgtcaggagctcgatcgttcggcatagccaaagctcgccggagtatggccggtgatccatcgatcctggccttgtacaagcaagggtcaagggggctgatgctgaaccttgtcttcgccggcatgcattcgaactcgagcggccggcggcgatggaacatgcaagcagctagtcgcaggtcatggaccccgaggcatcttcctgatgctggtggccaacgtaaatactgaaaaagatcgatacgggagctagggagatggcagagaaagaatgagagaagaaaggggaaggaagaagaaaaatgtggcactgatatgtgggtctcacatgatgagtcagctagttagactgaatcaaagcgccgtcaacaaaacagctttctaaaactgcatagagagtcacgttatactgtttcaatagttgagagtttaagatatccggtactacgatttagggatatgaattagattgaaggtgagagtcaaagtggacttattccaaaaagatattcgaatttacaatgtgcttgataactatcttttttgtcgagtttctaagtgttaaggttttttccttgttattatttggtctgtcactaccatcaaaagtacctcaagtttgttaacattaataccgtattgttcatatcaaaaggttgttcattttattgctaaaattaacccaaccaagttttaactttaccgacgtttgggaacgtaacaatctaacattaccaattaccaaaacttgtttccactaccaaagtttggtaattttagaatctctctctcccaaaaacttaacaaaagtaacaaactaaacacaacttacacttctcaaccttatcaaatatgggaaatgccaaaatttggtaggctaggttaatttatttatgcatcaaagtcaataacccccaattttggtaagacagatttattgatgttacgaaattttgataattcagagaaccgctgagcagcgccatgctgaactattgataatatctttgcatttttataaacataaagtattcaattgttttcaccgagtctacatgagtagggtttcggaattttaaaatataaaatatgttaatactccttccgtccttaaatatttgacgccgttgactttttttaaacatgtatgaccgttcgtcttattaaaaaattaagtaattattaattcttttcctatcatttgattcattgttaaatatacttttatatatacatatagctttatatattttacaaaagtttttgaataagacaaacaatctaacatgtttaaaaaagtcaacggcgtcaaatatttagggacggaggaagtaatattctatatgtgtaatggtggttatgcatatgatgcaagcgttttggtgttgggaagtggacaagaaaacggttgatcacttttgtcacctcccttgcatgatcaaataaaatcacttctctgccagaacgtactgtcactactagagaaaccatctttcatcggttgccaaaaacaacaatagtcccggttgcttaaaaaaccggaactaaaaagcatttttagtcccggtttaaaagtgcaatgatctttagtcccggttagtgttaccaaccgggactaaagatcatcttttgtcccggtttttttattggcacgacgtggcaggtctcctaatatttttaatcccggttggtataaacaaccgggactaaagatcagatttttagtcccggttgtttatacc

SEQ ID NO: 10089 - DNA, 16056 bp, Oryza sativa
catcgaacccgagggaggcaaaatagacttttgcggaggaattgatttgggaaggatttggattcgggattgaactcggcgatagatcggggatttgagatctgagatggcacggacactagacaacaagcaaagaaacaaatttcgcaattagggtttttaagagataattttcccgctaggcgccacgacagaacgggcgctacacatagtagttacacgcttgttatatattagttatatagtacttataccctagttatatagtagttacatgatagttaaagggtagttacatttgtataaaattagtatttgtaatttttttcaagagcatgtgttttacttttgaattatttttccattatacatgttgaccaatttcttaccgttcaatcaacttggatgctaagattagtggtttgtacttgtgtgtacccatttcaaaactgttgatgacaaatcatatggttaaaaatttgaaagttttgagcctcaaaaactatcgacagattactagctagttccattttttaacaactccaagcattttaatttcctcgtttttcattatcatatttctcaaacaactaaggttgtgttctttcccatgggttcccaacccatctcctttgttttctgcgtgcacgctttttaaactgttaaaacagtacacattttacaaaaaagtttataataggagagttgctttaaaaaatcatattaatctattttttaagttttttatagctaatacttaattaatcacgtgttaatctatcgctccgttttccatgtggaggggaggggttcccaatccctccaaaacaaaagaacacagcctaaatatgtttcgtataaaaactttatatataaatatttcttcaaaaaaatcaaataattccatttttaaaatttatattggttaatacttaataattataagttgtaaaaatataataaatttatctgtaaatatacgtataccaattaaagtttgattttttttgttataacttgtagaactcgaatttgaagatacatgtttgttgagttacatattacacatgaatctatcttgttgctttttaaaaaaactttttataaccattcagttgatatgaaataaatggtttggtgtacatcaaagtgattaaaattgtttcccaaaacatatttgtagtctagtttcttccatgattccatgattgcgggtgtatgtgttgacatgtactactactctacttgcgatatactataaggttgagttatacccaaaccgattttaccgtatggtgagttctatgaacgataatttcacgcttttcattagcatatttttcgaactgctaaacgatgtatttctatatacaaattttacatattctttaaaaattaataatttttttaagcttgtaataattaatgctccacttattatatactaattgttggtctcgtgtcacgtgcctccaaaatccacactcaattgctgaatcgaacacacccctagtccgggagggttgttgggctatgatttttaagtgccatgcgaaactaacaaactatttatacatgattaattgagtattaattattacatacataaaaattatttattttatttattttaaaaaacttatatattgatttttatggaaaatattgtgtgccttgtatgatttctttgtgatgtttcactcattgggacttaatgttctatacagtggttgttggtactgcagttagtattttctgaatgttgtatttctctacaacattttataaaatgaaatgaaacgttttagtatgtaatgaaacattgtttttactcggaggtcgaccaggaggccgccacgcatgctaccatttcagggtacatcgcctactacacggccaaccccgagtccttgacaccttcatgcagaggtcctcagaggtgaaagactgatagtcaagctactagagagagatggaaaagagaggagagaggaagagagagaaggggaagagaggagagagggggttgggcatgtgtgtcccacctactaacttagcgagtcaagcgtgcttaacctgctacgttaatagaaaccgcttcccaaatcatggaaggagtcggttaacaccggcttttgaagaccagggagagttttgcagccaagagagacaatgtaatcatgagcaagagataaaggaagtaaaatagacttactccaaacaaaggcgggcttcatatccgggcctctccaccccatctaggattggaataagttcacttggtgaccctcaaaagtgatcgaaatctaatccgtgaccctaaaccacgaaatcagatatcttgaccctccaactcttaaaaccagtgcaatttaactccctcggtgattttggagagcggtttcgctgacgtggtgcctacgtagcagtattgactcggtcttctttccacgtggcgttgacgtggcgcttaggtgccattagaaataaaaaatatgtgtagaacccatttgtcattcaccaaaagtatgggtgggacccgctgacatgtggggcccacataaatcatcctcccctctctctcttcctcttcccttcggcgagccgcgagcatggggacgggggccggtggcggcggcagcggcaggatgtgctttcacagacccaaatctgccatggaagcccaaaatccctgcttccacgcaaccgctcgcgacactcgacggcagcgcagcagctggaggacaaggaggttgcgctagcgaacgatgtgctccaggcggcggtgactacgattatgttcccagcgcggcgacgcatctagagctcgggcaagctagctggcacccaatccaccgcggaacagatccaggggcgacaaggccggttacccggatgagcggatcgagcaggaggcggcggcggcggcggcggagtgtgatggggccgaggccgacgttgtcggatggaaggtgaagaggcacgccgccggtgccagcgacgacgacgacgggggcggtcacggtcgcggccgcgatcccgatggcgctgccgatgatgacgcgggatggctccccggtgctgtccggcgaggagcaggtcatatcctccagctcgtcccctgagcccccgctcatgctgccgcaggcgccatccggctccggctccggcggcgtcgcgtccggtggcatgcgggagaacgcgcagctcgcacgggagctcagccagatgaggaagctctgcaacaacatactcctcctcatgcccaacagtgcaagtacggctccacgcagcagctcgacaccgccaacgcctcctccgcgccatcctcaacctcatgccttcctgccccggcacgaagctcttcggcgtctccgtcggccggaagcgaatgcggcacgacggcggcgacggtgacaatgaccacacggcggcggtgaaggtggagccgatggacgggcgggccgcccgccgccactccggccctcgccgcccgccgcgggagagagagaggggggagcggcgaggagggagaaggaactggagggggagagagagaagggacacgtgggtcctacaatttctttcacgtgtcaatgacaaatgggtctcacacatattttttaattctaaatgccacctacatgccatgtttaaaagagtcctggtcaataccgccacgtaggcgccacgtcagtaaaaccgctctccaaaaccgtcaaggaagtcaaattgcaccggttttaaaagtttgagggttaagatatcggtttcgtggtttagagtcacggattagatttcgatcacttttgagggtcaccaagtgaacttattcctctaggattcccggaagttctggtctattaagaaagttcatgaaggcccaataacgccataccatatcacatgcagtttggagacccggcccaactcaatcccaacatggtggcaaagaaagtagtaaagaaagaaaaggcagccttctaagcactgaccgcccggacgtactggtggaccgtagctagtgactgcattttaatattttgccataaaggctgtgattagatctaaacttcagttcttttctatcacatcaacctatcgtacacacataacttttcagttacatcatctccaattttaaccaaaattcaaactttgatccaactaaacacagccaaagttagttactgcatgatcgaatacgaaggtttagcgtagtaacttaattagtcatcgttaacataacggacaagctgcctaggtagcttactctacttagaaaaagcatttttcagacgtgagggtttttattttcgtaggtggatatggctctcggacccaaatgaccgtctacaaaaatgtaaactgaggtgaaactcgctgtccgaccacttaagcggtccgcctgtaaaaataccatttatttttgaaggcggacctcttacgtccgcctacgaaaataggcgtggaatataaatggaccactcatcacttagattttttctaagtcctcacctatcctctccctcaaccggcctctcttctccctcacctctctccatcaaccagccctcacctctcctctcactcagtgacgggcgttcggcggcggggccagtaggatccgcgacggcgaggcgcggggtcggtggcagcaacggcgaggcgacgctcgggggcagcgcaccctcggcgcggctcgcctcccctccctcccagatccagccaaaggggggagggggaggccagtggccggtgacgcgaggcggaaaacagaggagggaggtcggcggcagcgctcctacctcccagatccggctgtcggccctcctatcccggatccagaagcgtcatgggggagggtggcgacggcggctgcatgcagtggccaaggtcagaggtcgtcggcgacgctcccccctccccccctcccctccacggcggcagcgggctggcgcggtgagctcgtggcggcgcaactcccctcccctccctctcccctcccaaaaccctcatgatggcatagctcgtggtggcggtggccggaggggagggcggccaaatattttttacgctgaaaatattttcacaggtgggtggattcagccgcccgcaaaaattattgattttcgtaggcgtttggttgcggacagaagttatggacgcctgaaaaatacgttttagccgcctataaaactgttttttttccagtagtgttacttacgtattcatcaattaatcaattcattccaatgcttgaataataatactactgcatgtccgtccaccacttatagctacttaaaaagtggtgacaacagtttacggatgaaactaattttacgggtgtcacctgcatagtaaaagaccatctagcaaggcaactactcccaccgttaaaaaaaaacctaatactaaataaatatgacataataaatatgatattacagtacaacaaattcggatatatctaaaatatgtcacatttagtaataggttagttttttatgggacggaaggagtactctctaaattatcaaattatctttataagctgtgtttagattcaggggtgaaaagttttagcgtgtcacatcgaatatacggacacacatttaaagtattaaacgtaggctaacaacgaaacaaattacagattccacttgtaaactacgaggcgaatttattaagcctgattaatccattattaacaaatgtttactgtagcaccacattgtcagatcatggagcaattaggcttaaaagattcgtttcacaatttacacgcaatctatgtaattattttctttttcatatatttaatactacatacatatgtctaaacattcgatataccaagattaaaaaattttgccagaggattaaacaggccatagattgtgaagcttagtaggggtataatagccttgagatgctaaaaagtcaaagtcaaacgcacgtgcgtgtgcttgccgatacaaaagtctactggtagcacatcatctgtatatgactgtcttgcgattcaaggaaaagaaaataaactttgtgtctcatttcaatgaacctgaattcgatgcgtgtacacctggcgatattcttctcaaaaaaacaagaccagtgtccaaacgatatgattccaaatctcacgatatataggaaaaagaccaaaatgaaaaaaaaaaataacaaagagagtgggtgtgggtcagtgataagtcatcatacaaaacatggtgtgaggagtccaattgaagtcattattttattttatcaaaaaagaatactacaaagcacctatagtagattttggcaaatcttataattacaacacagtattattttattgcatactagctcttgtgccattagtaactgataagaagacggataaaaaatatttctaaaatctattatattattaagacagctcaaaaagaaggcaccacgttcgctgtagaggctaaaaattcccacattaatcgaagaaaaagaaaaaaaatctacaccgctagatcatgacagacttatagtttaaccgttgagattgatcggaatagtataagtaagaaagagtacatgacaaatcctactcaaactatgtaaaaaaaaaaactatacagcaaaataaaaattttgttcggactgtgatggcccaaccggacagagggttgacaacgtttcttttgtccatggagaaacttaccaaaaaaaaaaaaggaaaatcaatctgtttccatggcacttaccgcatacaaccaaaaaagagacctgtcagctaacaatcaaactcactcagccaaccaatgcctcctttccttgcacagcagcgcgtgatttaatcagccacgcgcccacacgatgtcattgaaaggcaagtttaatatgatcaaaattttgttaagtaagaagttaaattgttttgttggttgtagattgaaagataaaaatatattcctaatttttcttgcatttggagataattttatggttaaataatactataaatatcaaatattacatatgaggtatagaaattatcaagacatcaagatcaaggtcagtatttggcagcctgtaatgttcgatcatcaattctcgaccatattctatctaagaattaattcacatttgcagggctaaaaaaataccacatttaatcaaaagaaaacaaacatattaccaagggacggcaaataaggcggcattcaacgacggcttgcaggaattttaaaaaaattataaaaaaatcctatcaatgatatggatattaccggtgtagtgagatgacaaagaagagaagcaatgggcaagtgagtgtgtgcaaacaaatgagataggaggcagttgccacaggaggacatgccaagggtggtaaagtaaataaaaaataattataagagttcaagtaggattacaatttataaatgaaagaaatatcacaatgagaaatatttatttttgaaaaaaatagtccatacagaacacaacaataacaaattataataaagatgagagaaacaatagacccataaaaaattagagtggtgtaggtagatgggacatgtaaaaactataaataaaaccttaaatagaatctgaatgataattaagaggagggacgacgagcaggtcgttaagcagcatgatctcgacgattggagggatttctagaaagtaaaaaaaacccctcaattattatcatgttcgattttcaaatctcaacgataataaaaatgggaggcagcaggcgggccatagagaagtatagtagcggcgtttggtgagacttctaaaaattataaaaatgaaacccaacaatacaatgaactctaaaaccacaaggtcaaatttgtagaggtttcagggaggatgaatgaaagcattggtagatcgagcaagtaaataaagcgatgacaaagaaataaggcgtagtgattagcatgactattaaaagcaccggggtgataaagtcggtttttcaatgttctaacataacgagatagttatttaacaaattttaagtaaaatcatatgtaaaacatagataattttatatgggtgttagccgcgcaattgcgcgggccacccagctagttattcttcatttaatatataatcgatcactctgtatttttaaattaaaaaatcactttgtttgggaaataatcagtatatatttatttatttgtatattccatcgtaatcaaaggcattggcgcgcaaacgactttgggtgggggcgacgaccaataaacaagacgaggtcgagttgagttgcgtcgcgtcttcctccccgccgccgccttccttgaacctgtctccattaactcctccatgtctccattgtctccctccacactaacatccactattatcggatcgcaagaatccacagcccggccatggccgccgccgcgccgcagctggaggaactcgtcgacctcgagcccttctctccgtcgctcttcctcgacctgcccccgacgccgcacagcgacgaccccaacgatgacgatctcatcctccccttcatctctcgcatgctcatggaggacgacatcgacgacaagttcttctaccagtttcccgaccaccctgctctcctccacgcccagcagccctacgcccaaatcctcgacgccccatccgacgacaccaccaccaactcctccgacgactccgcctccgccaccaccaacaacacaaccaactccgccgccgccgccaacgcctcctggccctacgaccccatcgagctctctcagctgctccaatccccgccccaccccgtctccgacaaccacgacgccgacgtcggcgacaccaggagcgcgccggaagacgacaaagacctgaaacttctgttctccgccgccgacaacatggagatgctcaacatggcgttcctcaagggcagggaggaggccaacaagttggtgcccaccaacaacaccctcttcgccggcttcgacggcgcctcgctgctcaagacggagccggcggtggatgagcccacgttaatgttcggacgaagcggcggcagcggcaggggccggaagaacaggcacggcgaggaggacgacctggaggcggagaccggcaggagcagcaagctgatggtgccaccgcaagaggccaccgcggccgccagcgagatgttcgacgaaataatgttcaactggtacgaggtgatcatgaaagggatggaggagctgcgcgtcgccatggacagcgaggccgagaagaaggcccggaacggcggcggggccggccggagggcggcgcgcgcaaaggcggcggtggtcgacctacacaccctgctcatccactgcgcgcaggcggtggcgacgagcgaccggcggagcgccaccgagctgctgaagcagatcaagcagaactcgtcggcgagaggggacgcgacgcagaggctggcgtgctgcttcgccgaggggctggaggcgcggctcgccggcacggggagccaggtgtacaagtcgctcgttgcgaagtgcacgtcgacggtggacttcctcaaggcgtacaagctgttcgcggcggcctgctgcatcaagaaggtgagcttcatcttctccaacaagaccatcctggacgccgtggcggggaagcgcaagctgcacatcgtggactacggcctcagctacggattccagtggccaggtctgttcaagtgtctgtcggagagggaaggcgggccgccggaggtgaggattacgggcatcgacttcccgcagccggggttccggccagccgaccagatcgaggagacaggccggcggctgagcaactgcgcgcgccaattcggcgtgccattcaggttccaagccattgctgcaaagtgggagacggtccgccgcgaggacctccacctcgaccgagaagaagaagaagaagaagaagaagaggtgctcgtggtgaactgcctccacttcttgaacgccctgcaggacgagagcgtggttgtggacagcccgagccccagagacatggtgctcaacaacatccgcgacatgaggcctcacgtgttcgtccagtgcgtcgtcaatggcgcgtacggcgcgcccttcttcctgacgcgcttcagggagacgctcttcttctactcgtcgcagttcgacatgctggacgccaccatcccgcgcgacaacgacgagcggctgctcatcgagcgggacatattggggcgctgggccctcaacgtcatcgcctgcgagggcgcagacagggtggatcgcccggagacgtacaagcagtggctggtgcgcaaccaccgggccggcctcacgcagctgccattgcagcctcaggtggttgagcttgtgagagacaaggtcaaaaaactctatcacaaagacttcgtcatcgacgtcgatcacaattggctgctgcagggatggaaggggcggatactgtacgccatgtccacatgggtagctgatcgtgatcacaaatccctcttttagttcaagatttaattatctgcttcaattacttacaaattgagaactagatatatactcctacatgatataatatcttcatttgcaatgtagagctagctacataagattttgatatatatatatatatatatatatatatatatatatatatatatatatatttccagcataaataaattgagaacttcatttttttttttgctactatagtttaggcctgtgtgctcttctgtttgctgacaatctactatagtgttttcactattgtcgtgtttgatgatatgttctctttgtcatgtttaattcacttccttttgtgtacgcaaattcttgatacttcccttctttcaaaaaaaatcttgatacttccatttccctggcaaaagtataacagttgcatgattgagcagtgcagtttgttcaccaattattcaaagtgtttgaggtgtgtatcgctgtcttactttctaatattaatggtttgtgggccagtacaactcttgtgtttgtatggattcactcataaagttgtgatatatgttccaaaaaaatcagtttcaaatctgacaacagttaaacagcgatactgattaacaaaaaaagggtgggcggtggggtattcaatgtatatatctgcatgctgtccgcaaaataaaagatgtcatacatttcccgatgtttcccacagtttcattttgacaggcagttcttgctggatatccttgtatttgagtcagacaagtacatcaaaaagaggttaccagattgaagacatgttaattttctgtaaatattgttgagagttgatcactgggacctgctctgtgatatactcctatttatgtgaaattgacattgatgattccaaaataaaaatggctgcttagtttgcaatataatagatagatcttttcttttgacaggatgttattaaatcttgatggttttttttttttgaactaggagagcatattaaatcttgatggtacctgagaaaaagtccactaaactagttacaaatattcaaatttgttgtatgatagtcaattgttggtcaatagcttcatctgttaggctgcgttcgttccttgggcacggttaattaagtattttaacataacctttgaggaacattgggccaaaggttccctgcaaatttctatacgtgtttccttacaaattctagtactttacatattcctgggttgtgttttctttgattactggcaggtttgaaatactgctagtttggtttatcatgcattccatgtgctgagatagtttgataattacagactgatgtagtaggtgcagttttatctgtcttttgcatttcagaagcatagaactgttttttttcttatatatactggggctaattttactaaacaggtatttggtctagtaatttcacgctgcaacactaaacaagcttgtatagctgtgtttcagatagaagtttgtgaaaagattagcaatttgttggagaagttaggtacaatatcaattttaagctagtagagttagggggtgtttagatcccacccaaaaattttacaccctgtcacatcgaatgtttgaacacctgcatgaagtattaaatatatataggctaaaaaaataactaattgcacagattgcgactaatttgcgagacgaatcttttaagcctaattactccatgatttgacaatgttgtgctacagtaaatatttgctaatgacggattaattgggcttaataaattcgtctcgcagtttactgacggattctgtaattagtttttttattagtgcccaaacaccccatgcgacatcctatataatatccgatgtgacacgccaaaactttacaccctggatctaaacaccccccctatattctgtaaaaagggatgtgcatttcattcatctttctgacatgttaggtaggagtaattcagtaacaagatagcagttagagaatctccaacaacctttctaaaatagactctccgaacatccatatagccagctagctatcctgtcgggtcccaaaactaacaacttggatccgactgagattaatgtatcaatccctggatcagtaaaaatcgatacatacaatataactggttcttcattgcatacgttaaagtcttacaatactaagggttttacaataataggtattcacccatctaattagtacacagcggaagtttctatacattctgactagtgaggtataacctttagggattttctaagttatcagggtctttgtagtaatagtcataagggtcctcctcttgacccagatatgaaaaaggaggttataagagcaaggatgagtattcacaatactcagcaagttatcacggaaatatgttatgcattgacatataatagggttctttgcaaaaagcagtattggacaatctggaaaagcagaatttataaaacatataacctttagatttccaaccagggtaccatatgagtcccggtactcaactccatgagtacgtgtcatgccccgaaccagtcccgaccggaactagcccgtgacgctccaaattaacctgttaatcgataccagtcccaggaaacagtgctggtatcacagggagacagaatatcacagcaacagaggtctctttattatagagtagaggtatagtcatgttgggctgtggacagatcccgagctcacaactgcattacataagggaaacggaagccaggacttggaccaaccaacacaggcgcgacttgggaactaggccgaaaccctaaaactcatcgtagccggcttgctcctggaagaactcctcatcagcaggatccgcttcatcttcttcagcaactgagggggggggatatttatatagagcaagggtgagtacgggaatactcagcaagccatgagaaataagtgtttaatgcaggcttcaaggaaaggctgttgtttttgcaattgtttttatttgaactcctttttgtaaacaactaagtgagtgcttctcaaacgacacggatgagacagtgcgtctcgtccagtcggagtatgtgcaatgtatcagtctttagaaatgacataagatcggcacccggccaatagcttttcaaacagccacccgggccaacaactttcaaacggccacccgggcctagctgatcccatcagctgcaaattttccaaacatcgatcccctttccacaacagcaatttcacaagcagtagtcaaacaaaactacgctaggaatcacctcacatctgcccatgaccgtgggcacgactgttcgaacagtttgttaacctctgcagagggggtacactttacccacacgacattacaaacccgggtcacccagcccgtggggatcaaccacgtcgggagacctccaagctttcatgacaaggcatttcgaaagccgacacaggtttaccatatgccgacgagaggggtcccagaccaacaacaggttaggtcccagaccatactgtgccaggaagcccaggggtcctccccgacaccaccccggcgaatccacatgtctctcggcatcaaggctcccctgataagctagttactccgccaggggtgtcccattccacccatgtggtcgtacttgacttatgtttggatgaaattccaaggaatcggtccttaagtgcgagagcgggaaaccgtactcccggtacgttccccggtccgcggttttggaaattcatttagttcgcaagcaccgacccaggtgtcgggttttccaagccttttgtaaacccaagttttacccaagttgtttttcagattttaagtttgaaggcgtccgtcgatactcgcacagggtgcacgaatatcgagacgcaactagatggttacaaggggacatgatataacaattaacaaagggaggatcaatgcaacaaattaggtaggtccgctgatctgcctagcagacgggacgacagattaagtgcgatcctatcaatgcataatatttttcaagcaacataattaaatttcaaatataggctcgagatgttcagaggtggcttgccttcctcgagatctggagcttgatcctcgaaatcctcgcactacgggtcttcgggctccgaaactacacgcgaaatgggacaactcaacaaacggcgaaaataaagctctattaatgacctctaagcgtgccattagatagatctcgagatttgaggaattttggaagttgaacgtagtcaaacggacttacggttgggaagatattgaatttctaagattattggatttttggtctaaaggaaaaggatttaattaaatcctttttggaaaagaaaaagaaaagaaaagaaaagagggagggattatagacttttcctcgggcggctagggcgtggcccaagggaaaaggagcggaccggccgagctaaatgggccggccggcccaaggcggcccaagtgcgcgcgcgcaggggggaggagaaagagggccggtggaccgggctcaccgtgcgcggtcccgggtgggacccgcttgtcagcggctcggctcaccgtgcggagggagcacgtggcgcacgcgcgcgggcgggggagggacgcggtgcacgcgcgcggtctgcggaggaacggatgcggcgggcccacgcgcagcctcacggctcgcggtggaacgcgcgcacgggaggggctgaccggggtcggcccgtcccgacctcggctgagctggcgccgacgtggcgcctacgtggctgccacgtgggccggcgggaggtagacgacgacgccggccggaacggacgggcggacaacagcggcgagcggcggagcgaaccacggcgatacaggcgaaagcgagcacaccgggtggttgcacgagacgaggggagacgagccaacggctcggattcgcctgaggaagcttgacggcggcaaatcgcggcggcggcaactggcggggagggaagagggaaacggcgacgaggtcacgaggggccgattcccggcggtgagagcatctacgcggctacgggaatccgatgctagcgtcggattgggcggagctacgccgagcgaggctggcgacgagcgggtgctacggagctcgagcggcgacggcggcgagcacacggcgagcgacggcaacggtcggggcggcgccggctagctacggggaggctactcgtgctaccaccgaaaactaaggggggggagatggagcggggaggaagaacggagagaggcactaccgtgcgggtcggggcgcagtgacgagaggccgacggcgcgggagtaaactctccggcctcgggccggggaagaggaaggagacgagcgcccggagtccccttccgcgtcctcgctcgtgccggctcctccgacgcgcgcaacgacgaacggcgacggcgaaacagaggggcgacaacaatggagtggaggcgatgggacaacgagaggagaagagagggagggcactcggggctttaagggcggcaatgtcggtttggaaaccgactttgggcggtcaaggcgcgagctggcgctcggcgctcgcgtccaaatcggcgacagggcggagggggg

SEQ ID NO: 10090 - DNA, 14515 bp, Oryza sativa
ccatttgcgggagaagcagccgaggtggtggctgggcccgtgccggggaggggcggcggcagccgggcccgtgctgggcgggggcggcggcagcggccgcggccgggctgtgccgggcaggggcggccgcggccgagcccgtgccaaggaggggcggcggccgcggctaggccgtgccagggaggggcagcggcggccgggcccgtgccggagcgacggcggccgggcccgtgccggaacgacggcggccagctcgtgccggaacgacggcggcccagcgcggaaggccgcgcagcgacagctccatggattttttttcttttttccttttcgttgtgtgaataatttgaataattgtttgttgatttgatccgtgatttgagaatgatgtgtgaatgatctgtgatttgttgttgtggatgatttgggatgtttgagatattgggttgttgctgtggatgatttgggatgttgagatgtgtggatgattttgggatgtttgagaatattgggttattgctgtggatgatttgggatgttgagatgtgtgaacaatatgtgatgagtgacgtgtgaacacaaatatgtgatatttggcgctagaaaagaaaaaagaaaaaaataacttttgtaccggttggtaataccaaccgggactaaagatactatatctttagtcccggttggtattacgaaccgggactaaagatctatttttagtcccggttattttaaccgggactaaagatagacatttttagtcctggatttgtagtcctggttggaaaaccgggactctagggggttcccaaccagaactaaaaaatgattctccagcagtgtgtacctaacatgatcaaataaacgttgaactttgtatcatcaatgttctatcagcagaagtagtttaagcaagttttttttcctcgtaaacattcatggtgtcagaaccctgatttttgctatatatgctttagtttgcagtatctaagcgcctttttctgcatttgtccttatactattaacagatagtcacatggtcgtcacatcacccccaacaaaacccacatgctaatgcatgataacatgcatgcatgtggagagactaaacaatgcaatgtatagtcaaatgagtcatcaaattccttaatcatgtgttaattagcacaatacaacatgcggtgcgaaactttcggctctgtgtcattgaaaacatctgcatgctagctgattaacatcatgcagagtttgtaattaaacataaacatattaattatgtatacatatctgcctactttttttttgattatcaacatgtctctatcactgttaagcaaattttcacctgtctattactagctgttaattaattttttagatcccctatctgcttatacgtctcgattgggaggcaaaataatcccataaaattagacatgtaccaaacacttttgagattccgaataatatataagagttgccgctccgctcctaaaaattacactaaaaaagtggagtggcatttctgctactcctcacctccactccaccctagagtaggagctctataaaatataccctttactataaagacaacattacgatatggcacttatactaagaaattataccataaaatatgttggactaaggtataagatattgtctgttttaatttttttcttcacatggataaactgtagaaacaattctaattaattaccagtaccgtagtggagcaatataatttaaatcatacaaaactatgcaatgttaatggtgtctacaatatataaaacatttccattgtctaaatttaaaatcgtgtctatattcaagtaattcaaactaactatttaattggacaaatgagttgagttgatattggcttgttacgtttggtttggttttggttttggttttgatgaagacatgaaatgttccaagtcaaattttaattttttttgaacgttctatctttttgaataggagtatattcaggttatattcacaggaatcatatgagtatctaaatttgttttaaagatatagttttcgtaatatcataatttcatcaagacttagatataataataattcaaattttactctatcggtttctagatataagtatttcaaaggattcaaaaatcgtacacaaatataaacatagctagagtatttggtgtctcatcaacctccactcatttaaatttctttccatactagtacatgaataaccaaaatgacaaaacgaatgcagtgagatgcatgcatatatatgattccagttcaatgaaccttttggatccatggtactgctagctcctactccctaggttcatgtcagctagctcctagggtgtaccatttgatgcttctgactttttgatagctggattagtttaaatcacgattataaaattatgataaaataattaatttttagaggacaaggtagttaattaccgtggattaccttgaagaatagggaatcagaaagacacaaagccctacccctactcagccaggacactggacttcctcgccatcggcttgtgattcatccatctccttcccctcgcgactcgcggattcttgcaagcagcgagactcttacagcttccaaattcgcccaaattaagctagcttcgttggcgctaaaatttttcactattattgcaagaaagaaatagttttacaaggcaacagtagcacatccggcacaagcactgcttattgttgaaacccaataatcgtttctaattagccaaattgctcaagttccacccgcaataacgcaaagcagagggatgttccacttccgagcatctcctgggcaatgcagcatgcatatctagcagctcagtacaggcgttggacaccttatcccacaacaaggcatgcatctcttacacagcaccaaaaatatagaataattaattcgattgcttttctttttatagggatcagaagatgagcatccttggctggttgcctttgcttaatttggctttaatttttctgggctagaaccgaatacaattccttttttctccatatgaaaaaaaagagagatcttaattctgttacgaccggtgtagaaatccttaacactccatctttaaaatcagtcgtggattagatccattttgcaagtaacaatctttaacatatccaaaagatgcaagaatttctatagttaatgaagctgactttgttgatcaagactctaaacccgtgctatgcatatataggctatacaagattctaaactaatttaattttatgtagcataataacgtgctacagatcattaattgtatattctcgcagtatattatcttgaagtttgttatgtagtcgaactttaaggagctgcaggtcacttcaggatcaatggcacccaagtacccaaccaagaagtactacgatacaaaacttaaagcttgcagatattagttaatactacattcgtcccaaaatatagcaatttttaggtgttcagatttatagctaaaaattgctatatctgtgtgtttagatttatagctaaaaattgctatattttaaaacggaggtagcagttatttgttttacaagcgagagatatattaattatgatagcatgattaccaaagtttctagctattattttttaagaatacaacgttattatgatgttcgatccaacacgagagggatctaataagatcactttggacaagcagcatgatcgatgattcgtacgttggagtataaagaaagtcatcatcagttaattatctggctatataaagagagagagagagaggtcgatcaatcgaagcaagcaatcaagcatatgcatccgtggatctaacactactgtatcaattaagtagattctctatagcacttaactgcattgtagtactacactgggtagcaagatgctcggctaattactactccatccgtctcaaaatatcataataactttttcacctacattatcttctcaattaatcacaaccttacaccattcaaattcttacctactttcttttcttaatcaatcacaaccatccttcatttaatctcacatatttttttaatacctatacataagtctaaaacttcttatattttaggacatagtttgtgctagtttaatactacctccgtttaggttataagattttctagcattacacacatttatatagatgttaatgaatctaggcacacatatatgtatagatttattaatatatatatgaatgtggataatactagagtcttatatataatatgaaacggtgcaagtactaatatgttgagcaaatgaatgcaacaaaattaagggacccggcaccatgctgacccctattttggagacacacacgtacgcgtggcaagcaaattaaactggttaattactcctatcgcgatcctcatcatggccatgcatggggtaacgaattaattaagctgctggcttgggtatctcactataaatacccaaactggccatggtttaagcaaaaagctagctactcgattcattcgccgctagctagcttttgctttatcctccgaagagaagagggatcgatggaagaagttgagagtagttatcgatcggagatgatggatggcgaggggtggaagatgatgcagcctaatactaataagcagctggtgcagatcaagacgaggtcgtcgtcgatgcaggtggtgaaggaggagatcgaggaggaggaggtggcgggaggaagaggccggagaagaggagggctgaggcggtcggtatcggggagggtgagggagcagcgcgcgcgtctgtacatcatgcgccgctgcgtctccttgctcatctcctccaccttccacgactagctctacctctacctgcgccactattttttttttcttttccccttccttttctttagctgcttctgggctgggccttcaattatgtactgggcccggcccaactccatcttgtttcttttcttttctatatgtaactacgcttttttgctttgtttgcctgacttagctgggctgctctctgagagatgggccactgttgtttcgatctgcccatcctgatctgcatgccctgtctgtgtagacacatgtaccgtcctgctccttaatttggcagtcaaaataatttgctacaatttgaaagatatggaaagcacagcaaaatatgcatctaaacttttttttccaacaccgtatcgaaacatttcactctcacgcattaatcacctaattttaacggttaattagttaatatatataatcatgtgagatcttcttgttaatatataattgtaataaatacaacggtgtaatcggatcaaagttcagataagtaatttagaagaacatatttagtttaagtaatttatagaggaaaataatatttaaagcttcttaatggagtgttaatcaatttgatcctgcaacttacaaaatatataaattaaaagtcaaagagccgatcgactgacaagccgatgtagcaatgctaaccgatgtcggtaccagctgatgttgatagagttttgagcaatcagctatatatgtccaatgtagagactgatacttgagtaaataataatataaagacaatcagctaatgataatataatataacaataatataatttactagaaaccaatcggctaataatgatatgatagaataagcgttgatccgaaggttaaagcatacatcgctgtaggtccgatgtcattaaatccaaacgattagataaacagtgaaacttttgttccgatcggctaaatctaacttgtatataatccttataagccgatgcaacgtaggctagagagaaaccccgatgaaacccttgtatatcattataatccttgtagataactcatcggctgaaaccccgatgaaacccttatatgcaattaaaaagtaggctagagagtatggttctaagcacgacttagttcaaggcatattttattttctagttttttccaaatgagatgagaatatttgtagtctcgatgtgctaaattaaattgttgactgaaactcaataagtcatcttaatactcattgtttgtatgcatgcatatagtaccttggttttgttatatggtggatgagttaatccgtccttggtcttggtgacaaaataaatatgccttagacttttggatgaagggagcatctagtatgcatactcaactaaggccatatatacgatgagacccacctcatctgctagtttgaaccatcactaggatgccctaaggattataggtttaaatccaattaggttatatgctagagttctttgaaacaaatttctattattatgctgacgtacaaacatcctagaatgtaagaatctatgtgtctctattaacactagaaaataataggaagttgggagatttgtctcatcaccttatgtctatttttccccttttattcaacaaacctattggatttgtgccttatgacaaaagctggagatataaatcatttatattatctttaaaaatgaacttaagaaaatttttcaaaggaatgtttgtacctttgattcagtattggacacttagcaagaatatcatagagaggtaacacatggatcggatgtccacctaacattttctttttcttaatgaagaaccactagcatgcatattgttcgtggttccttctctagtagtttggttgatgtacatatttatactctctaaaaacaatccaatggtggtggcagtgaatctgtcgccccacctactccaatagcaatctttaaatattacccctttaacttcttaatattacacaacaactatatctaaatggatagccacatataaaattaatgtgggtagccacattttcctataggggaaatgtgggtcacatttttcctataggagaatgtgggtcacattttctctcctatagggaaaatgtgggtaacatatttcatggtaaatatgatttatttattttagaaaaatattttaatattttttttcattttatccgtagcaaacacaaacatttaactagtcaataatattcatgtattaatcgtattccttctttcagggttataattcaagtaatcagaaggtgattgcaaatgctaacacaaatagagataccaacaacttggcaatgcaaacacaagttcctactcatactagagagggaccaactttcacacaactactacttggagaggaagattttgaccttcctccgtatgttccggatgatgctaaagagagcaatcagttctatcaacaaacaacgaatgagttccttaacatgaaccaattggataacaatggtataggaactgctcagttggaatctcgggagcatatgatgacatatggcttaagttctggtataagttcacagcttttaggttctcaagcaatagacgtagttgatgttgtaggatgcctaacttcaccacggggtacccagctgcatgagggtcatcttgcacatctaatgtcatatatccgtgcatgtcgtgatctagagcaacatacccctcccaactttgtcatgcatcaatctattgggccagtgttgaaccactatgcccttagtgcagagatgtcatattccatgagatatccagaaaatgcagctactcgtggacctcaaaatattcttgggtttcctataaaaaatgcagacacacgcacagagagagacacacacaaacacatgtacacacacccaaacacagacacatgcatgtacacacacacataaacgcacgtatatatgtagatggtgaaccgcaacttcttcatgctcatccactacgtccatcgcaggcatgtcctagcccgcctccaaatcctactcgccgctcgcggtccttatatagtcttattaatttttacctagcttgcattgttcaatacatcatctactgatcgatcagctagcttgttttggacaaacatatatctgtataatttctcataagcaagtattgagttgattcattcaattcattgatcgattcaggtgtccaatcgctgctgcatgcacagaggaggcgcctgctggctcttctcaccccgtcgctctactacttgggttaattacaatcgacaaactactacctaagctagctagccgctggctttccttcattttactccctccgttccataatataaggcacaaccacttttattagatattccataatataagacatgcatgcaagcatgcaattaactatggcatcttctctattaaattattacttttttaaatcctccactctcatgttatctaatcctattggatgcatgtattatatttattaggatgattctaaaaaaaactacaagatgataataattatttattgatctttgggttaagggtggttgtgccttatattttggaatggagggagtaccatgcatgctgtaactgcgattcgtcagtccggtgatgttatacaatcacaataagtttatcacaactatagcacacaagcgttttaattttaggaacaattccaatttacccccttaaaactattgcgacagtataaattaccccctcaattaaaaaccagatattcttcaccttcaacttttcataccggatgaattacccaccgacggactcaggagcggtttttgttgtacgtgacgcacacgtggtagtccaatcagcataaaaaatataaaagggtagggcccacatatggtgactgagagaagaggtggaactgacaagtgggtcccataattttttatttttcttatattgattggattgccacatggacgccacgtaggatcaaaccgctccgaagtcaactagggggtaattcgtccggtatgaaaagttgagggtgaataatgtctggtttttttgaattgaggagggtaattcaaacctaagaagatgtcatagggaaaatatatacatattatatgtgctgatttttctaaaaaaccggcacttaagcagcaatgccataggtaccagttttactaaagaaccggtacatatatatacttacaattttgctatatatttatcgacaaatttttctcaaaaaaaatgacactgtaacttgcatgtaactacaatgtaacttatacgtaactaattttgaaccattagatttctttcaagattcgtgcaagtcatgaagaaggaaaaacgtcacggcgcgcgcacatgtgagaggatttgttcccacaacctccgtttcaccgaaatagcatgttatgtaatttttgaaagtcacatacaagttgttacatgcaacttacagtgtaattaaatcacgattgtcaaattgtctagtaggtgttggttctagaatttcgggcacttttagtgccatccttttttttgctgtgatactacgtacctggtactagcttggagtatatatctgctggtataccggccgggcagttgagagtaataaagatggagtaggtaggatttgcattgatatatagataggcataggtagtatgattaattgatggaagaagaagatacatccagaatacgagtacattagtgaatgagtagttaggatggttggggtgggcagaaggtgatgaggtagcgcttggcgtgacaacggttgaggctggtggcgtcgtcgtaggcgtagctgtacgcacgagggcagatggccttgaaaaggtgggagaagatggtggggcggcacgccgacggcgaggcgtagtcccccgtgcagcagtagcggtcgccgcccatggccctgcaggcgctccggcaacccgccaccctcccttccctgtcccgcacctccagcgccgacgggcagcacacgttcacgtccgccccgcacgccgccgtcccgcaccccacgcctccccccaccgccgccatcgacaccggcgcgttgaacccgtccaccaggctcacgtcgtagaagtgcatcgccgacgccgacgtccccagcgtcatctccaccaccgtcgcgggagtcgcccccgccgcgccgttgcaccgcagcacgccgccgcagtcgcccgtcgcgcagctgccgcgcccgcgggagtcgaagctgcagccccgccgcggccacacgcgccccgaccaccccgccggcacctccaacgccgcctcctcgccggcgcccaggtggaagccgcccgactgcggcgtcgggtgccccgcggtgcccagcagccccggccacaccgactcgccgcagttgttcaccatgatcagctggatgccgccattccctcctcctcctccacctgcaacttcatccctcataattaattagctaccaattcaaacggatcatgcatttctgcttgtttaactgccatgtacgtacaagctgtgattgccatgatgaggatggcattgacgacgagcagcagaggagtggccatcaactcaattaactgccaatatatagctagcttagtcgcttgatgcaactgatgatcactagtctgtggggggaggccagccaacatatatataacctgtcaacactgactataaaaattatgcagagggagctagcctccctagctactgaagctaactgacttgttagcttacttcctttcctgtaactaacacctgggacatccatctgaagcgaataaacatactactccctccgtttctaaatgtttgacaccgttgactttttagcacatgtttgaccattcgtcttattcaaaaacttttgtgagatatgtaaaattatatgcctacataaaaatatatttaacaatgaatcaaatgataggaaaagaattaataattacttaaattttttgaataagacgaacggtcaaacatatgataaaaagtcaacggcgttaaacatttcgaaacggagggagtactatctatttcagtttcatgtgttccataagccacaacacgttgctgccataattctgtcgacttgttcgtactaccactagcaatgtctacatgctcaatcagcaatttaggcaccactataggctacctgatgactgtgctaggctgctgtaactcaacttcacacctggcttcagttaattagcttactgacctgacctgctcttcacatcttattgcacattaattttcagtttttcacctatgtgcagtgcaatcagctaatcggatgcctggcgaccaaatcagtgcgagcagagtagcgcagcaaactccaaaggctgcaaattactactaagtaccaactttaatttcactttcttccttttcctttggggattgcgatccatctctcagcaggtactacgtcaggatctattccttgctttgcgctgaggtttctcgctttgtacttgtgctgcgcaaatgcatcatcaaccgcatgctactagagtatttatatatctcctcgtcctcgatcgtcatttggataaggaaaagaatttgacaagtcgtagccgtagccccagttgcaatctccttctcttttgcttttgttctctgcttttttttcacgatctctatcctgtgaatgccgctggggtctatgatctttcatatgcatatgtaattcatcagaaagcaaagcatgcatgtatgctctgttcagttgctttccaaatcagaaaaggagtcctagtcgtctagctcgatcactgagtcactgatatgatttttctctacatattcacaccaaagcctgaagatacattttaaccagaccagtcacatatatcgcttcttcttgttgatatacattatgctcaacagtattacaattttatatttgaaatatgctgcacacagactgtttaaacttgaaataattgagcagcacgcacaacacaaatacatgggcgtgctttttagcgaggaccgatattacagaacgaatataaaatacacaaaatacgtacatcaatttgtctgattagctacagtaaacgaataatgttaatctccttatcccaagttaatgctttcagtggctagttcactttcattgtgacttgtgagatcatttcgtctcctgaatacatgtgcatactccactatccttatcttcctctgtattagtacgtatcatcgtcaaattgatctggcttttaatctgccgctgccaaatagacatcggcttattgctgatctcttaactgtaccgtcagtgtggaagggaattactactgaaatcgggctccagcacggatggtcactagacctgccaggatttttggacatatccaagtgaagtgctttcatcatgttgaagcattccttcacctcatggtcctgcagttagtttaattaacaccatcagttaactctatatgttttccagacgggtaattttaccatcattgaaaatgtacagaaagatatcacattttctagtataaaattaatttgttacctccagatattaaatatctcgagttaccaaaagttttagtttaaaatttagatacctcagggtactttttcaagggtcgtaaaatttcttttcctagacactagtactatgcccgtatattgtaacatgatctagagtaatagggtggaaggggtgtgttggtttggttttttatcggcgctgtgcgcggtatgggagggggatgggtggaccggttcggttttttacaggcgccacatgctatagggagggaggagaacaactgagtgtttaaagtagtagagaatagagatagagaagaaaaactttgttgtatatgtattggagagtttgtttagaatcattgtcccatgcaacatataaagcaaccttaccctagatttgcatcataaaaagagaatatgcaaataaacagagtagctagtgtcctgttcacaatattgtaacagagcattacggtcggatgtgaatatgtaaacagagtagtccagcatttgcagatggcgacttgggcagtgaatgatgaatcacgaacgcaaaaataatagtaacaaatgggtagaatattgttgaagtatatatagggtaagaaattaattaaggtacgtaccgtctgggagaaaggatgaatgaggcggttgaggaggagatgattggggtgttgtggtgtagtagaggataaagtaagagcagaggcagcaagcagcgaggcatcaaagcggagaaaggagggatccaagagggagcggaggaggagggccctagtagttgtagtagtagtagtaacggggaggaaggagaaaggggtgacgcaggcgaggcgccagcggagagccttgagcagcgtgagctccatgtcccggatggtggacgcccggaacgagtgccccatcgcctcctccatctgtcctccacacaacacatgcatccatccttcagttcacttcgtatcgatcgatgtatatgaatatatgatatgaatgcatagatatgatatgaatatgaatgcaccgaaaattaaatgaaatgaaaatatacgtatagtacctgaaggtcgtggagcgaggggatggtgacttcgtcgagcttgcaggcgagggacaggcaccccacgctcaccacttccaccatccactcctcccacttctgccaatattaattggcaatgcatactcagttactagctagaggagacgtaccactactactaactgagtactccgatttgatcgatagatttaccaaccaaatggcaattgatggagaggaagcgatccagatagttggctgcgttgaacgccgtcgcggcctccagtcccagccttcccattgcctgatcattcatcatcatatatcaatctttcgattacaaattaaaaatttacacaacacaagagctaacaacaataattatttattttgcacatcaataatctatctcttagtgtctagatatcactatctatcagaatgtacagatcatggaagaatatatagctagttaattaatagagagaatgatcggtcgatacaagtcgagaatctgtacatacatagatgatgtaacgtacggctttgagcctggcggccgccacaccatgctgctgctgctgaagaagaagatgatggcattgcaggtagcagcagtaatctctgatctgaagagcgtaacacctctgcttcgccttgtagtactccatcacctcatcatcaatatcatctggcgtcgtcgtcccagcttgttgctgctgctccggcggtggcggcggcggggggggcgtagagtcgaaagggtcctcatcgcagtagagatcaagagaattattgaaactagtatcgtcgtcatcatccatgcttgatcgatctaccgcccgccgttcaccgtctcttcttcatgaattaattctacctagctagcagctgcatatgcgatcgagatgctccctccctcccatggattatatacctacctagctatatctaattaattaatgatcaacaagctagaatgtatatagccaccatgcaatataatggttgtgaaggagacgcagcaagcaaggcgaaggcaaaggcgggcggcatgatcg

SEQ ID NO: 10091 - DNA, 44911 bp, Oryza sativa
tgatctaattaacaaagcagccctagtctgtgccaagccactaattgtacatcctttttcactgaggatgaaggataaaaataaaacaatattctagtgtgttataacccaataagacaccattttttcctagcaatatttaaaaattattaatatgagaaacgtgtatctatggatgatgcatgtcacatatgacaaattaacagttcaccaacggtgaaactttgtgtgatcatcacatggtagctagtgaacacatatactacaaaaacaaggtactgtggcacttgataaagaaccaataacggcatagcattattatacagaaatctcttattcaaatacagtaatctgtctctatggatgataccccttataacaacaaattaacagtgttaaccaagggttgaaacctgtgtgatcatcatacggtagctagcgcgaatgcatattcctacaaaaatatggtacatatatatatgatacttgacaaagaaccaacaagaaacagacaaaaaaactggacccttatggcaatttagtgattgattggaaaaactaaatgtgcaataattcagtaatagaaactactaggtcatttgatttccctttgtaacgtatatattaattgtaagaatgtagcatacattcatatggggaaaaaggccaaaacatattagcatccccatacaaactataactcactagcatgtatattaacatggtcagtgtattctttaatatgcaatttttgctaatgtgagttccacatttcatgcaaactgccccaaatttgaagattatcctgtatgggtcaattacacgttaatataataatatactataaattagcaattctacctcacagagtgtctatatatatggacggtgcatttgcctacagtgaattgttttatagagctgaaagtagttgtacagttgatcttttccaacgtagctataaggtaacagtattttggtactgtcagatatacaaagtcagagcttgtacgttaaagtagttcttgcaagttccaagccgtagatgaattaacacatgacgatgttggtgagtttaactagtgtgttgtgttcatgagatatttattgcagcaagtttataattaacacacaaaagtatccttgataatatataagtaaacgacaaattttgatcaaaagcggcattcttcagcaaattttgctcatcaacagctagtactaaaagtggcattcttccaagtaaattatttaaactccatcaagttaaatcctccaaattttaggctaattcagattctagcatttgtacacgccatgatatttacatcaaatgaaacccctttcttaatttttcttgcctgctatgacacacatacatatatacacacacggtatatatacgcatatatgtacatgtctggatctcctgccgaggacaacctcgtcttctttgccttgttcttttgtagccttttttacatgaacagtagcttcgcccaatagaacagaaagaaaggaacaggcgtagaaaaaacaacacgtacgaaatcatggcccctcccataagttcatgcacggacgacgacggatacagtacacgcgcgagaaaattcagatcggtcgtgatttcttgcagattgtgcgcgcaaagatggagcaaattgcggtttggggagtgcaggttaagcaagttgagagaatttgattaggggaagaggaggaagctgagatgagtgagaggggcagtgggtttacttggatgaggaggagaactggtagaggcggccggcgtgggagaagaggacgagggcgacctcggcgtcgcagaggatggagagctcgtaggccttcttgagcaggccgttccgccgcttggcgaacgtcacctgccggctgatcttgttctcgatccgctgaagcaccaccttgcctcgccccatctcgatctcccgctcgagatctctcttcagtcttcccttcctctctctctctctagatcgatctctagcagaccagcaaatcaacacaaacctctgaagaattttcttcagcaaagcttagctgctagctcttctcatccatgcagcatctgcatgatggatggatcgatcagtgcatgaaatcaattccgattccttgctctctctcgctagctctctctcctactgtcacacacgcacaccggccggcctgcagctgatctgctcaagctgtggcttaattaggagtagcttttttctctctatgccctacttaatctctcctctcaagagagagagatagagagaggcctggcccagcttgcagcgccctgtggatggtggtggtggtggtggtggtggtggccgatctacagcttaattggccgagagagactgagcgcgaaagaaaggcaacgagagcgagaggccgggtcgtcgacgaagagaagaatcttttctttcgtggggtagagaggcagattgaatttggatctcatctcatattctcgtctcgtctcgtctctcaccctaggtcacgtagtagtagtacgttacgtttccatcgccccaggtatagcaaaaattaataccgccgcgagcgctcgcacaatcgcaattcgcaagcttgtaacagcgacgttaacagcgaggcgagggaagcgaccgggccggcgggggcgtcgaacccgaggttgtgtacgtatcacacggtgcggcccgggcagcagcgcgcacagaggcggaatcgcgacgtgtcgagcggacgctggtgccgggtgcttttatgcccacaggctaagcggagactagctataagctaagctagccagcggctgtagcgagcaacgcccaagctctcgttgacgcaacaggtaaggtggctgtacgtaggagagtacaggatggctgcctctcttcccccggcccgccggtccagccgcttccccgtcctcgcctcgacgctgccgccgtgtttcctacgtacccgacgcgtacgcacgccggggcgccgggccacacggcgaggccggtagctgggggagcgatacgctagctaggcagccatggccggacgcgtgcgtgtcgccggctggcagggggggcgttcttccggccggtcacagtgcacgtcgcgtcgaccgggacggggggcatgtcgagccatcaggtcggcggcgtcgcctcacgtgacgggtgggggggatggcagaggacagagaggaggaggaggagaggagggggatcgatgagcgcatgagctcatctgcacagtgagcggaacaactactacgcccagcacagtagctgtagcctagcactgtcactcctacagtgtggctgccgcgctgggcccaccacgtaaccctcggtctcgctctcgatcggggggtgtactgtagctgcaatcaaagtagttgccacaacttgaagagcgtacagtacttgctaaaacctaaaattaattaaaccggttagttttaatttggcaaatttgctacagtatatctaaatcaaaacgtggattttccgagaacactataaaaatatggtaatttgctgaagaacataaacatcgattattttattgttttcatcctatttgatagaaaaatattttaggaggcccctatcccgcatatgtgaacgaaggagtatgtctcagttcgaactgatcatatccccgcctctcaatctttgtgctctctcactcaaacccctattagcaggcagcgaggcgatgacatgagtggcgaggaagaagaggagggcaaaataaacatttcatatgcctcatctcttctcaattaagtggattttacattttaaaggccgtgatgttctccagcaaattatcacgttttttagtgccctaagacaaaagctacatttttaacggtgtccaccagcaaagatcatgttttttagatgttttgtagaaaatttttccttttactttacatttctcatattgaagttgaggttaagtagaaatttcataggtgttcattttgaaagttgataaaaccccatatcgtcaccgcccaactctttcttttaaacgcaataatttcattggatattctagttggagaatgggggaaattccaaaattctaaaggacaagctatttgacccacatgaatttgtgtgtgtgtgtgtgtgagtaatattccaaagccttgagtatgttgggccctatttagattccaacttttttcttcaaactttcaacttttccatcacatcgtttcaatttcttcaaacttccaattttgatgtggaactaaacacagccttggtacttttgtacagacatatgttcacgccatgacaataggttaaagctcgaggactatttctctttgaaattttaaatttcctttccaacgctagctagctacaacctctagatataggctctaatttgaaaatgccctaattcttgatgtgtattgagtatatgatatggagttaattaatttgcaatattaatttgcacaaacaatggttacatatattgagcatggtcacaccgtgatatatgctgctccatcttgttcggtatactcatttacacacacacgtgagctccattttaagttttaacacataattggcggatatagcacggggtaaaattacaatgagtgcatggtgaaatgcataggaaattaaatagagcataagaatgcacgtgcaaagagaaattctacggtcattaagaaaatacttactggtaaaatactagataacaagttttatactagaaaatatgatacgataaaggatggtaaaattatggctcgcaaaatatagcacgaaaaaagaaactgaactagctggtgcagtaggtgtccccatgcattaatgtactcccttgatagttgataaagaagtactccaagcactcaaatgtagcctgttgcgatgtctgagaaagtaagaatatatagagaggtagtagtacgtgagaaagacatggccggcccatgtccgtttcaattgctatgttttgatttgttcttggattctctttattttgtgtaccagtcccatgcatgtcctctaagatgcactaaaagttgcgaagaagcaatcccaaccatatcttctcatcagtgtcatttattaaactgtacttatcaagtacaatgttaggtaattacgaataaacctgcatggtcctaaactaattccatctcatatgcatgtgatatgttcagagctttagataaccgataatgtcactagctaagcgtgttacaccggtccactgatccactcatgctgatatataagttcaatcacccaactgtgtgttacacagtggacaagacaagtgaccaccgagagtgacgatatattcaggctcacatatggcaaaagtgtaaagtgggaggcaatgtcggcaccacataaaggccagccatatatgcatatatgaactcgtgacagaaagtaggacaagatcgatggaaaagggaggaggcgagaccaggttgggtatatagcaaagcggaacaaggccatatctatgcacacacacgcatgtgacacgcccctaggtacaggctgtgttgttacagtctaggcaaagtcgagtaccacgttacatgcaggaaaaaggagcaaaaaaaaaaaaaggccgggtcgtagtagagctgtagccccctgttgctagctggcccggccgcggcggcacgatcgccatgtagggagcggcatgtcgggcctctcgcggagtcgcggtttggcgcgtcgggtgcgtggcgatccgtccgtccaggccgcgcgcggagcggggtcacgcggcctccgctgttacgacgcgcgaaatttctctgcgcgttcgcggccgtgcgccgcaggcggccgggtgggtggggagccgtgtgcagcgggcgcgggtgggggcgtggccgcgtgggcgtccgtgctgggagcttgcgtcgcgctgcgctgcgctgcgcggtctgcgggttccgtggagccgtaccgtgcgcacggccgcacggcgcgtcgcggggctcgaaacgtggcgccggtggcaggagcgcgcatcggaatcggcgagttgcctcccagctccgtgcagctgcggtgctggcactcaccaagtggacgccggccacatcgcgtgcgtcgtcacccctccaggatctgaagtggcagaggcattgaggagtacagtaggagtacttcagctgggcatgtattccctctctccgtaaaaaaaaacaacatcttagtacaacgcgacacattataatactctctttgtctaattttaaatgcagttatggtttttcgcgtccaactttaaccgttcgttttgtttcaaaattttttttaaaaaattaaaaacataagtcacgagtaaagtattatttatgtcttatcatctcataacaacaaaaatactaattataaaaaattttcaaataagatggacgatcaaagttggacgttaaaacttatggttgcacttaaaatgggagtacaatgaatctaaacataaagcatgtccaaaattattgtagaatgtgatacatcataatactgaaagaaatttgaaaatatactttattttttcatattttgcatttatatacctggctgcgattaatttacaaaaatatacccaatccgctgaacggatgcgcgggagcggaacccgagccggtcgcgcggaaccgagatgcgcgaccgagccggtcccacacaactggcctgcgggatcgagtcggtaccgcggcgccgatgcgcgggagcgatggagcccatggtaggacgagtgaacgcggcggtgccgcagaatggcagcgcgggaccgacgctgtcgcgcggttccaacgcgcggaaccgaataggtcgcgtgatctttgagatgtgttcttcccctaatttttctaactcatccgcgcgcacgcttttcaaactcctaaacggtgtattttttataaaaagtttctatacgaaagttgtttaaaaaaatcatattaatccatttttgaaaaaaaataactaatacttaattaattatatattaatagcctgctccgttttccgtgcagaggagatcggatccaattcgggaaaccgagatgggggcggcatgtgggagcgccggtcccgcacatccggcatgcgggagcgttgccgcgctcaccacgcccgcgggaccagcgtggtaccgcatccccggcctgcgggaccggctgctcgtcctcactcccgcgcaaccgttctgcggattgggtatattcttgcaaattagtcacagccaggtatataaatgcaatatatgaaaaaataaagtatattttcaaatttctttctcataatactaggttatatttttttgacacagaggaagtagggggctaggggctaacctgcctagtgcatcctctgtctaaaaaaaagataaaccctaactataaacctaaacgcgtgtatgtctagatttacaagttagaattgaatatttttttaactaagggagtatgagtcattcttgccacattttttctttagtctcattggcacgggtcaacataggaaaaatcttgccacaaaatatatctatgaactaaacaagcatcttaaacttgtctaactaaggctgagttcggcacttaactttctaacacactcctctcattttcctcgcgcacgtgtttttttttaaaaaagttctttacgaaagttgctttaaaatcgcattgatccttaaaggctaatactccgcttcgttttctgtgcgggaggtggagtcttggtgtgccaaccttaagcaagttgtgagtgccaaccaaacaatgttgtaaactaagaagtatcataatctaaaaaatgctaagttttctatcttgtagttcattttttgattctatagctactgttagtaaaatctagataaaaatattaactgtttgagagaattgaagattctggagaagttgcagttactatcagctctccaaacaagatcgttaattgaccgttagtagatttagcgctcctttttgggaacatttagacgctagatttgttgcgttcaggaaattacaatgttgtaaaaatgcatatttcgagagctcgaacgttattagtagtataacaattaaggctaacaacatactacagtattaaaaagctcggcgaaccacctgttttagtttccagcgttcataacattgtcggaataaatctccagtcaatacacaatcagtaaaaacacacattcgcgcgcgcacacaagaactatatatctaatcgatctttgttcaagatgatggaaatccaatcatctcaagcgagctaatcatatgcatgagccgtatgagtatgacacaccatccgtggagaagaactgggaattgatattatcccatctccacacaaggcatgtcactagattattgtgcgatcaacaagcaaaacgttggttcaccggcaaacctgagctgaggcacgattcgttccagcacgacccaggacggcagaggtcgaggcgccgccatagctgatcaggactcggtcgacggtcctgatttccgccttcttcgggggaagtcgattggaattactaggtgtgttgggctggacatttgggcgtacatatgggccagcaaatgggtggctccgtggctgggcttctgtttcgtcgcgtcggtcgttgggccgtaacattttcggatggttttgtgcaacgcggggatcggatattcggaggaggccatgcggcgccagcaaatgcgacgattgctacgtcgtcgtcgacggcggcggcgtgcgtgcgtgcgtgcttccctgcgggacgtcgtagtgcgtggcgctacgtacgactgcacgatccctccctagtcctgggctctaaaacgtggcacggtggctggcaggagcgcgcgtcagaattgcctccagctcgacaaagcgatccggagaggcgtgggtactgactactgagtaggagagtgatttttgtgaactagtgatccgactcccacagcagggctgctgttttccttttcttttccattttttcgcgaggaagggttgatgttagatcaggcgcagattaacagatttagctagttctcccaataggacatgtttagttttttttttctttttccccaataggacatgtttagttttttttttctttttcttttatggattctagtatatgccgaggttaaaatgcaattagtttcatatatatgtttggatgatagtatatacttagttcacaatgccatgcctaattatgtgtcaggctaattatgtgttatagagaccatgagacttgactcgaggatcaacttggaaatcctgaacgttgatagcaaactggaggggcacagcaccaacgcttgtttagcacaatcccacgaaagatgatcaacacgtaggtgaaggtaagatgatctgggcctctggggccatccctggcaccaaaatcgaatcgatgtcctcgtctccataggatgtagaaactataacttcttaagtattctcacagtaaaagagggagcattgattcaagactcaattacagagcaagacaatcaaagctaagcaataaactttaacagttcgtctacgacagaaatgcaattcatcaaactattgctgcctcttcaacagattagcagcagcttcctacacaaccaaattatagcccatgtagtccatgaattgctgttctgtagattatttactacagagtgctgacagctgaatgaatccattccaaattatagcccatgtattccatgacttgctgctttgcatattatttactacagagtaccgacagctgaatgaatccattccattggccactgaatgaataactagattaaccattgatattttagacaaagtctgacattttcaagtggaaatatggtactaatgttatggtaacaaaataatatgctagaaaatctgatcaaatatatcaatgactagtatgctagaaaatacatgttgcgttgcctagcattattaacaccaccatcactggtgcaataacttatcataaataaaccccttcttccaacaaacttaccaagcaacggctgaagtaagtaaccatatttcacacaaatctttgttgtttgaagaaaatcttgaaaccaaacctttgccacttgatagaacatttccagtatcagcatccacaaattatacactttgtgaaactagatgtttctgtgaggttccaaaaaacaagaggtagatctgactgagctaaattaaagagaaatatatctgtggcttagctaagattatatagccttgatccaaacaataagaaaaatatctatacacaaggattgataacaagtttaaaacctgagctccacagatagaatatattgcattgtaatcttaagatataagagccacacagatactgataaacctaagctactctatgtaagttcattgactatctagaactaatcatgtgtgatattgcaggtcctaagagagtaagatagatgcctctttaaaccgttcgtgtttgctcgcacatattttatacatatatcatgtaagtaaactagtgctcctgcctctaaatgtaattaagtggcttcagcagctattctgcaggtattggtgtaagaaaattccagcattgcaatacatgtccgaacaaaggaaaatgattaattaaccattagacaatacacctcctgctcagctgcttgatgcagcaggtgtctgtgcacggctacttcgcttgctgcttggcgaagcaactagctgcggcagcatagcatccaagcaccaatctatcatgaatgcacccacagcacacagaagcactgtcgaatcaatcatacaaacatccacagatattatgcactatccaatggatctatctatgttcaagaatcaagatgattgataatgcaattatacaaatcaaccaaaatcatgaggcagatacgagtatcacaccatctgcagaggaagcacatcaaactgaaaacgctataagattgagcatgagccttctcggagggaggcatgtgagttctagcgaaagcgttaaaatgaaataaccaaataaattcatgctccttcagtgcatcaagattaagcaatcaatgagcaagcacatactggtaacgataaacattagtagtactaaagagacatgcaggctgtagcaaaacaaacccagcttgtgaacataaaacatgtcattcagaatctgatctcctaatcagcagcctggcgaaataaaaataaaagaagtctagctggctcccacaccacacgaattacttctctgatctctatttctgcatgctcttccactcgctccattgctggccaacaaaagaagaagacaactcagatgaattgtacacactgctaatgccataacatgcttgctacagttgtaagcaagacaattgagtaattgtagtagcacaacattgagcactaaaatgaagatgacaaagcagcaatatcagcatgtatgaattgcaaatattcaaacaaattaagcttgtgtgtatgagacaaaacggattacctgagcacacaaccctaggaattcacttgggcaaattagcatcagtatatagtcctcattcaacttcctcttgcctttgccacaaccaggaacctgaacatgacggtcaaggtatctgaagaactcagagccaaacaaacgctgcggaacaatcatatctgggggaaaagaaagagggctggactcgagcctcatgcttctcatgtcgaagcggcacatgtggtgcaccgcaggttccccacattcgctgattggccccaacagtgaactggacagcgtgaagtagagggcattgtcttcatcttcctccttcctcaggaaagggtagactggctgagtctccggcaatccattcttcttgaagtcctccagctcccacagacttcccaggctgagctccacatccttagtccatccccaagaggccgtgtccagcgtccacactgtcatggtcttttcatccaccggcatagaatcttcgaaggagatggagacgaacttgatcgagctcccagaggtgcaacccatggtccggtatatctccgccggcgcagtatccggcatgtccagggcgtcacactcgcacccatggggcagctcgatgaagctgaagttgacgtggtagctgtcgaagaggtcgctgcagcggcagcacaggacgcccttcgtgaggtcagcccagaaagcatggcttgtggacgtgaacttgacgtggtggcggaactccgatggcgtcttcccctccgggaagacgggctccttcaagtgccacggctcaatggagggacccggggtgtcacgcagcagcagaggcggtttctccgacgatggcggcggcggccacaggcagagcacatcacggtggtagtagttgcatccttgttcttctttctggtactccaaattccgcgcgaagagtacaagggtgtactcgtcgccgtagcgcacagggagagggtcgcacgggtaataggcctggcaatagggatgagcagatacatggggtatcatggagagcgaccggagagtggcatcgtagataaggtagtaattgtcacgagcgaaggagtaagacacggcgaggatgatgaggttcttgtccgcgatctcgacgtagccggtgacacacgaggcgtgtacgatcccgtgaagatccatcttcaggcagccagtttgttccgtgagctcctcctctatgatggagcggatgaccccgtcgtttgcagtgatggccaactctgattgatccaggcccgcgtcgccgtcggcgaggcgcacatatagcttcagacactccgccatcaattggccatacttcttcccggctccgtagttcttgttcgtaaaatcgacgaccttccacccttttgctgttggaccgatgcaaaatctgtagtccgacacgtttggatccagcaggacccaggaaggccatggcgatgacggaggcggagaccgagacgccgccatcgccgaggattgcggtagaggaaggaggggggaggggaaggaaggggaaggaggcggagattagatgtgtgcacggtgagatttgatgggggaatacttgagagaaactccctctcttaataaaattggtcgatccggaaaaaaaaaagggactagctacagttatagtgccatattttttaccaaaatatagtcggcatgtgtttatattgtaagtctctaaattatatatataattttagtgtatttataatgtaagtcttaaaattacatatgtaggtcttaaaattacatatgtcaatcccaaaattatatatgtaagtggtgtgcaagtggggtgtaactaccgtgtaaatttatataaatatataatttacaacaacaaccaaagtttaaaaaacataacagtatgcatctatggcagagtgtcagaaccaatcaccgacatgaaaaaaaaagtaaagcctgtgtgctgatgccccgtgagcacgaatcttcataccaatactaaggctcaaaattcgactgcgtttatgggaaaaatctgtcgccataattatagccaatctgaaaaaaaaaacttgagagagatggtgcgattttgcacggtgatacgatcatacgagtagtagaaagaaaagagggctgagtcgttagatttgggttgtcacggatgtccgattagcggacggtggatgtgtgctgtaaataaagaaacacataaacaaaagcggaaaatctatttcgagagcgctctcggtttagctctatagcacgaagcatctcacagccgtctgatcgtgcacgtcgtcatggcgtccatccacgtggatgtctttttcctcttcaaataaagttctctcaaattatttatccgatctacaatccaattacaccattgtgttcgttacaattaaatcttcacaataagatcttacatgattatattacgatgaaaaaatatttatatttgtaaattacttttattatatataaaaaagttacttttagatttgactaaattatttcttagacatataaatgtaaattcaataaagtctaaaagtaatttgcatatattataaaagtaacttaaaacaaaacggaagtaactttgtcacgacattaaaagtaaattatgtcaggattatggataccacatacctaatagtagtcgactacatctcagcaggacccaccacataccatatcttatacggaaacaaccttcggatataggaggagttacgcataaggaaggatgactagagttctacatggaaacgacaaggactactcggattgtatccatattggtttccctagttctacttggataaggggacacctatgggtataaatacaaggcctcctaggaggagaggggaaacagataatcgacacacccaccacaatctacagaacaacagaagccacaacatacaagccaacataggccaagacaagacgccggcagatatcgacttcagggataagcacggttagtcccctatggtgtctctggatactgtcaggagagacgaaagcgctatctctgatctcgccgggcacggattcgaggaggaagactaccctcttgtcgactacgagtcagaacttcagaccgccatgtcgacaacagttagataggctaccccacatattatactggtgtgattatggtgaataaagagcaacaccggctccggccaacaggatgtagggttattacctgacaattcaggggcccgaacctgtataaaaatcctcgtccccatctcttttacctcagtctcgcatatatcctagcaccaacgatcccccatactatgcaaataacagaatcgcgatatcaaacgtcaacaaatttgttgtaaggataaaaaatatgactttatctagaaattaaatttaatcaacacacgtaagtttaacaaattttgaaagtaacttcaatgttaattggaagtaacttttgcatggttcagaagtaactctttataaatatgtttaatcaccgattgcttttttcctttcatttttgtttttcatgtagaatgagaaaagaagataaaacctttaatggattgcagataacattgatggaataactaatgagaattaaccatgtataagaagtaatagttacttcctgataacattgaagttaattttctaacatgtaataaattacttttaaattaataaaatgtttgaatattgttgtgaccttagggcacaaacagagttgggggtaaacgggaaagtgtaaattcccgtttaccctgagagtgagcccaaaagtagatgtcaggatgtatataagatatttttttctctatttcattgtgtctttgctacaggactctggtcggccttttatagtgttcgaccatgaccacaaatatttacatctttgccatcatgggcttacatgaagttaccatattacccctagtgatccatatgccctaggggtataatagtactttgctggtggtccctaggtgacatctggtgccagctggttagagtagttgaagtggtccccatagttatttttctcgaatgagtcaattgctcgataagacttttccttcttttcttgttatttcagctgtcttggtcgcacccgagaactcgaatatactttcccattatcttggcgccttgtcactccataggaacctgctcggatacaactattaagaaaaataatgtcaggtggatgatgttggctcgaatacatctgtctacttgacattaactcgaatttacttttcctcataacgctgtttcctttgggtaacaacatgtcctaaaagaacttttctataaagaggagaacttcattcgagtttttatattttaggggaaactctctgagtattttatctttaagtagactttttgggcgaaatgtgtttttggccaaacttggggggcaaagtttaccccttgctacaacaaatatattcaatatgaatctcgttttgtcacatattttggtgtggagtacaatgatgtaaatagatcttaaaaataatacgtgatttaaaatatataatttattaaagagattaaaaaaagatacatactattgcattttttaagttaaaaggagacactagatggagtacaaaccagctaccactagctgtgtacaaaccagctaccactagctgtgtagtcacgtccacaatgaaaaaaggcatgcattaaagttactttcttttttataagttacttctataaattactattaggctttattgaatttactattatatgtctaaaaagtaatttataatttttcatcaaaatataatcatgtgagatcttgttataaagatttaattattacggacacaacagtgtaataagatgaatagtctaagagaaaattttatttaaagtatatatggatagagtctctcgtaataaatagagtggtagtttggttagtcaaaccagctccaaacaaaagcctcccttaatctgctacggagtacacggtagaccgagtagtcccgccgatacacaaagtgcaaaaccgctatattcggttcgcagccttattttgacaaattgaccctttacgaaaaattattttaagattggtctatgctaaaaactaattgaaaaatgagccgtcggctcagcgccattgagattggcactgatatataacgttttagcgccggtaacgttggcgctgagatcctagatgagctggtagcaaattcgaacgtggcagagggtcagcggcagaaccacgtaccggataagaaggaagcaacaatctgtaatatatgatgcaagtgtagcctagtggtgagagatgtgctggcatgcaagacttctcgggttagatcccctgcaatgcaaatttttttctttattttttttccttggtctgttctctttctgctttcgtgaactagcaaacagctgagagaataatcaatgtcacatttattttgttttaaaaagccaaccgagtgaatagaaaagaaggtaaaaaatcatttatttttttaaaagcatttatttatttattttttcttggtatatgttctctttctgccttcttgagagaataaaaaagatgagagaatttaaaaagccaactgagaataaaaataatagataaaaaatcatttgttttttaaaagcaaacaacagaggaaaaaaataaagaaaatgggttctgccttcttgagagaataaaaaagatgagagaatttaaaaagccaactgagagaataaaaataatagataaaaaatcatttgttttttaaaagcaaacaacagaggaaaaaaaataaagaaaatgggttctacatggtgacggcgggaatcgaacacaagaccatgcacacaccaggcaagcaaccaaaccattgcaccactatcacacttccaactatgatgcaaaaggaatattcttaatgtagtacgtggggtcagcgccaacagctttaacgctgaccctctgccacgtggaatttgctgacagcttagctaggattttagcgccaacgttgcaggcgctaagacgttatatatcagcgccaatctcaatggcgctgagccgacggcttatttttgcaattagtttttagcatggaccaatcttaaaataagttttcttaaagggtcaatttgtcaaaattacagatattcgcaatcagagacgcgcaagatcacgtatgtttccttttcccggcccgctgtggattccgatctctttccctttcgggctatccataaattggcatgggggcttgacccgttcggggagcatcgacaacgttttgggcttcggcctgtttcttttttgaataagttcatatgatatttcttaacttgtcgacgaatccgatttgcgtcattcaaccgaaaaaccagatacaacgtcaactgtcaaaaccggtgcaatataagtattgtcagggttacgggtcagacatatcctctaccccacgatatacgtcacatatcgacaaggcatatccacgtgtacacggataaatcctttagcacataaggaaactcttcgtaaagacaacagacaaggagagaccttctcggacaagaattgggttgcctacgtatcgtactaggtctggtatattcgagtcctactcggatagtgcccaacctacggtataaaagggaccccccggggagggcatagatgatcgaatctcagagccaacacaacctacatagcctacgaagtcggagtctgcaaggggccaagtcaacgagagctagtcgaatcgtctcgactacaatctcgccgaatccctcgagttccgtcttttcctgtgtaatccgtgttttccaccatataatcccatatcaactggattagggctattacctatcaaggggcctgaactagtataattcttgtcttttgattgctcgatgtcgtactacgtagatccttataccagcgtaccccaataccctctatatccggtctacgggtatcccccgtcgacaagtatcatggtggtttaaacagtggtgttagctgaagtggcgtctacgtggctaatttgaagggaatgaaggaggagccagcctggcgcggtgcgctcgtaaggaaggagatcggcttaggggaggagcagaaaaactaattttctcaaggacccacttttcattatgcgggcattgagatgttttgtgtaaaattccttaaaatatcgtaggacctatgagagtttagtttgttactgcctctgttttttaataaatggtaccgttggctttttaatacgtttgaccattcattttatccaaaaaatttacgcaattataatttgtctggtcgtgagttattttatcactcatagtactttaagcattatttatattctaaacatttgcataaaaattttgaatagacgaatgatcaaacatgtgcttaaaggtaaatgacgtcatctattaaaagcaaagggagtaccattttcatttctatccgatcatggtatatttggcattaacaatatttggttgtagtttatgcatttagttcgaaaacttattaaactttgatcgtgtttttaatattgcaagttttcaaaattactaaattaattttgatagggtagaatttgcattattatgtttggtttattaccctgttacatttaccattgctaaattttgttacggttcaaagtggccacgagctaacactactatagaaagtgttattggtgccgatcgggaaaccccattgaggtctgttttcctaacgggcaccattaaaacagcacagatgactcgagtaattggtgtcggtttcacaactagcatctttaaggcgcacgcgaggaaaaaaaaaacacacaaatcggctcgatgcattggcttgaacgaaaccaatgcatcaagttgctccccattgccccaaatcaaagtcaaatccccgaatcaaaattaaattgccaccaagatcgattgacatcagagaataaatatacccaacaacaaaaaataaatccacaaatccgacgccaccttggtgccaccactaacgaatccggtgcaagaggctggggagaggtcagccgctggctatcgagcttctccgccgccgcatgctccaccttctgcttcctcaccaccgcccgtcggtccatgtcacgttcagaaatttaacccaaatttccagactattttgtgtattaaatctctatctatgaatcagccagggtacacaaaacgataaattaatatacagatctaaacgtaaataaagcgtaaatacttacaaaagaggcacttcgtcctcacaccgaaaagaaagcagcagcagcggaaaaatagcgatcctaacggggcttcagctccactccacatgcaaaatttaactggggtctgagccttggtcctctaacttcgtcttcgactcagaagcactgcacttctgaaaaggaaaaaaatagcaagactgagtacaaccaccgtactcagcaagccacaccaccgatgcattcgtgcaacgggagacaaagggaggtttgtggctatttgcataaaggcagttgcaaagcatttgtagttttaaaaacagtaaaatagttggttaattaagacaatatttaatctccactggtcaacgctacaccacgttaaacaggcccaaccatcccacctgaactaaccagccaatttattaagggtgagactaatctcggtgaatctagtcgatcgcccataaccgcgggcacggctattcgaatagtttcaccttggccagaggtgcataactatatccacaagacacaatccactggcatgttacattgcccggccggacacgtcaccatgtcgagtgattgtgacaagacccttcgcataaccctcccctaaccatccacactatgctgaggtttcacctccaccccctacaccgggagtggacaacggacaccctggccgacccaactccatcacgcccaccctcgctaccagtgcctaggaaagagtcgagctatactacaagtcaagcagttatctattcccacttgtggtaaacgttgtaagtctttcaggtttcccgtgaaccggttcttaattgctatgggtgcgactaacaaaacaatgcacccacagcccaccattaagtcgcattttaattggatagttacgactaatgaaacatggtcggatgtctcgagcacgcagctcgtcgctttactcctacttctatattccaatataagctagttaccacgtagatttggatgtgttcagcaaacagacatttcaacttcctataacttaaaaactacatattttttacccacaaatatctttgtgagaaagcatgcgtgttatactgtaggtccatgctttcaggaatttcacatcatttttaggcctttctgaggatattatgtgtgatttgcaggtccagagatgcctcctgacaaattcatgtatgctcaaactaacgtttctgcatgtaggctgtagcggtttcagcagctatttctgcaggttcaatgtgaagaaaaattctagcgttcaaaatatagtcctaacaaaaagaaaaattgtagcattctgcagcgtgtgaaagaaagagagattgtttcgttttccgagcgcacactttccgaactactaaatggtgttttttttgcaaaaagtttctacaggaaaattgctttaaaaaatcatattaatctatttttaaagtttaaaataattaatattcaatcctatagttgatccccactaaggactattaatgctatttttctgcaatttggtgcctccacgtcatctcagttattttggatcgttggatgtcatttgtgaggcaagatatcagcgcttgtagcctccaacgctggcagctggcttacgggaactgtctatggccaccacgtaggctgcctgttcacttccccatcaactccacgctcctgcatgccgcattagtccggaaaggctaaggggcgatcgatcgctaccagctatcgccagcgatcgcccctaaaaccccctccctcaacttttctttttcggtaccgtattacttttctattttagtaattttatgcacctaaagtttatacaccttaaatttacacatataaaatttagagacctaaattttataagtcaaatgtttatatatccgattcaaatttaaatttgaattcacctcaaatttacacatataaagtttagagacctaaagtttataagtcaaaagtttatatatccgattcaaatttgaatttgaattcaaatattttttatagatagtatttatatacatctaaagtttatacacctaaagtctattgaccccaagtttataagtcaaaagtttatatactcgtttcaaatttgaatttgaattatatccaattcaaatttgaatttgaattcaaatatttttctttatatagtatttctatacatctaaagtttatacacctaaagtttatatatccaaagtttataagtcaaaattttacatacccgatttaaatttgaatttgaatttgtttttttctttcaaactaattttttgattttgttatcaaaaccaatctaaacacacacgtgcacaggaagaagaaactaactacaccaatctaaacagattaagccgttgcacatgagaatgtaaactgatcgtgcacggtgatcctacgcgatcacccgtgaattaggcggccccgcattagtcggacactcgggcctctggttcggctttttccacttcccccatcggcgtggaggttcctcaaaactactactcccttcatttcttttgttgtacgacgccgttgactttttaaccaacgtttgaccactcattttattcaaaaattttatgtaaatataaaaatacttatatacgccgttgactttttaaccaacgtttgaccactcattttattcaaaaattttatgtaaatataaaaatacttatatcatgcttaaagaacatttgatgataaatcaaatcacaataacataaattataaatatataaattttttaaataagacgaaaggtcaaacgtttgtataaaagtcaacggcgtcatatattaaaataccgagggagtatctgttagcctcccacagtcccaccgccattgaagacctccaacttcatgccatcaaggctttaatcctctactacacatgtaactgatgcatgttaggtttaaatagccttcactatattggggcttattccgctccatataaatagatgttatgtggggaatcggctatcagcggaagcgcgcgcagaagcagcgtgagtcggacgcagcgccgggattagcgtgaggccggcgtgcgtggataaagataagcttgcacttaattaggatttggctgttagagcaagtttaatagtatagtcaactaccagctctaatttatttatagccaatctagtagctcattcatacaatagttacatactacactattaatacctggtcccacctgtcatacacatactgcgtcttgaagtccgtgctacagctggctacaaatctgtagcccgctgcttttctctcttcttatttatctacttaaaatatgtttgcagctggcttatagcctgctattgtacctgctcttactaggatttggttgttatcttttagggcccctttgaatcgcagggtagaaaaaacggtggaatagaaaaaacacaggattctgataggaattgaagtgtaaaacagaggattgcaaaacacaggaaaaacacaggaatgatcgtttgattggagcgcaggaaaaacgtaggaatcggatgagagagatagactcaaaggaaattttccaagaggttggagctcttgctaaatttcctctaaaatccacatgcaatgtgccattccataagaacttcataggatttggaaagcttaatcctttgaatcaaagggccaaataggaaaatttcctataagtttttaaacctacgaaatttctatataaatcctttgattcaaagtggcccttagttttggagagttcgttacaattgtaagcctctaagatgaataaagcaagcaatcttcagtgtcattctcgatctgttacacaactccggcacggggcagcgaggttaacaacctcgccttcccgtcgaccccccttgtgttctcgtttgattctaatctgttcttagccacaacaatagccatcctataaggcatcgtttcgtcgtaggctcggagctccctagatgttcacagtccttccccttgctgtttaactgtttgccaccaataccccaacattatttgattggcactttgatattttccttttagcttaggcaaaggtctttccactaattttaatttcatctcttggttttggcaggtgtgatattcacatcttctgtagaataagtggatgggatttgttgatccagcatctacgaattaccgctagctggttgtgtaagttttgttgtatccctgtctttttaatcaggtaatcatctcatgttggtataatatactaccaattattgagctttgttcctgcagatttaattaggtattactttaatacaaaaatatttatcaatatggtcttacatgcccaacatcagatcgaaagctctgaagaattaaacctacatcctacaacgtcagctccaatgttcatcttgaaatcaaactgactagatttttccctcagggccgtgagtactttcagttttttttttctatagagttgcagtgaacacactcaaggagcactactccgtggaaagtactgttaaactactccgtggaaagtactgtcaatcatttaacagctatgatctgaagactttctttaatttgtactttttgttctctccactgcttgagccttgagaggtaattattgttttagcaggcaaatgcaaaaaaatccccctactagttaatactagttaataatacactaatggctcacctcgttttatacactaatggctcacctcgttttacgtatcttctgtttcgcgtatcttctcaatcatctctcggctgcttgggcaagcagcagcctatatgcccttcgtaaatatccacagaacactgccaattcatcatacatgctcccacagaagtgctatataatggatcaagatggttgggaattcaattgcatcaaattgaccgaaattatgacgcagataagagtataacactacaccatccacagagaagcactaggaattgatatatgtatcagcaagcatcaagcacgtcaaactgaaagcactatagaatgagcatgagccatccccaaagaaggtatgcgagtttttgcaaaagcagttcacccaagataaattcaaattacttcagtgcatacataaggttgtgagatcgacaagcaaaaacatactggtaccaataaacagaagtattaaagaacccagcttgtgaacatcgaatgatggaattcagagtccgatctccctaatcagcatttgatctccctaatttgcctggcaaaacaaatctagctggctcccggaccacaccatttgcttccgtgatatctctctctgcatgctttcatcaacttcctccaatgctgggcaagaaaacagtagacaagtcagatggatgacaatgctattgccatagcatatttgctacagtagcaaacaatacaatgggtaatagtagtaattcacaacatcagcatgtataaaatataagaaaacagtacacaagtcaggtgaatgacaatgctagtgccataacatgtttggtacagttgcaaacaagccaatgagtaataagtgtagtaattcacaacatcagcatgtataaaatgtgcaatcaaattaagatgttaccaatttcagcatgtatgaactggaaattcaaaagcagctgtgtgtataatcacaaaactgattacctgactccatctcgacccaggattgcactttgcccgcatccatcttcctattgtcaggaacaaggcgctgactatcaaggtgtctgaagaattcacagcccaacaaaccagaaggaacaatcttatctgggcgccaggaaagagggttggacacaagcttcttgcttgtcatgttgaatcggcagacgtggtgcaccgcagggtcctcccaccgcatgattggcctggacagtatgaagtaaaggtctccaccatcgccttcctccatgctcagcagggggtacactggctcggtctccggtaatccatccttcttgaagtcatccagttcccacagagttccgaagcgcagctcctcgcccttggtccactgcaaggtacccatgtccagtgtccactccgtcaccgtcttgtcgtcctccggcacagaatcatcgaaggagatggagacaaacttgatcaagtccccagtgctgcagcccatggttcggaacatctccgctggcccagtatcggagtcatcaagggcgtcagacttgcacccagggggcaactcaatgaagtcaaaatggacgaagaagctgtccaagaggtccttgatgcggcagcacaggacgcccttggtgagatcagcccagaaagcatggctactggatgtgaacttgacgtggtggcagaaggacgctggcgtctccttcgagaagcgcggtttcctggtgtgccacggttcaccggagggattcgggtacatcttctctcgcggcggcggtggcggcggtggcagcaacgttggaggcgacgacgactttggaggcgtccacaggtagagcaagtcaatgcaggtggatcgtccttctctcttgtagggatagttcttggcaaagaggactagggcgtactcatcaccgtaccgcacagggagagggttcgacggtaagtagatatcgcagcaccaattcgggatggggatcatggacatggatgcgtgaatggcatcatagaggaggtagtgcttgctagatgtgaagacgaaggacagggagaggaccatgaggttcttgtctgcgacctcgaccgcgggcagtgacacctgagatctcatcgatcttgtcgaactcgatggcgcgaatcgccagatccggcaccatgaggccggggatgaagattcggcggccttggaagctttcttcttcttgagttcttccgccacgatgttgcggatgatattcttgtcggcgcagatggccaaccgagagagagccgggtgctcctcggcgaggcgcacatagagcttcacgctctccgccaacaaggggccgtacctcccgcacccttggtacctcttcttcttcaagtcgatagacgcccacccttgttctgttggaccgatggagaacacgtagtcgggcacacctggatccagcaggacgcaccgagacgccggcgacgccatccctagggtttcggtggaaggggagaggaggagaaaaaggggaccggtaagattttgatgggagaagaagaagattttgattcggaagcggtggagccgaggcaaacccgatccgactatagtacgagcaaagaggaacgagcgttgaatcgttagatttgaggtgtcgcggatcgtgagattggtggacggttggatgtgttgcctaaacaaacacataaggcgacatccccctgaacttggtgcacggtagaccgcgtagcctatctgggaacgcgcgccatctattttttttctttttcttttttaatataaaaaagtgcccgtaacattttaacgggaagaaaattgaggaaaagtcgaaatatttacattctggaattaatggaaatacaaattttatcatctttatataacgctacatatgatatcataattgcacatatatacgatgttgaagaaaaaaaggcacataaaaattaaggtgaattctaggctgacctggcttggctatatgataggtctaacatcaccgtactatctgtcgaattgcaaacaccagcacgaacgattagaactgcatgtaatgttacatcgtagttgcatatcctctctaaaaactgatgacatcattgaatattgggaacatgttttcatcaagtcatttttattgaggccccgtttggtagggctccaaactccaactcctaacactaaacttcaacttcagtgagagctagctcctattagagttgtgccatgattatggatacaacacctaatagtagttgactaaactcggcaggacccaccatatacaatgtcttatacagaaacaaacctcgtatatagaaggagttccggataaggaaggataaataaagttctatatggaaacaacaaggactactcggattatatccatatttatctccctaatattatttggacaagggggcatctatgggtataaatacaagcccccctaagaggagaggggatagtcacaaagccacaagccaacacacgtcccccctaagacgacggttagatatattatcacaattattgtagatatattatcacaattattgtactttgtggtttctatatcaatcccatataaacaggatgtagggctattacctgtcagataaggggcctaaacatgtataaaaatcattgtctctgtctcttttacctcaatctcgtatataccctggaaccgacgatcccataccatacaaataccgtagtcgcggtaccacccgttgacaagttggaaactcgttaaaagtgttcggctaactttcagctctagatccgaaaaaaattgaaaaaataaagaaaccaagccaccttggccccagccgcgcatcgtctccaccgcgccgcgcatgctgcccgttgccatcccgccgcgctggccgtctttgtcccggccgcgcaccgcccgtcgttgtctgtcgtcgcccgtcgccaccccgaccgcgcgccgccggtcgtcgtcccgccgccccacccattgacgtcccgtcccgccgcgccggtcatcgtcgtcccgtcccgctgcggccgcccttcgtcgtcccgtcccgccgacactgaatcgggattaggaggaagatgtggaggagagagaacaggaggaaaggaagatgggggtatttgagtggcattttcacgtaaatacactaaaaagttactacctccgtcctaaaatatagcaatttgtagctctgaatctggacacgtgttttggggtagtaggtcttttggggtggagtggagctatggagcagcaaaaacccagctccaccccgtagttcattttctaggagtagctttgccaactccactcaaaaaatggaggatctggaccgtttggcacagctccggcttcaggtaagttaaagttgggagctagaactgtgccaaacgaagcctgaattgatcttattgaactctattttgatgagcggtgacaacagaaatttgaatgatgcacaattcttgtgatctgtgagggacatacacatgcataagtatcatcttaatccaaattgagaatgggatgagctcttataccttgattttccttttagggatttataaattacgtctagaatttataataaagttcaattaatttaccagtgaagtgaatgtgagaaataaaagttcccaaataaaatatggctgaatttagtttttattaaagtctccatgattaattacactatatgattatttttcagaatattcatagctcaattgacaagtttagtaatacaaatatctttttagcatttatctctatctctatattatatatatctctatctctactattataaaaattgaaggtgtttttgccgatactttggtacgtcatctgtatataagtcggtttttaagttcgttcgcttttagaaatacatatccgtgtttgattcgggttttaagttcgttagcttttgaaaatacaaaagaagttgtataaaaaatctctttaaaaaaacttgcatgcaaacttgagatgatcgaactcctaattgcaactcatgattttatggaaaaaaaatatccaagcgaattcccacaacgaattccaccttaactgaaccgtataataatagtaagattgaaataaccttcacccgttgcaacgcacgggtattttttctagtactattataaaaatttaatatgtttttgccggtactttagtataccatctgtgtttgagtcgatttttaaattttatagttgggtgcccgtgcgttgcaatggggaaaatgtgcatcatttgaaatatacaatctatgtcatatataaatatgcacaaatcaatgaggaatcgtttccttgatctgaacaaaacgaaattgtaacgaatctgattcatttgccaagttattatgctatatattaagaagtaaaacatgtagatcgttagattcagcaaagagaaatatggacatgtgcacccacgtcaattctatgcttctttatatgaacaacatggtttaatcacattccgtagcacacaaagaaaaatagtacgtatgcagatcaaaaggattgtgtgaaaaatgagaaaaggagaggctacagaacatgggtacttagaattaactgacgaagcatgaatttgcgatattttcaaaccatgccaaaatgttacgatgcatttcttcaatcaccaaatctgcatacagagctagaatgagcatctctgaacaaatataattttcatcaaggaaattcgagttcaacaatcagataattctaattacaaactaagagagacaacaaagaatgatttctatatcagtctatctttctggtcaatggtagcccgacacatactcgtctcaaacacgataaaatgcccaaacatagataaaataatgaaaacaaatccatttagttgttctcatgcccaaggtgcatgcaaagttttatatgggcatggtatcttaaataaagcttttaagggggttattgaccaaatgaaaggactactgaacattaaaagcttgcacgggttaaaagcttaaaaggaacctcaaataaagcttaaaaggacaacattaggtacctcaaatgatgtgtaccgtcagaacatttaaaacaaacttgcttgggttcaaaaccttaagctgcttttcatctggcaaaataactggaatattcataaatgaacagcaacaaactgaatttcacaatcttagaggacacaaataatgaaggcgtaaagtattcagttaaaaatatattgtgctgaaaggttgaagtattcttttttcagagcaatacatgcttaaaacatgacaattcaagagcaaatggcgtcctatttactttatatggtttaaacggtgatagtggccttaattaaagtatgcagaaatcatcggctctcaaaagtattactgattttgactgtaacttaatcctagttcctgcaccaatcagtcgtttcagtcatcccatagagaatgcatttggttctaatttaagcagttactgattcagtttgaatgagctgaacaatctactacagattctggtgcataaattatgtaagtgtgcacgtggaacccacgtcaataataagataaaacagagaataagcccataatattttcacgtctctaataagatgaaacagaaaataagctcctatataacaatttaatgattccatgcctctaatacgataaaacagataataagctcccatacaataatttagtgaccatacaatactttgtatagataatctttctgataggaagagcattgctacagaccaaaggatgaactgccccgaaagggcatagcatgagtacaacagacccattatatataacgttaaataacaaatacataaatgaccgtcttcccattttactgccaaatgatgccttcgaaggctcatagatgaaggaagggttatattggcctcagtcctcagaagtacttttccatgaacccgagttaaatataatagaggtgaccaacatcagttaaaagaaacacatgtagtagagagaataaactttatgcaatgtaaattatgaagtaatgctcacggaatcagtgtcagctaaaaaaatgtgtggttatgtattaatgtgatctaaattagagttcgtaagtactgcagcctattctctacaacgttaaatggatacggaaattgacggggcaaggcaaaccggcaaagtgttctctcgtactgcattccagataatcaaatgtgcagtggatagtttacagcgatatgcaataatattaacaaccttccttttctatactcattcagcttaattgaaggaaatgattctgccaagatgcattgatagcagtaagatgactgcattggtaaggaagataatatacaggtaaagaaactaaccgtgtgagcatagatgatgcaatttactccatgactgaatcagggattagtgtattttctgctcgcatattgactaaatttcattgagtggaggtcttctctcacatttatagaattcaggtgtggtttatcaccatgaattcccatcagcaattacgctgatcatcagaacttaacatgagacacttaccatgaggaagtatatatataatcaaatccaaaattttatgtctaatgtgagcacctagccagtaaaacaactaccaggatcatgaccaaacagagagacagtatgttaataccataggagaagtcgttgtagtgatgagtgtgcaccacatgtaaatgcagcatcacagatcaataaattgacagacacaacatagatcaacgatatttctatcgcatgttaaaaaattgatatcgcagaaattaatcaagtaaaaacaggacaaacagaagaaactggtcttattttcacagtaggaaagagtacccgggtgatgaaggaacctgacgtcctgaagaagagtgagcttgtgtccagtggcaagatttcacttcagatctacgccgtttgtgagataataatttaaataccatgggtaggtacaggatcaatactcttttttcgctggtagtactctcgcatcttttgaagcctagcttccttgtcgtcagcactaagagcagcataccgctccctagcactcttccgcataaattaaactcaattctcggcagctttgtatataagcgattggagttaaattagtgatgccgccaagtgtacctgcagaaacttgtacagaaatcatttcacaacatagcaacagtacgaagaagcgagacgaaaagggagaaaacagataatgtccacaaatcagatacacatggtagatataccttcaacaggaaagtgtttcttttacttaaaacgaaactgtctaagtgatactttcacatacattttgattacagctcgaacaaagcattacagtgctaaaatcactttgaaaagtgaattggtttctggacatttgctcaacaaatttatgaactttagttgatttgtaacttttctagatgggggatgtctagcaatcgaacgctatataagaaattttgtttaccttttgttgatgggaatgtccctcagtgatggaggggagacgggtgagtactgcatcacccgccgacagcatccagcgacgatcggaggactggcgggcagcttccggtgcggctgatggaggggagacgggtgagtactgcatcacccgccgacagcatccagcgacgatcagaggactggcgggcagcttccggtgcggcgcgaaagggaccgtggtggagatcgacggagaggagcggatccagttgcgagacgtggcgtaggcgacggactgtcggcgtggatgtgggctgcgcacgggggaagcggagtcgacgatggaggccgccgcgggatgagggtggtggtctagtgggaggccgggatgtggggggttgatgcagccggctgacaggatcttacaagattcaacactgatttaagcaggaaaaagggaaacaaatcacaagaacacaagaacacacgatagataggcaactttagtggaattatactccaatccaacaggattgagtccgccgccgccttcgcctccgagttgccagtctcaagacatgtctctgttcttcttagacttgagtacatatactactcctcctctctctcacgtgatacatcgccagctggacagagccaggctgttacaacgacaactgctttacgcaacccattgagagacttgataacgtgggttgggcttgataggccttgacgaccgacgcttggccaccaagtcttgttctcctcctccttgcttcgcgccatcgctctccactggagcttcagcttcttcctcttgctcttcagattcatcaggacggatctcctcttctgtatctttttgtaccgctaccttggcgttgcttggcgtgttcctgacaatccctaccccttgaaagcctgcttgtccccaagcaggaagtccaggaaaccttgtcttcaaatcttcaaggtcttcccaggttgcttgctctggtaatgtattagaccaatgaattagtacctgaggaatagtattattacctttcttagtgatgcgatggtccagtacagtcaaaggatgctgtatagaaggcatgtggggtggcagaaggggctgaacaggggccttgaatcccttggcggcgggtgatggagaggaggacgcggcgacggaccggacggcgtgaccggcgttgggggtagtgtctagggtttcggagtcggccacgaggagtcctccccgcgccagcggtggttcgacggaggcggtggcagcggcgaggcgagcagtggggtagggagctggtggagtacggcggggaggagcgaaggcggcggcggcacgggacggttaggggacggtaatggagccgtcggcgacgcggtggaggaggacggcgatggcggcggggaggatcgaaggcgacggcggcacgggatggttaggggatggcgatggagcggtggatgcggggatgcgggagcgatggagcggtggatgtgggagggatgaggcgaggagctgggtggggatcagtgcgccgttggatttagcgatccgacggttcacattctgcgtgtatgttagggttggagtgaccggcaccactatgaaattttaaaatagtagagaagagttatctctactaaaatttcgttgtctgttaaaaaagaaaaaaaaatccgactcaaaagaggtaaaaaatgaagaaaaaagtccgacaaaaaagcgattaaaaaaaagcttctaccgaaaaaaaatctcgactccgacttccgtaaaaaaaagaaaaaaaagtttcatcagtaaaaaaacaaaaaagaagtccgtttagtccgacttccataaaaaaaaggtctcctcagtaaataaacaaaaacgaagtccgtttggtttctttcgcacgggtattttttccgacttttttgcacgtgaaagagttttttttagcacgcacttaggctcttggttttttcgtccgtattttaatctgatcgtgcctcccgggcgctgttggtttttttcgtcaattttattgtccccggttttttctcccgtgcactttttgggttttctcatgttttttaatccgatctgttcgccgcacgcctcccgagttaaaccctgatgccgcgccgccgccatattgattgtgcgtttatcctccgatttgattgaaaaatcgattccccactcctccgtcattattttctccattattttccctttcgattcggttttaatttgtcggatttaatctccgtttaacggttgccgatgatgacaacaatcttccccggccgtttttatcccgagttttacgctctgattttggaaaaaacggaaggcgatcttccccggtggttccctcaaccaattttggatgatcgagaaagattcgacaagatttgattgggagatttgctccggcaaccatacggccacgagacctagcaaccgtacggacatgggactatcttcgagaggttgaagatggtagtagactgtgcgagttgcgcttacagctacctgtggctgagtcgaagggaagcaggcaaaacggagagaggtagcagactggcctagggctaaaatggaaggaacactatcggccctaaactcaggaaagattttcattaactttttcaattataatgtatgtagcgatcccaatattttaatatattgctcagctcttaatatatcagtgaaaaaacgcctttacccgttgcaacacacatacacttttctagttcaaataaaaatctaaataaacccctcctttctctctgggccatttttagcccacttctttccttagcccgcaacctagccggcccgcaagtgcgaatcaggattcagactcatcaagcgaccgcaagtctaataaccctccccctgttcctccctcactatggcctgggtcccaacgctacagtgtcatctcctacctccggtcggactcccgcatctgcccgactgtttgaagccacctcctccgtgaagtccgactatattgttggtgataatccaaaagtgattgagggtttcgattcttatcttctcctctttccgtttttctaagaattggatcaaaccacatcctatctgagttaggaatcaagtcagctaacactggatttttctggctcagaatccgttttcgcttaaacaaaaatcgcgatggacgaaaggtcagtgtttttttatttttttttccagctttgttcgccactttttttttcaagtacgaatcgaacgttttgtcttgcttttctttcgctttttttacggggtgatttttttcgcgtgaatttttcgcccatcgcataaatgaaagggacgcgcgctggggcgccacacgtcggattgcagagtttttagctgtgtgccattaagaaattgttgacagaaaacacgaggcctgggagatttgcttaactccactgcaggtccaaaacccgccttcggatgtgtgaccgtgccagttgatttgatcctacaatcaaccagaaacgaatacaaagaaacgcgattaaatccataaatgatagtcgatcagctaggtgccgatgacatatcatttattttaggccgatgtcatgtgtacatcgatcggcagtcgtgaataattaaggaagaactaaatctactcgatcggctgtagatattaacaatatataactcttatgtcgatatatacttaaatcaagtgattgtgatagatcggtcgctatgccgagacagtataaatcacttagatcgaaatataaattaacaacagaactatatacgtttatagcatagccgatcagatagatctagcgtgcattggctaataatctgataccactctatattaagatattaaagcaagtagaatatatcaaacagaagcataatatacttaaatgcaacaagatcttaacataaagggcagatttcacatgtcaatcaagcatataagataactatagttaaatcagttaagatcggctgaaaccccgatgctacactaatcggcaaccaagaagcaggctagagactgatattctaagcacgacttaatatatcaaactcaactgatgcagcattaagtatgaaaagaagaacaatatctagacaatcaagccgctggatgtttcatagagtggtagatatcttatacaatccaagctaacgtcgctatttaacctaatcggttgccttctactaacagatgttagccgattgtaggttagatgacgatattaccgaagattatacaagatatatgataacttgacgaattacataaacaagattaaagtatcataaagatggaagtactaatcctgagaacacaagccgccataacaagttttacctcttgttgatgattgaaaccgatgcagctcaacccgaaagcaagaactcgtcgaaataaaactaaagcaaaaagggtggcgatgcgccgaaattgtattgaacgtgtgtcttttttttacatagggctcagggtctatttatacccgagaattacaagatatgtccataccggacacgactattatctctaacaaactctaagataccataagtctttgcggcagacttttgcccaaacatatctctaaggaaattacataaaatatcctaattaatagatacaattgccttctcaggactctatccatgcgtggcaatcatcttgaagcatatcaactcaacccgatgatgtacaccgagtcgtattcttggaatcggctgtatcggctagccctgtctgactcgaactttgccgatcctgaccgtagccgattcggattgcagccgattcttgctctgtttccgcaacgatcttcgtcttcgattccgcttcgatctaatcttcttttccgatgctgatattatcaaatttggtcgttaacagaaatatagtgcctgcctttgtgccaccaaaaagttcgagccttcctatatgccatcgttgagaggccatgtttccttctatgccaccaagccaccgccaccgctcctcctcaccgagacgccgtcgtcgccgctcctcctcaacgaaccgccgccgcaccaagcagcgccggccggcccacggcaaccgatgtcatcactcatcaagcaagaacgcgcacggagcgacgccgccacgacatcatcttcctccccgtcgatctggaccacgccaagtcgagccgccgcgctaccatcgtcgtctcatcaccacgtctcatcaccacgaccaaacccctcaagaacccccaagattgatgcaccatggacggagaacggcatcatattctccaactccgtccgccggcgtcaaacttcgattccgcctcctccggtgagccattgtccaattctggttcattcacaggttagaaatggaacagattagtaatccagcaaacgaagaggccatcgttcattcgcaggctagaaatggaacatattagcaatcaaagaaacgaagaggcgagagcgaaaaggagctttactagggccattctcctcgctagagtcgaagagcagctggaggccgaggcagatgccgaggaaggggcagtccctacggatgtactcgcggagcgcgttggccatcccggagcgggtgaggacgtccatggcagagctgaaggcgccggaccctgggaagacgaggcggtcggcggcgaggatgtcctccgggctacgcacgtcacagatgctgaagccaaggtggcggatggcgttccgcacgctgcgcacgttgcccgcgccgtagtccagcagcgtcacggctgtcgcatcgaaccgacggcgaagcggaggaaaagcaaagcaaacgcggcggtgaggccatgggtgaagtgaaacgccttcgagctccggagttgaaacgccttcgtcgccggacgcgcgcacggcgagcatcgagggaccgcgaagctggctcctccgcttcggccgaccaacggagcaggggggcggcgtggatggaggtggcggtggccgtcgctccctgcggcggcggccttgtcgccggcctcgccgcgccaccccgcccctcctggtcgccccgccgcgccgtcgagcaccgcctcggctggccgcctggctgccttggcaccgcgccggtcgcctgcctcagcaccgcgcctgaccgcttgtccgcgcgcgccgcctgacctctgtctcaaacgacgcagagactgaaagggcaagatgcacatttttcctgcacgggcccacatgccagagctgttaaacggttaaaccttaacaaaatagcgacggaatggtgtgaagggcacgataaagttcaacgatgtcatgagagaggctcgaacttttttttttacacgaggctcaaactttttagtggtatagaggcaggcaccatctttaatggaacacaggtaaaaacctccggattgcaatagtgtgcggggcgaaaattttgcaaaaaagcccttcgcgtttctgtaattggatataggcctctcacatttgaggggaaaaagtagcgaatagggacttcgttgtgatatgtggaagatgaggggctttttcgcaaaaaaaaagcccactatcgcggacgagtctacagctcaggcgcccgattggtttgcagaaaaatcggtcagcgtccgatttacgtgcaaaactactttaaactgatttttctcttaaattacttatccaaatcatgatccgattgcaccattaaattcgttgcaattaaatcttcaaaacaaaaccacacatggatatattccgacgaatttttttagcttattatcgaattatttttaaatgttgcacgatgttccaccaggtatatcggaattgtttcactaagtagatcgaaaatgtttcactcgtttaaatcaggtgttgtttctccttatataaaaacaatgtttcagcaaatagcgaaagaatatttcagttcactgcaacatttgatccatacatagtgaaacattataagtacactaggtgaaatatttttcggtggaacaaaaaataaacaaaattcccttaatagggggtttccaaaatatgcgagtttttttttgcaatggagtatttcagttcactgcaatattagatctatagatagtgaaacattatgattacactaggtgaaatatttttggtggaataaaaaataaaccaaattcctttaatatagggttttcaaaatatgtgggtgatttgttgcaatgaagttgtatgtgtggataaatgacaggtgaggacagggatacgtgagggggcgaggggcgcacttgatgggagagggtggagcgaccgattttttttgagaaaatttgatccatagcacaggaaaaaacccggtaccaaaaaatagcacaacaaattttccacttcggccagaagcacagggcaccagttttcttgcgattcatagcactcccgtcacatttgccatccaaacatgtgagttgatatgaaaaaagactcatttgcccttcttccccacgcaagagggcaatggagctcagaccgacggctccctcacgctccccccgcgtcgcccacgcgcaggccacacggtgggcgaaccccgccgtcgccgtcgccgccgccccccactcccctccccccttcctcgccaccgccggagctcaccaccggcaaagccgatggcggcggcggggccttctcccggcgtcggtgagtggtggcagcgaggtatcccggctaggcggcggtagatccggcgccgccgtcgccggatctagcaaggccctccgactttggcggtggagggggccgctgagtcgcgaggcgacggtgactccagcgcgcgcgggcggcggagggcagtgctagggctgacacgttgaggcgtcggggccagctggggtctccaccgtcggctccggtggacggcgaggcacgtttgggccagccggggtctccaccgtcggcttctccgccagccaccgaatccccttcgtccacgctcccaacatcgccaccagctccgtctccgcccatcgggtcattggcctcggcatcacctctaacgacgacgacggcctcacgggtggctcgaccgcgtgcggctgcgaagcaaggcgacttggttgacggcggcggcggtggcggcgactgcttgcgaggtgcggcgaggcgacgacggcgatggctggagggtggttcgaccgtgcgcggttggtccatgcgatggctgcgaggcacagtgaggcgacaacggcggctccttgctcgaccgcgcatggcgtagctgctccgcacagggcctgacgcgacgagatgacatggtcgaagggtaaattagtccgaggatatttctttctactccaaactaacaccgttatcttaaaatataacggaagtgctatgtatcgaaggaaaattggtcctccgtgcttctggtcgaagtgaaaaatttgttgtgctattttttggtaattttttttcggtcccccgttgagcattctcgcactatcgcgaataggggcttcgttgtaattggatataggcccctctcccgcgccgcctccgcctccccctcgccccgtccccgtcgccgagcgccgccgccgccccctcaaaccctagccgccgccacccgttcgctctccctctgtcgcgccgccgcctccgcctccccctcgcgccgtcctcgtcgccgagtgccgccaccaccccctcgcgcctttgccacctcctccgctgccgccatcgccggtcactcttccacctgcacgcccgccggtccccaccccgacgacatcgacctccacgcccaccggccgcccaaccccgacgaactcgtctcctgcgtccctcaagcccgcaccggcggcgctcgcctcggtggcacagggggaggaggacgacgaagagaagacggaggtggatgacggcggtggcggcggcggctgcgcgcggacgccggatttggggtgcccctactactacgctccaccgaagacggtgacgacgacgccgccgccgcctcctcctgcggcgtcggcggttggagggtgggatttctttaacccgttttacggggcgcccctctgccgccatcgccgccgccgtgtccacctccgccgtcgtctcggagcgccgttgccgtcggcgaggcgagcagccatctccgccgctgcctccccctccccctcgtgcgccgctgccgtctcatcgccgtcttcgagcgcctccgcctcagggccggcccagcagtgcggccgcactaggccctcaaactcacaggtcccccacctagctccgtaagaatcgtaaagagcgatgccagagccgcttattccaaaacgcgatacgtctgagattgccgccgtgatgagtatgcgatgcgaggcatgtagcgattccatctgttttcgtttcttctaatggaaattgggagatgacttctttcctttcaaaaagaagagtagcgatcccatttatgccattgactgtcgactgtcgggctcgattctagcgccagccaccgtccccggccagccgctccacgagctgccctgaatcgggactgctagagtgcagctgtgcaagaaacgggctcactaccaatctgctcatctgcatatgacatagggggtaagcagcagcaatacagtgttgtcatcgttgccaattgcttctgttgttagtaactgacatctttggcttcatcagctctctatttcttgttcagaggttgagcttgcacgaagtggtgttcggcgtgtgttgtcgactaacttaccgtgcccatccatggtctaattaatcaggaatatttcatagctttgtaatttactgccatgttatggactcactaatatattgtttttttaattaccagccgtcctgatatcatgttattgagaaagtttgtatcgggtaaaagaaaatgataaatgagtttatagaataaagtaaggggccaatgtatgaaaaactgttggatgagattgatattgatatcatcaacaatagtttcacatatagaaatatttgaagaaatttttagataattcatgtaaatactaatttgtattcaggttgttttttgccagatgtggtctccatgcggtcggggtgaggtcttgaccaggctgacaggtggagaagcttggcgtgccttgatgagatcttcctcatgtccatcaccctaggccgcaagcggcgccattggcttctttgccaacacagggtctgctccgccaacgttgttgtgtgagttaccttcttcctctctgttttctttatcccttgtcaagcaaccaaaccctgacatgctgacgatatcatgcagcaattgtgtatttgagcatgttgattttgtgtgtgatgtgtaatctgcaagactgcaacagttgatcctatgttgatgacagtaatactatgggagggagggagaaggtaagctaatcaagagcgatcttgtttttttttgggcataatcaggagtgtcatcgaggtgaagcttggcaagctcaagtgcatcaatgatgattgcgcttatattcccaagctgcagctacgagcattggcccattgtcatggatcatcccagcagactgtgtgccaccaagtagtagatgattggctgctacatccagagacgcttgccaaggttgttggacagtgtttctcgcttcgaatctttcacctgattattgctttcagattcttaacatgatttcccaatatttaaatattgacctatctttgaaggtgccacaacgaggaataggccatgaagaagacataattttccccattttgtttgttggctctgtactctcaagaaactagcttccagagtatgatttttttttttgtttcaatattatgtacattgtcttttttttttgtttttttttttttttggggggggggggtgaattgtagtcaattaagacaaatagcaatatgatatgtattttatgagaaatcaatggtgcgttgcttgatctgggagaggcacatctctgttggtaatcaggcaaatccacatgttattctttacttttactgattcaagtagttaatggcttaatgccgacaatgtctcatagttacatcattcgatgatagattatcacatcacctgaaaatccaggctgaaatgactataaactaatttacagaaagtatcaaggattgacctatgtggtggttgcgtatgaacctgtgtgtgcttctattattgatcaacacacaaatgtatatttttccatgaagttacataagcatgtctagctatctttttcaatcgcaaatagtcataaacatcttgttttaaacaataatcagggttgtattatcgcgataggtgcatggaggcctgaggaagttgctcactactaatgtcagaatccacatgaatcatctatgcaggtatagttcattttattgaacaaatacattatttatgtgaaaaccatcttggtgtctagatgtacggttgtttacatgctcttgccataggtcctgtactgcttcgaactgcaaggaactggcagtacaacctgatcttaatggttttcttgtcagtggagcttcattgaaggtaaagaggaatacaaacatattagaataattgtgtagacacaattacctgcctgattcactgaataccgtcttctttcttggttgtgtaccctgaattcatttacattatcaactctagcacggtgatgttttgcctaagatcttcacccttctcacctcggcattgaaaaatgcctgaagaggaacatacctttttccgtttgactttaaagtatgctatgcaactattaatgcttttatttattgtataaaggaaacaccagtgtattggcttgccatatttagtcagtaaactcttgagatgagttatttagcaacattaggaatcatcaatcaatattggcatgaaagcaaccatcat

SEQ ID NO: 10092 - DNA, 40479 bp, Oryza sativa
aattctctatagtatcgtccatttcataggattttcaaaggattggatagatttcgatcctctgtctcaatgggctttatagaagatgttcctatagaattgaaatcctctaacattattatgttttcctcccggtagagcatctccatcagtcttgttaaatttgcctctctatttactcatttgccagccctcaaccatttgaagagccctccaacccatttggagagtacagtttagttttccttgcaacagtctctcctatatactctcaaaactgacggtggaacaagtatgtcagtctcacattagcaatagtcttcccatcgagcaccggtggcgattcggttggctagctccggcggctcgtagagctgccgacccaagcgggcaagctcttgcgtctaaccggcggtcgggaggtcgcgactcgtcaggctggctccggcagtaggaagaggcggcgacccggcggtagggaggccgcgactcagcgagctagctccggctgcgtgggacaaatactcaaaaatcttagaattatatcgagttgtgtgtgaattagattgcgaataggcccttggtaaaaatgaaaaaaaatatgggggttttcagtttttacaagcccatttggtcaatactgggctacccgttgttggcccgaccgccggaggctcactcgcagcggtcgatcatggcggggatgtagaagagccggcgggtgacggcgctagacgattaatatcggcgtcggcggcaggagaaagcgtcgaccctcctccccagaatcagaggtgcactcccccttcgtatcgtgatcaatcgcttaaaaaacttctgaatccttcatcaaccgaagtaaacacgcgtccctcgttttttgcgcagggttggtgcgctgggtcgtcgccgaggtcgccgccggccgctccccgaccgtcgcgctccaccgctaccagaactactgctcctccgcctccgccgccgccgcgtccccatggtcggtttccgcgtctcgccctaccctaccatctcatcggccgtttcaaattctcaccccgctgtatgcgcttgcagcgcctgcagctacgacgtccccgtgggcacagatgtactctcgctcctccaccggggctcccacgcctcccggctcagtacgcgtcgttgatttttgtctcaacctgcgtatctacgatcatgttaatgttaatcagtttgggatgttttaatcgatgtgcagatgtgctcctcagggttcttctcgtcgtgcagcaactcctgcagcagaacaagcactgctccaagagggacatctactacatgtacccctccatattccaaggtctgcataggttccatgcctccgcttctgcttttgtttcctgctgtgtgtgacaattggaattctgacacctgtttttgtctaaatactgcagaacaagcggttgttgaccgtgcaatcaatgatatatgcgtactcttcaagtgcagccggcacaatctcaatgtggtatgtaccgcgtaatctgtgttattttccttcagaatcttcagttttgcttctagaagttgcgtgtgcatcacataataagattccactttccagctgctacatcctttgtgcccacatttctgtcattaatcacctggagccttttttttctcaatgctgttttacatcttgaattcatgtgtatgtactgtcataactgactggaatgtgtgctaccttggctgcttgcaggttcctgtggcaaaagggtaggaactctgtcaactatcatagagttggagtgtctgaagatatgtttaactcattctactgtcctattgattgtccatgccaatacttaataagataacttctaaccccttatcttccaagcacttggtctgcttaaaacaaaatctggatgtaaatagtgagatgcttctcttttagcaagggcttatagagcactgtgaagctaccattacagtgctatgctcatatattcttcacctattcatttcccctgttaaaaactcatcaatgtctttattattccagcttggtgatgggctggattagatttttagagggagaaaaggaagtctattgtgtaacgaatgtcaatgctgtaagttctatgagtttcctttaatcactgtaatatgtttctttctttttattgatatggtttgatttttgccttcttcaaatgcaggccttctctatcccagttagcatcgaagcaataaaaggttgttcagaaatttaaagatctaaaattcagtatttatgttactgttaatctgcactgaaaataattcctttacaatttgctgacatggattgcgtgaggggttggaccataatctcaattattcagaattagccaccatcctttgttttgagagaatccactttgatatattctgaatcgaatagctaggattgatctcttagcaaggtgctgttcattagactaaagaataaagtcagtgcttagtatctttacccgtcttgatttaagatatgccagaaaaagactggacaacaagtgaacccacagtttattcttcattttccttacaaatatgcggttgattatacttatatcttttactcactttatgttacagatttcctctcttgttatctgtgaacttcagtgttatccctgatgcctgaattatatctcaaggaaattaagctatcttaggttttctcttgtagatgttgttagtgttgcggactacatacttattgtcgagaaggagacaggtatgaggcttaaagattcctcatgtgcatgtgatacttgtactcttccagttccagccttcctacagttcgcttctgtactctccttgcagtgtttcaacgtttggctaatgacaagttctgtgaaaggaatcgctgcattgtgattacagtacttactaactgctgaatctggtgttatacacaaaatatcttcttgcatttattcttatctagtttgatgttgttctgtctgctcagggaagaggctacccagatattccaacaagaaggcatatactctttgttatacttttctcttttatttttctgaattgatatttcaaatgtaaatactttatttttccagattcttgcgctaccttgttgaacagctgcatttgccagtttactgtttggtggatgcagacccttatggtttcgacattctggctacctacaaatttggttcactggtgggtcatgatttatctaattagctgtttgctttgtatttgctattatgcactatctgagcatacctgttaattaaaaatcacatataaccactttatgcaaatgactactacactttccttatcagtagctcccaatagctggattgacctttatgcattacatttttgtccagtatcaaggcacatttgaatcaaacagtatgccttcagtttgtttggcagctctaagcccttttagcatgtcttgttttcacgatattctgtcccattttgctggtagatttggaccttgcaagtttatttaattttccttgaaagcttggtgtatttatttgtgttaactaactaccttctgcaatgcgcttgtgtaattctcattctatttaagcaattggcatacgatgcaaatttcctgcgtgtgcctgatattcggtggcttggggtcttcacatctgattttgaggattatcgccttccagactgctgcctacttcacttgtcgtctgaaggtgactaaactgagggatataaatgactgacatttctacaactttttcttggaacttataagtaccttgtttgttcttattcaattgtcaacctcatgcttcatgtattctgttgcagacagaaggaaagctgaaggaattctctcaaggtgttacttgcacagggaagccccacaatggaggtaaggttgtacttttcgtacccgtattacaagcaattcatgattatgatgggagtttacaagttagagctcggacttagctagtggaacatttctttgcttttgttttaacagtagttaaagtcatttttttgaagactttcttatgaaaaacaggccagcttactaataaaagctgtactcctaacttagtgccttcccttcagtctcatttccttagtttgaaaaactccactacgcccagtaggtgcaagttttggggatgaattttagtgtaccacttgcctaggaagacttggcccattttatttccagtaactttagccctgaattttttacactgatatactttatttggcaggttggagttagaagccatgttgcaaaagggtgtcaaatttgagattgaggcgttatctgcatgttccatttcctttttatcagaagagtacattcccaagaagatcaaacaaggaagacatatataagattggttgtacctgtatctatccagaaattttcatgtggcaaaagtcttattttgtttttgtcatgctaactgtagtcacatgtatggcactctggtagtttaacccccagcaagtattttgtagcaattgtttatatatgacggtgatttggtgctgtctcaagaactgaaaaccacaaatttacagcaactgaaattttactattactatctctgctactaagagcatctccaaggtatgtctaaaattaggctcctaaaaacctgtattgggagtatcacaaaagatattgggctcaaaaatcacccacatctccaacagtatcccaatacctgattccaaaagaactttaaaatctgccatatcatcactggtgggttctcttaaactgatttttctccaattgggagtgcgtggaggtgcccaaaattagctcctattgggttggattttggatgtgcctaaatattgggacctcctttgggaacctgttggagggttggttttacccttaattcccaaaatttaacttttaggaacaagattaggcctctcttggagatgctctaacaataccacctaaagagttgtgcagctttatttggggtttattgcatttctaacagaaaccttttataagtgaatacctctatagtctgcaattatgcatgtcttttctcattttctgccagatcgtcatcctgtggaagctgagattaactatcccgatcttacctgagacttagtctccagccatcatcagccttttttccttgcagagttgcagttatggagttaagaagaacgggcaacaaaacaaaggaaaggttgcttaaattccaggtgaaatctacacccacacaagttatatcatttgcacataacaagccgaaagcattgcattgactgaaaagtagcttatcgagtttcatatatagtctccagccatcatcagccttttttccttgcagagttgcagttatggagttaagaagaacgggcaacaaaactaaggaaaggttgcttaaattccaggtgaaatctacacccacacaacctatcatttgcacataacaagccgaaaacattgcaatgactgaaaagtagcttatcgaatttcatatatgcaggtgtgtgagctcggtgttacttcacaaatacttgtctcttacacatgttcaggagctgatccactatgttagatgtaggaggtaaggaccactcatttcttttgttacttactgaattacccgtgggcaattagatagagtataggtgataattagcggaagcaaaggaaaccgttgaaacaccagatcaatggaaaaggcatctgttttcactgagcagattgtgctagggtcaggtcatatggggagagagtgccagagtggtcgacatcgagcttttcaaactcctccagaaaagaagaaatctcctcttggttgatcttacccagttctttgagcttgtacacaacaaattctgcagcactgcacagaccagatttcatatatcaacactgattcttttagggacacgatggaataaaaatactctatgtgagttgtgtacttacccaacttgtcgatcatcatccagatcggctgcctcaagatccatctttgtcattttccgtgtgagaacccaattggccagcattttctgccgtcgctcggtgtagatctcagcaaggtacatgaagaattgtgccatgatgatagtgctcgtgataatccaaaagaccgcgaaaacacgtcccagtttggatgagaagcttttatccccataacccagggtagtgattgtggcacatacacagtagaaggaatcaacaagactcagtttctccactttccacagaaatacggtcccagaaataatggatagcaccagaagcagtgcatttgtgtaaaatttgtactttatcctgtttgtctcgattgctctaagcatcttggtctcaccacccttcagattcgtgtgcaatgctttgaagaacagcacctcctgcttctcaacaagataatctgctactttgctgacaaagagagcaacaactgccatacccatgaagacgaaagcacaagcaagcagttttgttgtgtcattgtttgggacgaggtctccatagccgacggtggtcattgtgacaacacagaagtacaaggcgtcaagcactctatttgttcgcttgcctgatatctcatccatgacagcataaaaggccaggacgcccactagaagatagataaaaaggagaagtcctactagtctgaaacttggcctcatctccttgaataactccttggctttaactgatgagcccttttcaggggggccttgaagaggatccgtggaaggagtcgacctgcatcgtcgaaaccgatttactccttctgacggcttccgctgcagcacattagggttatcagctagcagtgattgctgaatgctgttgtcatccattggattagcctggatctgttacggtcacagccaaaaacctaaaattcagaaaatggcatgaacgttgtgcaatttgacaaataagtgggatggaaagaaaggatttgtaagctcaaaagttatgtaaaactaaggcaatatttgctggatatcacaggattgcacagagaaccgaggggctgcattcttctaagcattatttttttgtgaattattacatgctagaatcctacaatatctgattgctccaattgcaggtgtgctacgccagaaaattccagtcacctgcatatgcctcctataaactgaattctatcggaaagaggtgcacggctggtcatgagcaactctaattgagcagcaggacgtgaaaccattctgctccatttccccaggtgagttaccatcatcctaaaccctaatcagctaatgtgttatttgacttgagcattattatacgctagcagcagcaggcaagatgatctggttaaggccaaaatcaaagcaaggcagcctgacctttttgaccagttgccctttggtcacgggaagggtgcaggtattgactattgaggatctctactaccctgatcggatctcccctcgatctgtccatttctttgtcgaccaagtccccccacctatctctatcctcattcgtttagataatatttctccagttctctcttcttctccataaaaagggcatcaaaccgtagaagaaatttgcgagacgatgcagggattgactagggtggtcgaaacagcaaataaggtactagcacacatcaagaacagctgctctcgatacagtcccacggccatatgccagtatgccactgctcttcgtgcgaagaaagcaagggaggcaacgggagacagagagagcttctcttacctttcctccggctgaggggacgccgcgcgtcgatctcctctccctctcgcccgacctgccctgagccgcctgagacggatgccccgcgcgcgcgcgccactgctgctgcgcgcctgcggggttgagggctctggctcctggctgcaacaccacaccggccaagattctgcgcgtcgttgccgcgtccggggctattctattttaaggcgtccggctaactccaccggaacggtggatgttgtcaacgttggggctagcccaaatctatcaacgagctcagcgtacgcagccgcaggtgtgttctgacttgtgaacttgtgacggcaactgcaaccagcggccacaagtcgcagtcacaggctggatctactactagggctgtgtttagacgtagttttgtaaaattttggcgtgtcacatcggatatatggacacacaaacaaattacagaatacgtctttaaactgcgaaatcataacgcaattaggcttaaaagatttgtctcgcaatttacacgtaaattgtgtaattagttatttttttcgtttatatttaatactccatatatatgcccaaatattcgatgtgatagggtgtaaaattttaccaggggatctccggtagaacggaaggcagggattggtttgcacgaaccaaaggggaaagaaaaagaaaaaaaaggttcggtctgacatatggcattgccctgcgtccgtcgtcgtgcaggatgcgtccattaaggggccatttgaatagcaggattgagaaaatatagaaataggaaaaacgtaggattttgatagaaatataagtgtaaaatagaggattacaaaacacaggaaaaaataagaatggggtcccttttgaaacgcaggataggaaaaacacaggaatatgaaaaacgtaggaattgaagttgtatgtttttctaattctacaggaattgaaaacacaggaaatggagagaagagccctttgattataccacatgataccctcaacaaaggaaagtttcacaagaggtctaacctcttgcttatttttctatggaattgatcatagaaatgcaatcctatggaagttttcctatcatcttcctatgaatcaaagggcaatataggaaaaaatccttaggaaaatgaatcctccaaaattcctttgctaatcctccatttcaaaggggccctcgaccgtttaattgaaccacaggaaaaacgcaggaattggatgagagagatagactcaaaagaaaagttaccaagaggttgaagctcttgctaaattttctccaaaatctctatagtatcgtccatttcataggattttcaaaggattggataggattcgatcctttgtttcaaagggctttatagaaaattttcctataggattgaaatcctctaaaattcttatgtttttcctccccgtaagagcatctccaacagtcttgctaaatttgcctctctatttactcatttggccagccctccaacccatttggagagccctccaacccatttggagagtaaagtttagttttccctgcaacagtctctccaatatactctccaaactgacggtgggaccagtatgtcagtctcaccttagcaatagtcttcccaacgagcaccggtggcgattcggttggcgagctccggcggcgcggagaggcggcgacccagcgggcaagctcctgcggcaaaccggcggtcgggaggtcgcgactcgacaggctggctccggcagtagggagaggcggcgacccggcggtagggaggccgcgactcagcgagctagctccggctgcgtggagaggcgcaccggcggtgattcggtcggcgagctccggccgcgcagagaggcggcgaaccggcggtcgggaggtcgcgactcgatgggctggctcccgcggcagggagaggcagtgacccagcggtagggaggccgcgactcggcgagctagctccggctgtgcggagaggtgcaccggcagcgcggagaggcggcgaaccggcggtcgggaggtcgtgactcgacgagttggctccagcgatagggagaggcggtgacccggcggtagggaggccgcgactcggcgagctggctccggcggtgtggagaggcggcggcctgacggctaggctccggcagcgcggagaggcggcgaagggagcccgcacctcggcgggctggctccagcgacgcggagaagtggcagcccgatgggcggagatcgcgtggaggcggtggaggtcgcgcgactggccaagtccggcaggggcggcgaggctagcagtggcgcggagtacaccagtcgccgcgggcttcctccgcgcgtcgtcgtcgtcgccgtcgccggagcggatggtggtggcggcagcggccggagcaggtcgccatggcgtcacaccagacgtcgtcgtccctcgccacggcggcactcgaagccgatggtggttggctccagcactggagcacgagagaggacgggattattgacgtggggaagtgaatccatgtggggcccaccatttggcgatgcgtttttgcctagccaaagttggctatccggttggccagcatgttggacctcttttttacgtttgaatggccaaaatttaacttggagaggctgttggagatgctctaagtcttgaaagtttcgaaacatttgccattagaaaatagtattagcttcatccgttttataaaaaatcaatcagtatcagatatgacacttaggtaccttattaaaaatcgttttaacagttgagggatgcgtatggtattgttgtccagagacaaatttcagactcaatgataaattgaggacctaaagtgaacttattcattcgtgcaaacgtttaacaatcacctctttgcgacttcctcatatgtcttctctagtgtgatgatcagattctcctcaatgttttggtagggattgccactatgtaaggattgttgcaaaaaccatgggattactaagaaaaactgagagatttaaagaaccgagaggattatcacacgagataaccgtgataattgaggagataactgcatcggtttagtagcgatagaaactcatgagacgtcgttagtacagtagcagtcatgatacacataggaggggaaactgccacgctgatttcagaacatcgagcggttggtgctaatcgatctgagagaagtatgagagtgttgagataacttatatctccggttaacttcgtatcatctttagacaactacttcaacaccatatatgttgctccctccaatctaaaatgtaataacttttagcaaattatttggacaaaggtatgtctagaaacatagctgaaaattactatattttaggacggaggtagtatatgcaagaaaagagcaagacaactctgatcacttggaaaaactatgctcaaatgtctcttccatttctctcatcaaaacaaaaggtagctcggttgatgaaatttatacccgtttctatattttgaggtgtttttacaatgatctttactggtagtagaattaatctaaatcatctatattttctaatccgaaatatcatactccttctgtcctatagatcagacgagacatttcatattacaacaaacccgtcccatggtatagcaatgaatctggatatttcatagtatatttagttctaagttgttatattatgagaccgagggagtatatattatacaccacctcaactactggaagttgaattttttttactgatagtaaagctcataaatcaatggctaaagattattttcactgatgataatgttattaatagaatgcactactagtaaaaatcacccaccaccgtgtagatactcttctattttaccttcaattcacctgttaggcaatggctgacgtagttggaggtagactagagccatatcatacagcacacatgaaacaatacaaccacagaatcaacatcacgagagaaaacatgtagtatcattcatttccctgcaggatcaagacaaatacctcgagctggacagttctcttctctcgacacacccattctggagaggacccatctgaccttttcactacgggccacatgctggcatggcgaaaaagccatcgccaatccgccattggtgttctcagcctcaagcccagccttctggccagtactgcctacttgccttcatcccaaggactcatcctcctccacttctttccctccttgttctcttccttatatgaatgcaatcacctttcaaaaaagattgaatgcaatctttgttcttcatcgatcatagtagtttggggctgtccagtgacagaagagaatgccttcttcaattatggcagaaagctctctggcttgtcctgtttcctgacgtcggaatggcttatgcacagaagaccatgtattaacatgtaactatgtaaggcaaggaaaattcagaacattttggattcaattccactgtgaagaaaaagggaaatttcagaacatcaccttgtatagtcataatattgagtttcaaacctatgatacctagaaatttcagagcacttattttgcaggaaccatacttttcctaagatttgcagaacaaaatttcttggcttcaaacttggaagagttattcggagaacagatactggtgatgtgcagtgtaacacatccacagcatgctccaccagagcaaagatgtggagctcatatttaaggcaatccctctcttgaaacatacgccatttctctcatttgttttcacttgaaaacggcagcttatttacctaccctaccctgaattgacagactcttaaaatcataatttacgcattgctaatgagcctaattaaccatgttccagatgtaagttttttcatctccttggtccatacttggaggttatacttactctctggattcaccaatgaagccattcaatttcaggctccagcagtggtatacttggaggaggttgtactcttcagcagagccattctctttatcatgttgtagtctcttatctctgaacttctctgaaacttcaattccatccttgaactttctctgaaatagcaggagcaattcagcactcatgatcatttcttcacttccagctattgcatgagattatatttcactagcactcatttctgacaagacagaacgatttagaagcgagattaattagtaagggagtgattggctgattgcactacagtgagagcaaagaaaccctgacctcatcaggataaaccaaggtctgaagagaaggttagctgggactcttgttacgtgcgcagccagcagccgataaagcaggaaaccgtgataggatcccgtttggaagcgttcgtagctgacaaaatgtgagccccataagctgtcaatttttagcctggactcctttctctacttaagtagaaatgcgccgttgtgttcaaccgtttttcttgcgtgcccaaagggagataccctgatgtcgacacgaatcctctccatcggctgtcgtttcaactgttgctgatgaactctaagagaaccgcagaaatcgattgatgccatctcttttgttctttctttgcgtatgattcaaagaacataacacgaagcgatgtacgggaatttagctggtttttttcatgagattggttatcaaacattcgctcaattcattgcaacaagtacttgtttagctggcagagttgagacttgagagtccccatcgattcaacctgaggccaagagattccaaggtcactgttggaatccacattatctttcggcttgatcctaaccttggttgggaatcactcacagttccatccaggagaacggatggctcacgacaccaatgcaaagtcgataataattcgatttatttcataaggagcacaaatgtgtgcatggcctccatgttcttgcaggtctcactcagctaaaaaaagacggcaacatcatgctcgttatctaatcaatgcatatatagcagagatcgatcgatcgatgtcatccggccgttagcttcagcaaattaaattatgcgtgtgtaggatcttacttcacggctcttttgatcttggaccttcttgctggtcattaattgtgattgctacatgtattttctttaaggctaatgtgatcgtttgctcactgttaatcctgcctaactcgtcttggtttttacatttcatttagtttcctgatgctgcatctgcttctatataaaccccttgctgccttgcagcttttggccaagcaagagctaaaagctagccgttgtgtgagggactgagagctagtggtgcactagctggctgtgaatctagccatggctctgtccacgttcgtccttgccgttcttgtcatgagcggcgccgccgcccttggccgcgagctcgccggcgacggcgccgccgccgccgcggcggccgacgtggccatggcgtcgaggcacgagaagtggatggcgaagcacgggaagacgtacaaggacgaggaggagaaggcgcggcggctggaggtgttcagggcgaacgccaagctgatcgactcgttcaacgccgccgcggagaaggacggcggcggcggccaccggctggccaccaacaggttcgccgacctcaccgacgacgagttccgtgccgccagaaccggctaccagcgcccgccggcggccgttgccggcgccggcggcgggttcctgtacgagaacttcagcctcgccgccgcgccgcagagcatggactggagggccatgggcgccgtcaccggcgtcaaggaccaaggctcgtgcggtacgaactccggcgaacacgaacaaactaatgattacttgatcttgcatgcgtcaactggtaattacgtaattgaatcgaataatcacctgataaaatttgcaattaattaactgggcgtgcgtgcatggcatggcatgacacgtacccgcggtcaaacggaaaggtaaaaatggtcaatccaagtaaacagaagattctaccgagccagtctacagaacagtctacgcatgcacttttagtcaactcgagagtcaaacatagctaaaactgtttgactaatatgtgctactaatcacaaagaagaagctgtattagtgagctgatggattgactaattaatcaatatatgcatgggcatgcaggttgttgctgggcgttctcggcggtggcggcggtggaagggctggcgaagatcaggacggggcagctggtgtcgctgtcggagcaggagctggtggactgcgacgtccgcggcgaggaccagggctgcgagggcggcctcatggacaccgcgttccagtacatcgcgcgccgcggcggcctcgccgcggagtcgtcctacccgtaccgcggcgtggacggcgcgtgccgcgccgccgctgggcgcgcggcggcgtccatccgggggttccaggacgtgccgtcgaacgacgagggcgcgctcatggcggccgtggcgcgccagccggtgtccgtggccatcaacggcgccgggtacgtgttccggttctacgaccgcggcgtgctcggcggcgccgggtgcggcacggagctgaaccacgccgtgacggcggtcgggtacggcacggcgagcgacggcacgggctactggctgatgaagaactcgtggggcgcgtcgtggggcgagggcggctacgtcaggatccgccgcggcgtcggccgcgagggcgcctgcggcatcgcacagatggcctcctaccccgtctgattatataaacaaaacacacgccgatcaaccacgtcattaattgattcgatggatcagtttcaaaatataagtcattctaacattttctacattcatattaatgttaatgaatctaatatgaatatagaaaatacatgaatgacttacattatgaaacggaggaaatataaatattaattaagatgtgtatatatatgtgctctggtatgtatagcgacactgcaccgtgtcaacatgtattctgaaatctgaaccggccggcccgtgcaggaagtctgcaaaagttggacgcgcggggctgtacgtagctgtgtgtatattgtatagtgtatatactacttaccatgatgaagttgtacaaagtgaaatatgttaccatattaccgtacagtgtacacagtcttcactagtacttctttcttaggtctctcacagtgcgtctaggtggactgtgccttagtcccgccacgtaggtttttttccgccgtgtcgcttggacccgcgccttagctagggtgctcgtgaccaaactaggcggcgcgaaacctcgcctgttcgagggcgtgcacggaggaatcgacgcgagacacgtgcgctgtgggcgtcattccctcgccgtccggtgctctcgcgcgggattcccctggcgaaatcccctattcaccctcccaaaaatcccctcccgccacagatcggattggaagagaaaaggcaagaaattcttgaggattggaagagaagaacagatcggattcaacaagatgaaaaagaaaaagaaagcaaaatcatcatagcaaaatcatccaaaccaacagatctggacatgcaagaaaagaacggcggcggcgactcctgcttctgctcctcttcttcgtggcggcggcggctgccgcgctcgccgcggcggcctgtgtcgcgtggcttcgccgctcccctgggtccggcggcgctgctcgaggtccccctcggcaaggtcgccacggtggaggcgtgccccgctcgagcctttcccctcctccgccggccgctcgtccgctcccgccaccggctgcttgtccgctcctgccgccggccgtccgttggcgccacatcgtccactcccaccgctcccgagtccgcgcgggaggagaagcgagcggcgcggtcaacggcaaggcgcacggcggcggcgtccccggcgtccgccgcgagggaggagagcacgacgagggaggagaagggaggagaaggcgaggcgaaggggaggagaagccgagaaggcgatttgctgagggtgggggtaggtgaggaaaaataatttgtgtgcgctacccgtgtccttgcgtagggtgccgcccactgcgggcttcgtttcttttatctgtgtctctatccaactaagccacacatatatgggtacttgcactgtggggtgggtgttttggactaactttttaggctaggggtacgggccccatagcttgcactgtgagaggccttactacaccgcgatgcgcgatcttgttctggctggcagcttttttgcctctggtgctctacatgataatggttgaaagcgatagcatttctttcggagactattctcactcaattgaaaattaactatatctatcaatatatttatcaattcatctgtcagtattgacaacaatctgaccatttcttttgacgtcgtgttgttattgacaccgaacatttgaattgataaatatagtttcttctatatagataaatttgtttatatatctttatctaataaaaaatacataagaatttcggtttaaccgtcgccgatgatggccgtctagcgagcttccctagcattctgaggctgtgttcgtcatttgttgttcccagccagaacagtccgtacgaaaaatggagcgacatattagcgcatgatcaattaagtattagctttttttttcaaaaatatattaatttgattttttaaacaactttcgtataaaaactttttgaaaaaaacgcacagtttaaccgtttgaaaaacggacgtgcggaaaacgagggagatgggttgggaaaagtgggtgccgaacacaccctgaggctgtgttcggatgtacgtattaccaacccagtgcacacggaaaacagagcggtccattactgcgtgattaattaagtatttgctattttttttaaaaaaaatggatcaatatgatttttaagcaactttcatatagaattttttttaaaaaaaatagatcaatatgatttttaagcaactttcatatagattttttttaaaaaaaattacaccgtttaacagtataaaaagcgtgcacgcggaatacgggggagatgcagcctgagtccgtcctgattctaggagacggtatcccgtccttcccgtttcacgtgcaccagctgcgagggggaacgcccgctgcgcgcgggcaaaatcgctcgcttgcggccttctggtccatcattcgtactagccccacacagaccacagcggcggcacgctgcacgcacgcaaaatttccaccggaaaagcccataaaatccaggaaaacgtggtggttttgccaacctcccgcccctcgtccaaaaaaaaggcccggaaataaaagcggattggaatctggtggctccgggtccgtgcggtgcgggtgcggctcgctcgacttggcgtcgttggagtccacctgacctcctgtcctccaccgcccgcttcccctcgcctcggtcgtctcggcttcgtctactcgtctcgtctcgagtccccgactcggaaagtccaaagccccaatctttccgttcctccccctcctcctcccggatcggaacaggagagcgggagctccgattcggtagcttcccccgtcgattctccccgccgtaagcgcgatccccccatttccacctcttttatttctttccgttcttgctcgatccggttcttggaaactagggttcttgggggttgggattgggattggggttggtttctttgcatttcggggggggggggggggggggtcccattgaccgaatcgaggtttgttcgcaggatttttgccctagccctggctgacgccgctgctgctgggctggggggcgccgccaatcgttcgcgatgtcgtgggggcgattccaccgcgcgccgttcccgtcggggatcccggcgatgacgaggtgctccaggcaccagccccccgcgccgcccaccgtggtggtgatcgatgaagacgacgacgacctaggcgacggcccctccgatgaggaggtcttcataatcgatggtgatgcggcgaaaggccgcgcgtcttctgggtgcaagactaagagagggaacagctcgtgtagtaatgtgattaacttagatgatgatgatgaggaggaggaggagggtggtggtggtgatagggcaggacccagctctgccggtgctgccgctggttctccagcagtgacgacgcccggccgtgtctccccgagaaacagatatggactggattatgtttctgacagttatgagagtgattcgtctgaaggacactccgacggagatgatggctcggattgtgagattcttgatgacgcctctgggtcagctcgcaaacagtgggagaaggctgcttcgaggaaaagcatgcctcaaggtttccggaagagtacatccacatcaagtgccgagtcaagtacacagccagatgaaagtgaggagaatgatgcagaatgcgatataaatgagtacatcaggaagtattttagtgaagatgtattgaagaaaggtggaccaatcagtacaagcggtgcaaatgctaaaccttcagttccagatgcccatgattgttcaaagggcaatgcttccaatgcaaatgaagctgaagactgcaatgccacctccagaattgatcctgacccagcttgtaatgacgaagcaactcattcccaaaatggttctgtgcctgaaaaaactgcagaaagaagtcaatctccacacatagatgaaacctttgaacctgaacaatgtacagactacagctttgtctctgccaacagggtttttcctgcatgctcctcagcaaattggaaggatcaaagtcctacatttgtcagtactcctgaaaagctggatgaaaagttatctgatggcacatatgcacggaaggatgaaacactaatagatgctcacaataaaagtaccacaaagaacaaagagatgtgtcctgaaccagataatggttctctcgatggtcgactaacagaagatccacctctttctagcagatgcgactgctcaaagcaatccgagaaaaaatcggcacatttagatgcaaactgttgtgcatctgctgcttcctccaataagaatccttctgcaaatgtcatattgggaggttgcatgccacctcagaaggatttagttgatggtccagaaaaatcaggccaacctgccgtggctcaggttgctgcagacattcaggatggtctaatcggtgcacgtgaaaagcacaaagaatccgatgagtacaaacgggcacaggaggaggagtgggcatccagacagcgtcaactgcgaatacaggtacgatttgtgccgcttttagtttaattgttctaaagttatacaagaaggatgtgaactgcatgaatattagaatgtaaataagttcagtgttaatctcaatgagcattatgctattgcactatattgttggaatgtttagttttgaggacattgcggcatgatagtgtaatcacaaaacaaataaataaatggatagcaggctgagggaagcaagtagcacctacatgcaattcatgatgtttccttttaaaaattattgcaggctgaggaggcacagaggttgcgaaaaagaaaaaaggctgaagcaatgcgattacttgacatggagaagagacaaaaacaaagattagaagaagtccgtgaatcacagcgaaaggtatcttgttataacctctagcgtattagcaaacacttgcatgattctctattgtccgcctatgtgttttcaagagcatttggttgcttcaatctttatgtgctattgtttaatatttagattgttcctttattttgttgaatcagaatgaagcggatatacaactaaaagaaaaataccgaggggtggtgagattggagctcgaaagtatggaaagaagatacattgatatggcttctatattgcgtgcattaggcattgctgctgaaggtggtgaggtatattattcatattcaacctatctcttccttgtagtagtaaagttattaattgctgctgtttttcttcttgttatatcttatctgtctctccagtacaatataaaatgctagtatcccttgtcccttgcatattgctgttaaactcaataccttataacagtaagcttcatgaacagttgtatgttgtccatttcatgatatccatctcattcacggaccaaccactaattgatctctaataaaaagatgaggaattgccatacattttcatgctaaattgcaatctggaaccacttaacctcttctgaaacactatgatggactgaaattttactccctatgttgaatttttaggcacctctagatttcatcttgttgattgaaacgcacacacaataaactatgcaaaatttgtatacaccatttctggctatcaacttccatgctttacattcacatccatgcaattcagttgcaaacaacactatttcgcatggagagaactatatttaatgcagattattgcgttattactacaagtagtttggtttttaccttcctttgatagtctctgcttagttcaaagccgggtaacaaattttaatagagggagtgataattatacttgatttactaacggataaacattgtgaagcaacatttcttaggaaaattggcaaacattatgaaatggaagtagttatgttttatgtaccatatgaaaccaacttacgaatctgttacttcgagtgaattaacttattacttgttattgttgtggcatatgcatagatagatatatgcacttggaaattgtatttcaattttctatggagaaatcccaaattcgtttgtttatttatagaagagatagcttctcatgacaaattttggaagatttgccaattattgcctctggcaatctaggcgagatcaattaccaccttatgccatgttctgatataagttcataaaatgatacccataaatgtaaataaggaattattgatctcttcccgctgacaattgtttaatatgaaacttttttcaggttaaagctgcttacaagcaagctcttttgaaattccatccggacagagtatcaagaagtgatatgtatcaacaggtcaaagcagaggagacattcaagttcatttcacgcctgaaagagaagatgcttcgagtttaatactagcatatccctgttcagttaaatacaacctctgaccaatatctttatgttaaagttgtggctagattaatttattcataggctgagttctcatcagccggcacatagttccacagttctgaatgccattcttagaagactaatgcttagcattcgttatcctctcttgagaatttttagtggtaggggagtcagcagtgacagtgagcttgggcgccttggtatatttcttggtttttgtaatgggtaaaatgtttgtataggagtgacggcagaagatcattatatacaagatgatctcccattatttaactgagaatgtcacgccttattttctttgtaaacagtcgaacgatttatgcctatcaacttgttcgcatacaatttattcgttatgcagtatgcgctcaatcagctctgccggtgatcggacagattcagctccaatcagcaagataacggagacttattgtctacaaagtttatttatcttacagtaatcacactatgcacaatgctgaaatttcgctatttaagtcacacatgacaccaatggagatggttggaaacgggaaaatttgttcatgctactcgcatatattacatgggtaaatactggtgggaggaagacggtgctggacgaagccaaaatatacacattgcagcttgctactaatgctgaatttagggctaaaatgctttcctcgtctcgcaaccgcaagatgacaatagtactagtagtaaaccagagcagcaggcgaccggaccgggtcaggttgcaacttgtgattactggtatggatctgaagcctccttagccgttgatgtggctcagcatccatggtggcagcccaatgcgaacatgctgtggctgccctgctgctacatcctctatcctttcgccagctgctgcagggtagttactgtggaacgaataagcacacctcttagctacatcaccaaccaaaatgacaagaaaaagcccgctggcgttttgggggaaaaggggcagatttggcgtgttttcagacaaaaaaaagcgtaaaattctgaggtgcctaaaaaaggtttgatagttattggtttatacaaccttgttagaactttcagttgtttggtggttggtgccaaaatatgcccctattaagttgttggtatttttaatagtattttagctaatgtttgatttgctattaaaatatagtgataacatatataagttgacaaaaaaatgtagcacttccaatatttgtctaggttttagtatcgtcaatattttgatatggtagtgaactaaacgagccatttaattttgttttctaataaagctggatctaatgatctttagtccaaaaggttattcgtctgtgctacataaggacgaaactaacttcaggctgctagttacttacctgatattagttgttggaagggcttccctcatcatgaaggaggatgatgaggaacttgtttgaggttgtgtctggtcccattgcacttgttgcttctggactttctgcttctccaccagctgtaggaaggagcaagggttctgtcaatttaacttgattgatgttaaacaaaccaagatcagctgaagcatggaaactagggggcatcaaggctagcagcctacttctttctgtaggaccttattctcctcctgcagtgacttttcctgcagcaagaatccggcgtgcatgttagaaaatgaaagtgtggcagcacttgcagttgcaagcatggcgggaacttaaaataagagtatgaaacataacacgcgatggtatcaactggtggccggccaaagatttctcgagttttgacaaggttatttctagcaagtcccagtactcaattaaaggtctaacatggttgacatcattaccttccgttgaagctcgttaatggactcgagcattagttggctctgcacataaaggagatttgtaattgtcagctcgtaaaacatacaggacatctatatttagctgtataaaaaccatataaattttgcacatattgttgatatcagccttgaataattctcatcacaaaaaccacctttctggatctgatatgtttcaacgaattttccagctgctgctccagctgctgcagctctttgagattcaaagattcaagatcctctcccatgaggtgcctgcaggatttaaggcgaacaattttatgtcaacagtgtatagtacataatgtcataatggcaccagttgtgagtagtttccaattacttttgacatttctgtattgtctcaaccttagccttcagtttcctatattcgtggcaccagttgccctatacaagcaagcatagaagatttacattaataaatttgagtaaataggaagtatcacaatactattcatacattagctgatatttgaaaaattgccaggaagaactgattgtgcaaatgattgtgccctttggagtaccttgaatttctatattaacaagtgtaactttaatcgattttggcactgcatatagctaaaactgtggacacctagaactgcaagatacctccgtggagaattgcttaggtacagtgtatattgaataaatggatttacttcagtgtgcttgcagtaaaatatgattaactttgtcccccactccacacttaccttttcttctcgacactcatcaaactaaatttactggtggatgtacagtgacctccacaattctaagcacagaatcactaatattacaagtttagaaattgaatgtgctgaagagtatacaatagtgccatccaaaatctatatagagaaaagctctaagcagatagtgcatgttaggaaagggaactataatgtatgtttccttgacaattcatcagcgtgataactatattatctactatctccaaagtagcaaacatttctaggaatgataacagggttacagtctgcctagctagttcagctttttgtaatatcttgattagaaaattctcagtctcactctttatggtatggaaatatgacttaccactgtctgcataataactacattagttcagtcaacaatgttcatacacagcaacttcttacaaaaaatattgcaaacgaagaatatgcatgtctacatgggggatgctaattggcgagcgcaagtcagttacggaactggcgcgcgcgccagctggcggtcccacgcgatttttttcctttttttttgtgtttcctttttttccatctttttcgtttttttctttttttcgctattctttcgtgttttttctgatttttttaattgttaggatacgtgttttcaaaaatatttgagctgaaaattttcaaatcttaacttgaaagtttttcaatctgaacttgaaagtttttaaatctaggcttgaaagttttcaaatctcgagttgaaagttttcaaatctgggtcgaaagttttcaaatctaaacttgaaagttttcaaatgtggacttgaaaattttcaatcgcgagttgaaagtttttgtcaaatctaaacttgaaagttttcaaatccggtctacatgtatctagccataaaagaacttctgattttggagtacaccattagtccatcaaccccaactaaagagtaaagattattcgtaacaaatagacgaatggatctttttaatagcataattgactatagtaagtcccagctaaatgaaaacaaggattatttaaggttccaaacttctgatgagccacgccaaaagttctggaaaatgtttattttgttttatttgatgaaaaatatgttttgtgatattctctggcacacaaaattccataatgagtgttgatgtagtcatgcatccaaaatttttttttatagtttttcattaggcaataactatgattttgttccagtaaaatccacaaaaggtatattgaatcatagtgtaaaaaatgtttgaataagagggaactggcaaagctgtatacgtgtaaacaaacatggaagataaatttgatctaatttgtgaacaaaatttcacttatgaaatgtaacaataccacaatttttaatgatctgacctgagagagagagcctaattaattgcaccaatataaagaacagttcagtttgagttttcaagatttcagacagcaaataggttcaattgggctgggatgccaaaaggtcaggacgctatgtaataaaaaatggatataatctaatttagaataaatctacatatttgataagtacattgaagtaagagattactgttcaaagagatgtaaagcaatatttattaaaagttgatctacataacaatggaaaattgccataaaaaatgatgcctaattgatttatccaacttgaggagagctaaaatgttggatgtacccgtcttgaatgagtcaaccgaaacaggtgtagtgaaaagttcaaaaaataaacaagatattgagatatgagaaacaacagaattagagctctttatttttacctgagtgtcagattcagctgaaataaggaccttttctgcataggagtagcgctcataacgttcaaggattttgtccatactgtgaaaaatgaggaatatacgtttcatcatttgaaataattgtaataataactaagcagtatatatattcttccatctcaacaacaaatgcacatatggctgtaccttttcatatacaggtcagatacatacactgtatttatgattctggtctgttttttcttgaagtccatttttttaagaaaggataggaatttaacaggaaacctactttagtttccaggtttaaaataaaacgaaggaagaacaagaaagttgcacaggcgcgcacacacacttcaaaatctacttgagtgcaaccccttatgttttaacatggagttgttttagaaactgcgtatgcagtattgtcaaaacgaaaaggtgtatcactgtaacatcctaactgaaggatgcccatttctttgaatgtcttaataggtaagttagtgactatcactatgatgagaatatatatatataagtaatacaaaactagatattgttatatatttatgtgttgaagtaacttacatattgtgtgggaatataatatcaatacgatttcacttgccatacatgtactaaccaaaatcataggactagcagcatctaacaaaggccctcaactactaataatctctagttcaaaacatgaataggtttctcaaatgtcacagtggatattatgacatgtaaatgcgtaacccataataaaatgccatttgttttattcaaattcttttttgcaattatgtaaaaaaaagtcatgcttaaactacctttgatgcttaaaacacatcacaacaaaataaatgacaattacgtattttttaataagacgaacggtcaaacatatgtataaaagtcaacggtgttatacattcaaaatttaaatgggggtacttcgtagtggtgtaaataacaacacctacattttgcagtttattcttataagaacttatgtaagatataatacagaatagatttgccaatctacttctaacacaagagttggattaacacaccacccccccacacacagaaccctaaaaaaacaataaattgttgtatttatgcagttcatgaaaacggttttttgggcaaagctaacaataaacattttcatatatcagaatgatcagcttttggtggtagcactgatatggttcaagttctgaaacattattaagtcttactccatccgtttcatattacaagtcgttttgactttttcccaagtcaagcatctttacatttgaccaatttatagaaaaaaaatagcaacatcaacaataccaaattagtttcgttaaatttaatattgaacatatttgataaaatgtttattttgtgttagaaatatttttatttttttctataaatttagtcgaacttaaaatagtttgactaggaaataaattcaaagtaacttataatatgaaatgaattataaatggagggagtagcttcattgtttgctaaagtatttccatgttcttgaggcactttgaacaagttcactttataaccaaaggatatatactttctacggcatactaaaatgtcaacctttcaaaagggtctgtataaccttttggggaaagataatatgcatatatatagaaggtatacttctggggcaaagtcaaggtaaacatgtaatacaagcatacatgtcaagaaaagcttaagcaactgaactgtatctcattttcgttaagaaaaagaaatgaaacaggatagcaagtataactatctatagaaagaattaaggggaaatacaacaccctagactcttaagcaaacataactttgttgaaagagaacatatttgcttcttattcctagacagggtctaatcaatgataatcaagtaagatcacatgtgatattgggttgtctacattaactaaatgaatactctgccgcgttgctgcgggaaattaagttgcataatatgtacaaataagatgaaatatgaatattaaaactaaaacaaattgatacttatgagtttaaggcctaaaaatgattgagattacttggtgtaatgagagaagaaagaagagaaaatttgaaccatatatctattatccaatggctagaaataattggggtaatgtagtctaataagaggagagaaatatcattaactacacttagtggagatgaactatataagtatataggataacttgaaattaatcaacctatggaaaattaacaaaattattacaaaaatgaagtgtcaagagaattaatacagtattaatgcttaaaagatattgtgaataatgcaatccaaactgaaaatttatcattagtcccggatatatacagacgttgctacagttcagtcaacagcaggaatcaactcaatactgtataaccaaatagctgaacaggtatattatgcggttatgagtttgtatgtcctacgcgagttggaccagtaggcctccgagcaagttagaccaattaatgcccgcaaatatatatccattttattattttgggctaacttataagagaatatttgtatttttctgaatcaagtagactggaagtctggaaccctaatagcgtgtgagacagtgagagccagagttaactcattgccgactcatctatatacggctagatgcaatactacaagagtcttgttgtgaaaacagcatgcaagtcgctgcgagctctattaatcaaagcagagttctgaacttcgtgcattggattaagatggaggaaaccaactttacaattctactgcttatagttaaaaagaattaaaatatctcccgagtcacttcaaatatgactactgtttgtctgtgtagacgttcatcgtccaaagagcagtaggagagtattttactacatttgaagtacggagagttttctaaattggcacccaaacaaatatgaaagaactagtgtcttgctactcctaaacgacaagcatttataaatattacccatcgtaccaatggagtaggctcaatattcttattggcgcagtaggtaactacttgcttagctttaacaagaaagccagtcgatctattgccttgtgatgaattgtaagtggttgcatttgccgctacgtatgccagcttaaggcatgctaattaaagtaacatcttaattaaagttcgaagaggatttgtcatgtttcccaactaggttcatgaaagcatctgtttaaagctaaatcttggaaaagtcttaagaaggattaattagcataactacagtaccctgcaggaacctaatggagttgatttccaaataagacgtttaatgacgtacgagaaacgaaaaaaaaatcagattaatccatcggctcgtgtactcccaccccaaacttgataccttgaaatccaaacactgttacctcacgtgaagctctactcctatgtcttaactcactgatcaatggttagagtgagaaggatttcaaaatatgtgatactaatgactcttatctagagatgtggttgctagcattatggggatgcccaacacactacccttattggattaaatcagcgaggagttaattaagttaattagtcgttcattcatagaattagaatagagtataagctgataatcactgatcatatggggagtctgattagtagatataaggatgcccacaaaactgaagaaaatttataacagccagatcaaactctattcgtatgtagtgaggaaaaaggagagataagaaaatttttaacttaaaaaatatataagaactggaattaaccatcaaactctaagatttgcatgttgacttaacaaagcttgcataacaatgcattaatagtaaatcattgtcgaaaacatcaagaaggataaatatccttcagatgatatggtatactggaagcatccaacgttttgcttcttagttctaaatttctaatgtctgtttcttcaggaaccatatgcacatcccaagaagaacctgacagaaaaggtagaacccagcaactaaagcgctaactaggatgaacctttagcttataagttcttttttttcctgttaactcctctctacctcttactaagtcttaacatcttaacagacctccgatgtaatgttgtaacctttgtacctcccctctgaactaagaaaatcgaatgagttaagtgggaaactctcccccaaggtgacttttcgataaaaaagaagcagcatgaaaccagtctgtaatcaggctagctagaagcatggatgtttcttcagaaaccatgtacatctcaaaaagaaccttataggaaaggtagaacccagcaactaatgaaccattagattgaactaatgacagccgggaattaagaagtaaagattaaaggccagccctagcttataagtttgttctagtaaaatcttttcgttctgaaaagcatggcatgcatcagcaaagagtccaagaaagctagaggcagacgaaccagcgaaaagggttccaacaagtcaccagcagcttaagatatgaactcctccatctcccgatgcatcccgtttcatcttctcccttaatatgcttagttgcctcaagagaaagagatggccagggagagagaaagaagatctaaacgagcccagaattaatatggggaatagtgaagaaagaagaggcacacacaacacaagcagcaagttcagtagaattttagatgaacacaagccaagaccattttaatccccaaataatcccaggtccatcaaatctacgtactagagttcctagctaatcacccctctcccctttgggtgcaaagctagcttgtcgccaagcaagcagcacccatcggcagggccaaaaaaaaattccccaaatagcgcagcagcaacgccctctccagcgaaagcggagcataaaattaccctcgtacgggcactgtagctacagtgcacagatgcaacgcatctcacctcacgccgtcagctcaaagcctgaaatagcaaaacacgctgcctcctccatcgccggcaagcaatcaacaatcgcagcagaaattcaaacagattattggggataaccccgaaacacacgcaacaaaattaattcgagcaatcaggacagatcgaattaatcacacacagaattcaaaggcaatcgatcgatacgaacagaacggaaacgggaacacatcatgtagcgcaaggattgctcgattaagcgaaaagaactgaaagcttagagacaagcgatgaggatgaaatttaatcaagcacacgtacgtacgtacgtaccatgagtcggtggcgtactcgtagagcttgcccttggtggagaagatgatgagcgcgacctcggcgtcgcagagcacggagatctcattcgccttcttgagcagccccgacctgcgcttggagaaggtcacctgccggttgatcttgttctcgatccgcttcagctgcaccttgccccgccccatcttcctcctgttcttcctcctcctcctcctcctcctcctcctccctccctccctctctctctctctctacctccaaccaaaattaaccctacccacctcgctatcagcgacgaccactagccctatagccacacctatccccacacggcaactactggtggtggtggctgctggctatccgcctatcccctagccccggcccccatcacgtggacacggcgagacggcggcggaatgcgtcgcgcgcgatgggggggaccgatcgatcgatggatggatcgatcgagtgggggagacgacgacgacgaggaggaggaggaggaggaaatggggggattttaaagggagcgcgcgccggatcgtcggaggaggaggaggcggtttggcgataccggggtggtttcgatcgcctccgctgtcgaacggccattgggcgaggcggcgccggcccgggccccgcctcccggcgacgcgtgcgtgcgtcgtactctcgtgggcttttctgggccgatccttttttgggccgtctcgtctggccaggcggtgggggtgggccatggcttttcctgcccaattaggccgcggcagcaatgcgtcgtgatgggacgggatggctcctggcttggcttggcttgggtcggccgcaaaacagtgcctgcgtcgtctcgtctcccgtcggccccggcgagggggtgtgcccatcaatggcgtcgcctgtcgctcccagagtggatgattgcctgattggcagttggcacccctgcagctctgctttgggttgaatgcagcaaaggcattcgttctctttctgctgcttttgacctttgtggatgaatgcatttcctccgtattaaagcctgtttagtagatcttcatctcttaaaatttaactttaggagttaaagtttaaagtgaagttgtgtagcggtctgaactcaactccacctctctagtttattttgtgataacgctctagccaactatatttctattttaggtgtagaaactatttggttggactccagctatagaatgagtggagctatagctagagccatactaaactggtccttaaatagacttcattttcgatcgctttaactttgttctttcttacctataattaatctgtaactcaaaattattcctaggttatcatttgacgataatttattttcgtattaatgagtgttcatttgatttttcttctctcaccattagtttgttagctttgttctaaaaatgtagtcttcgtagaacggagaaagtattttgaacaggaagcagggacctactcatgcagtaggatgattgattgccctccctatgcacagtaggaattttaacattggcttgtctggttctcaggggctatgcaaaacttgagctacattattaaatattttggatcagatctaacatcacatcgttttggatgggacttaaatacggacttcactgtgcattcttggatacactagctagaatgttatttcattctcttataaaattactgatttaattgtacgattggatctatctgtctctttgtaaggatgcaggcgatgctatcttacataagagcccatattctaagttaattttcatcaacaagtatataataaaaatggatgaaaaaaaagtacaattaggtttactgggcctcaaagcctgcaagcatgtcgcgttggcatccctattttctaacatttatgtaatgattctattttcccaactaccatatattctaccttaaaacttgacttcttgacgtatcatagcagcatctctttaagatatggtgtatgattgataatgttagattccccatgggcagaactaggtgaggacaaaaagctcagctcagcttgtaagccaaattagctgagcccgagcctccatcatagctcttttccgaaacgagccagagctgcagaaccgtcaataagttataatgtatttggttgaaagggatgagatagtcatgtggggacaaatctattttcagggtgttcggttcgataacaggtgggacagaataatccttgaaatggaatatttttctagatccaggtcaactttatatgaaaaaaattaacggactcgaattgagatgcgggccacaccctcacattccttataaaaaaaataagagcattatatcccttatgccaaagacatagatggggctatcccatctcagaaaataaggatggacctaacatatcccacttcatccccaaataaacacacttctatagttgtacatcaacttgcaattgccaatgcatttggtagtttcatgatttatatgtgcaatacctgtacatagtggacccaagggaacagagaatcatgggaaatgactataggggatgaaccaagggaatatataggacacattaaagtgttgctaaatactagagataccccgagaaattcccctctgaaatagggaacaaatggaatttaattttggatgaggggattgaatccaagataagctaagagaacaggaactgtgttgtcacactcacatgttatgcttggggaatttgctgtgacaaggggaaaaaaatgaaaatgtaagcaaaataccaagtatatatcttattaactgaagctcaaccatagtctccaccccccacacctcaaatcatctctctggtccctgttcgattttgctcatgttagcatggaaaacacgctgagacattagtatccgattaatgaagcattactaccatgaacttgaaaatggatttatgtggtttttaagaaactcctatagaattcttttttcaaaaaagtgcaccatttatcaattcgataagtgggctcacgatacaagagagtagctcaccccatcaattcaaaatgaggccaaaacccctaaccgctccgtcacttcctcaacctcactaatgacaatgcacagtgcccgctggaaggccacttcatggtaaacccgcctctaaccgggcaatcacaagattaaaaaaataatatttatatgatctaaattattattattaataatagaaaaataatcttgttttgtttcaaaggagggattttccttttttttcatttaccttgagcgaagctggaccaaattgggatctaatatttttttgtccgttgactttgagcccttctttctcccctccctcctccccgcacaaattttcataatctctccttcattatatatgacaagccatcccaacaactttgcctagccactaaatctaaccatcttgattagctgaccacactaccaagggatccctccttagagtggccctattaaagagaataataataaaaaaaacaccgtacatgatgtataatgcttggtcatacctcaaagagactggtgattgtgtgaagttagagctatagcattgacacagagcgagatgtatgacaatgatgatatacgcgtaggggaaattaattagaatcgcctgatcacgagcgagaagttcctatattatatgatgatgatgtcatgccattgtcagcgtgtgaagagccttgttgtgctttgaacttgctagttatatggccgtgtggtctacagttgttaggtaggtagttaatttgttggtacgtatgattgttttagcccgattttctcttcattttgagactaatcattcggtgttgggggtggtggtataacagttctctccttaaaacgagtcacttttttttaaaaaaaatataacgatgaaaaattaccgtgattgtagcatgcagatacacgatattggagaacaatgtgcgccgtgtttacttccaaagttattcttcaaaacttcaactttttcatcgcatcaaaactttcctacatacataaactttcaacttttctgtcacatcatttcaatttcaattaaatttctaattttagtgtgaactaaacacaaccgtgggactctatcctatgtgtattttacctctaccattaatgctttatgccgaccacgaccgtcaaatagctgatgaacgcacaacatgcaatcctgcaaaagattacatactttacagtcattggatagtaaccaccatatcagcgccccttgtggatgacgacgacaactttcattctcatgtcgtgtcattgccaaaagatatggaagaaacttatctttacatgcatagtgtctgcacaatgggtgagatgcaaacatgtaattatctagggcaatagagattaattagagaattcatattactgaaaagcgacaaaacacatgttgacagaagggataacccactagataacaatattctttctggcgcctttctagcaaacattcatcgtggcacaactgctcaactgcttaacctgctgttaaatgtttctagaaaatttagatttcttcagaaaaataaatcgtacggaaaattgctatattaactcatgcacatttcattttagcatataagtacaatagctactcttactgactaaatgtaatgtttatttcttttggaacatgggtgctcgtacttatgactaattagtctttcattagtatagacgacgtacatgttgacagcgagacgtttgtgcactccgttaattttaagatataccgacccaatctttttaaatgtgctcacatgattagggtgtgcgtgtgtgtatttataaaggtgagcacgcacgcgttgtaaacgcttgtgtttgtaccagcatatgcacttctgagcacacctccctaactgatattgatacttttttgaaacctaaactgatattgatactctctccggtaaaaaaagtactgatattttgatatgcatacagtcaacaagtttaaattttaaccatcaatatcgctttgaatattttgattttgattagattagtctttgaaaataatttcaaaatattataattttactatattttttatagattttattctagtaattaccaacaaaacaagtgtcttgatgtgttaccacacttcaatatccagaacacacttagagcacgtataataaaatgttataagggggctataagagttaccacaccagatttatgatgtgttggagaagagaatggaggagacagaagagaagtgtgcttctgtagcaagctgtaatatgagctccaaaaatctttaagagaataaggtgtgcaaaatacttcctccatttcacaatgtaagtcattctagcatttcccacattcataatgatgttatattgatgttaatgacatcaatatgaatgtgtgaaatgctaaaatgacttacattatgaaacggagggagtacgtattaatagtgctatatgtataactatagttaaatattgtatgggtaagatattagattagttataaatgatatggtaagagcaatgtgatccataagcaaaccatatatatatttatgtggaagagaaaaataagaaaaaagtgaaaagtattggctctcatgcaagagttagctctacacatgcttaaaaaaagtatatattaaactcatagtaagagaaagagagagaagaaaaaaatatagtaaggccggtctactatatatattaaactttatatatagctaacctattatatatatatgttagctaaacaatgatcgctaattaatagtaaggccggtctactattaaacttagttacgttggctctactattagggagcagttaactgtttataaggcaaaaaagacaataaattaactctcatcggtactgtacataataacgttaggcggagagcataaatgcaaacaacgcacaccctgtgcaaatattcgcaaggatggatcagatgcagatccgcagtgaaggagaaaaagacgggtatatatatgtatgaagttctaaaaaaaaaaaaagtgtacgaggcaggaagctgccggcgtcgcctcatcactcatcagattccacctgcaaccaaaaaaaatctgtggactgtggagcatggagatcgaccacaattaaattcgtcaataattcctgcccaaagctagaaaaacaacaagccaatatcaggagaagcatattcctaagtgagattacaacaagagagcagttaggccacacatccctctccacatagtactccatccgtcccgtaataagtttatttttggctcattatatttatcccaaaattaattttatttttagtgatcattgcatcgaagtttatgaaagtacaaaataattatactgagagtatataaagtgagaaataattgcattgagatttgataaaatatgggtgtttcggtctttttgttttgtatcgatatgtgcgagatgaataagacaggggtaggccatagcttcgtgctacgcaacatagtagattaatttggagatgaagcttgggaggaggccacgggcagacaaagtcgttgtcctatccaaatgtacgaccatctctgtctaatacatcttcgcttccgtccataaatataaggatttttattcttaagtaaatgaaaatgtttttgtaaacaatggttatttttaaaattttgaattgcttgtattaacttcccaagcatctcattggctaaaaatatatagatgttagtgttttagaattatattgtgatacaaattttaaatcataaaaatgcttatattttgaaacatagggagtagtactctagtgccccacctggctccacgcggcccctctcttattcattttcttttcttttggtggtgatagtgcgtgtggcatttttatattttagccggtcggtggatggacctcgaccgtgccactaacaatgtccactagtttcataccttgcacgtgagtgttgtctagtcatcatgactatacgcatctctttacctaccgatcatgcttcatttagaatattatgtacagctacctttattgatggggtgaaattatgttgtctcttatacgaatattacgcacttttttaaaaaagtttttttttttggcctaaggtagctacatatgataaatggagtgcgatatttctaaaagtaaggtctataactgttgagcactacaacatcgtggatatatcgacttgatatcacaaacatgatgtaaacgcaaaaaggatggttgtcccgcttttgttttcacggtaccatatcacgcaccttactcgcagtgacagtactcacaaactgttcatacaagacaaaactatacatagtagtagtacattacactgagaaaagtttggcaagcacttaattagcaacaaattgaagaggaaggagagaggaacttctgaagcaacatatagaatccatacatatggccaaactcagctgatacttgaccctgattaactgaagctgaaacggtagctagctagctagctaggccatccactcaggaggataaccgcccggtggcggcgccggcggctggttcacgtccacggcatgaagcctgcaaaaattagcaagtgcatatttgccatcagtccaacatgattcatatatagacaaccatcactttgccattattaggacaaatcttgataatccgtggaaaactaacttgtttggtgcaaaagcggaattaatgatttttttcccctctaaatgaaagctccatttgtcaaaaagagtgtagaaatctccctttttctaacaaaagtttagcaaggatgaagacagtgcagttcacgcacccgagggcctggaagaagtgctctggttggggaggctcactggaaaacacgccgccgccgccgccatggccattgctgcagtttccgttccatggaggctgtgggggagctgcctctacgtcgatctcgtcaagctgaaacaggaaaggatcaaacaaccaaattaaccaagagaagagcaacgttgtcactgccgatcactacagagaatgatcatgatcaagaaacatgtgcgttctccaaatagcatgatgtcaaattgatgcagagaggtgaaggctgagaagccgatgcatgcattttatactgctgccatgccaccagccggggggacctaccgacctatatatacttggcctacttgtgcatcatcggcttttcaatcacgagcccacaaatctacttcagaggagatcgagcaaaattcttgggagtggtccaagaagcgagtcatgcggtccctaactacaaatgcagagggagctttttctatatggtttctaggtagcatttgagtaaatggaaatctcgtaccttccttttcaggaccctgtttgcatcttgtagcatttgttcctgaagaaaagttcaatattggagcaattagataaaaacaaaccgaatttgcactgaaagaggtacaagtattcactgtagtgtagtatatcatttggcggcattgaagaagatatttcagtgttacctttctctttaggtcgcagagttcatcaagtagtacctgagtctgcaaaatatgtatgaaatcatgcacagaagagtattagaagtcacctagcttggagcagctttttgaatcgtagagaataatatatatcccttaattttttaatgaaaaaaaggaa

SEQ ID NO: 10093 - DNA, 26432 bp, Oryza sativa
  unsure (1)..(26432): unsure at all n locations
actcagttactctcaaaacctccaggcctgtgtgccaactgccaaccctattccaattcctctcactagcatgaatgcatgatagaatctagtttgtcttttccttatgctgaagaaccttctacagaagaatgttttgcttttgcttactaatcatagcgtggtcagctgaatgatcttgtcaagccttcatctttactatttatccctctaaaaacaaagggttgcaactattcaatgcaggaccctgacggacaacatcatcgtaggggtatcaaaagggtttgacaagaagcttcagttagttggggtcgggtaccgtgcagctgtagaaggcaaagatctcgtgatgaatttgggattctcgcatcctgttcggatggctgttcctgaaggcctgaaggttaaggtggaagagaacaccaggatcatcgtgagtggctacgacaagagtgagattggccagtttgctgcctccataaagaagtggaggccacctgagccgtacaaggggaagggaatccgatacgccgatgaggttgtcagaagaaaggagggtaaagctgggaaaaagaagtagaaaagctcttctgcttcatcatcgtttcgttcggctggtattatatatacttccttttggttttgatttttccccatgtgtaagtgtaatccatcttttacgaacaaagagaacaagctttttgaatcatgtaatctctcacggcttgtcgagatataggactcaaaatagtggagtcacactgtagagtcactactgtttccatcagcccatgttttgcccttgcagagtcacaccgaaatactactgaattaaactaaggctggttgattaaccttcacgttgttgctgcactggagtccaaaggaaccagactttcagaaacccaagtttgacaaaacagtggtaaacaacctggaagtctgtaagcagtcgccacgccatttaagggccctgagaaaatccgacgcggccgcgcatcagccatcacgtggtccgcctctgatattcccggttccaataccgcgacgcgcgagcgcacgcaaagctgacgcgcaacgcaacgcaacgaaagcgatctcgccggacacggccgcggcgcactacgccccgaaccgaaccgagcagctgaccggtgatcgaagcgctagcaccgtagcacgcgtgtgcacaccaccagcgcaccaaaaaacctccataaaaacacgcccttttgccgctatctactgctcgtagcacctgcttttttgcgtgggccggccggactcgtcgatctcgtcttcatcatcgcgcgctgaacagaagaatcagcggcggcgcatgcacgccaatcgaggcagcgatgatcgtccaaacctctgacctacacaaagtcacaaaccaggctggactggactactgcagtgctctacgatcaggtacaataccattctataataccattctcttgatttatctacttaaacttattttaagtagataaatcaagagagagaaaagcaacgggctacagatttatagctagctgtagcacggactccaagacgcagtgtatctatgacaggtgggattatgtattaatagtgtagtatgtaactattgtattaatgaactattagattagctataaatgaattggagttagtagttggctatactattgaacttgctctaagtcagttatactaacttataaacacattttaaaaagataaaagaagagagagaaaagcggcgtgctatagatttgtagccagctgcaacacggactctaaaacgcaatgtatatatgatacgtgggaccagatattaaaagtgtagtatatatttatatgtaactattgtataaattggctattaagtaactatagatgatttgaacctagcagctgactgtactattaaacttgccctactagctgcggtgtgtgtggcacttttgatcttctctgtgctctcagcctcgctcgatcgccacttaagtcgatataaaaattggacgcctactccagaattgagtagtgcaacaaccgccagctacttggaaaattctccctttcgtgtcatcatgttccccttctctcgcaatcggcaggtgatctacctgaaatcctgatcagcatcaattaattcgatctgctaattaagtagtatcactgattcccttctttgtgttgagtaggtgccatttctcaaagtggaaggcggtgttgacctacttggctgcatctagaatctaccacatattcaacccagtgtaagtatactttataattagtaatatatttgcaatcagcttatttgcacgatgttagttagttgcctgaggctgtttgctacgcaagtcggagctaatactagctgcatttctttataagctagtgagccctttttttcttcacatcacatgcgcaggaacacgaatgaagaaaagcattatacaaccaaacagagcagtcctaactcaccaactaacccaaaagaaaggaatatattgttaacttctcgttcgaataaaaacaagctactttttgtgaagccagcaagcaatctggttgcatcgtagctcaggcacggcacgtcggcagccaacatatcatgccgattcctttgctcctaatctcacttaaacagaagcatgcaccggccactttcggcgtcgcgaaagccggtcggtcgatgagatctccgcccaaatccacgtgtcagtgcacacggagacgcgtatatatacattggcacgttgatcgagcatctaagcttaactgaaaattttggaatcttactgtaaacgcaatggcttgcatcttttgattcagtcactttgctgtagcggtaaccaagcagtagtaggagagagaggaggtagcgattacgacggccaccgacaccggccgccatcctcccttcctttcgcacgcctcgtggagatgcccggtctgcctcgcgcgatcgaatgaccgatccatccatcggccaccgatcgatgaatggtaggttccacgaggcgacaacgaccgcgcggccgggttggcgaaaaaaaaggcgaaccagtaacgcgaccgcgcgagatgggagcggcaatcgcagcactgttcgggcgggacaggattaggtcacgcccggttgggagctcgagaattttctcatctctactcgatcggtcgccagctatcatgcaacaggccaatcgatcgcaaaagcgcgcgccgtggctatcgcctgtatatcgcgaggtggggtggtggattggccgcgggcaacgcaagtagcgcgagcgacacggtggcggggctcggcgcgttgcggcaacgtacgggggctcggttgttgcgagcgcgcgcgcgcgcggacaccgccgttttctgcgcaaccaccgggcacggtggctggctgggcggccgtggggatgggatggatagccccgatgagtacgtcgtccgatgagaatgccatgtgcgccgtgccgggcggtggggatgggctcccggttgttggcggtgttttggctttggctcatggctccgttgcgccgccagttcacaacttcggatccatcccgtcccgtccgtacgtggccccccgcgtcggattcattccgcccgtcgtctggccgtcggatcaaagacggatggctcgacgtttttcgctgtagtttttgctttgttgtcttattttatctgtgttttttgcgggtcctttcggtttcggataggaaagggcgagcggaaagtgagaaaagaagggggtgaaaggcgtaggatccctttctccgaacgggacgcttctatggggcttgtgacgtgctacggtattccatttcccatagtttgtttttgtcctggttttggacgcacgagtcttacaccacggcatttgttattgggaagacgaccaatggaactgtgagttgaatggtagccatggaccatggttctcaataacaacatgtgaaaaagagataaaatggctcatgattcttgaaccattgaaccttacgcattgcccagataaatgtacgctttcaaactcaaccaatttagagcatcaccaacaaattatgtataattttctcctaaaaaattgtttttggttttctaaactgaaaataagaagtgaaaaaattcttccgtctaacagatagcctaaattcaatcctcaaaacttaaaagtgggcccttctattaaactaccaagagaaaattctgtttttttttctttcacgcgcagaaagatcgctatctcccacgcgcgggaatgaaggagagaggcgggattgcatgattgggagcgactttcgcgcccgcatataaacggagcgagcaaccgggggaagagaactccaaaactcgagtaggagggtaggggatctgttggaactgatttagactaaaatccctcaattagttttaggaatcatataggtagcctgttggtgatgctcttagtgcttgggtcgcctgtgcggcatgtataccaacatgcatatacgtgccaaaacgcttcttttctttatgtcatcatctgttttatctctgtcaacttaagttattggtaaattggctaatgcattgtactacacaacattgaaaattttagaaacatcacttgtaaagctgtactgctaatcaattatttaatgttagttgtgcctatcaaaaggccatggaaccaattattagggttttctgtgcgtatcaaaaaggtcacatgatgttcttcgttagcactgtgagagtaattgcatgcacactactgtgtagatgacgtgttcgaacattggactctcgtcaaccgcaagctgatcccattattctcattggccgcatggatcggcagctgcagctgggacccatccacaggtacaagccacattatggctgtgtttagattcatagtttggatccaaacttcagtccttttccatcacatcaacctgtcatacacagataacttttcagtcatatcatctctaatttcaatcaaaattaaaactttacgctgaaacacaacctataactaggatatatacgtactgcacgagagaacgtgctggtgcacgagacttgcggcttgtgggcgcacggcatgcatggtccaggtttccaaccgcagcctgcctgcttcgcccatccgtgcaacgaccccccaactctgaaaggctgctccgaaatctctgaactatgattagcagattaggtttgacattataatcacctcattaattactgccaggtgtttactgtcattctccctacttgacccattttttgtccccgggtcgacgtcacaaaaaaaggctgagcatgattacgcaccgctagtttcactttcatcggttgggtgagtgactcatccagccgtgtgtatgtacaaagtgagatgagaacaccaaactcaccgtcacgtcaggtgagtacgcgcactagatgaaaactgtctagaaaattatcgaacaactgaacatcttttctgggtaaatgatactccctccgtcataaaataagtgcagttttacactattcatgttcaacgtttcaccgttcgtcttatttaaaaattttgttatgattagtattttcattgctattagatgataaaacatgaatagtattttatgcatgactaaatatttttaaatttttcacaattttttcaaataaaacggataattaaatattgggcacggatatccacggctgcacttattttgagacggaggtagtataattcttatttcttttctaaaaatacctcaacgttttaaatatgacgttaaatagttagattgatagataaaatcatagaaattattttcgaagggatattaccgttttgaccctttttatcccggtgcatcgtgtgcagcaaactttttttttcttggtggagctggcactgtagctgtaggccactggtgatcatcctggggaagaacgccaggtaacaacagccgtgacgcgacgggcgcgcgacctgttccctttcgggtgcggacgtgtggttgattgtgtgtgcgagccgaatgctgcctactgccgccgctttttttttttcttctttcctttcttctccctttaaatcttctaggtacttcttcctgacttcctcctccctttcttctctcgccgccgagagacacgaaaaagatggtgggtgtatagctacatattcacgccacaccgcatcgtcatctacacatctccacctcccgcggcatcaccactcactccaccgccgcgcgcttgttcgcagctcttcctcctcctcgcattgcaggcggctgccgactgaatcaaggtgagtggtgtgtgttgtgtgccttcctctctgtaactctgttcatcagtcggagttaaaagacttaatgagtttatgtggtaggattgggtattaattttgatggtgctagctggcgttcttgatgattgcaggaaggtgactgtccttccaaggattaatttcagcttttgattttttggagtgtgtttcactcttcgaactagtcctttgctttttcttccttcgtgtgcttagttcctctcttctttttgtatctagtttggtactggtagtcgattatgtagtcataaatcagttgcaatcagatcaatactttggtctcaattcttctccgtctttagtcttctgtagtagaggtttagtttctcaaccctgctctgcttttgaagaaaaagaatattcaggtaggattctgagttctgatcagtgggagctttgcgttgcagatgaagcggaccatcatcgtcaaagtggacttggaatgcgagcgctgctatgccaagatcgacagggtgctcaccaggatcagaggtaggtgctctcgtcgcacggtttgcagtttctaggatcaaatggtgtttctggcagcttttgagctgggttaatcgtgacaacaaagatgaatctttgagagttcttgcgtgcgcagacaagggtgagttcgtcatcgacgacatcgagttcgacgtgaagcacaacaaggtgatcgtgtcggggcccttcgacccggacaagctcgcagacaagctctgctgcaaggcgtgcaagatcatcaaggagatcgagatcgtcgacctcccgccgccgcctccgccgccggcgccggagccggagccggagccacccaagaaagaagagccccagccaccgcctcctaaggaggaggagaagcccgagccgccgccggcggtgattatcgtggagccaccggcgccggcgcccgagccggagcccgagccgccgaagaaagagccgccgccgccgccgcctcccaagcaggagccatgcccgccgccgcccaaggtcgtcgaggtcccttacccctggccctacccctacccgttcccgtcgtggccgtccgactgctgctgccaccatggccacggcggctgccactgctgctcctgcgggaaggcgccggagccggcgccggcgccggcgcctccgccgccgcagtacatcccctgctacccgccgcagcagccctacccttgcggcggctacaggatcgtctgcgaggaggacccctcctacgcctgcgccatcatgtgacctaatgatcatcgttatcttctccttaattaccttctccgatctctcctcctgtataattaagcacgcaccgtacagacacgcacatatatactacacatcctacacgtactcctctttatctactcttatacactccctctgtaactgttgatttccttacgtcccatttagaggtgaaaaataagtaagtatatatcgtcattaataaacagtcccaagtaaattcatgtacaagcatttgaatgcattttagagagaaaaaaaaaaggaggaagagagagctgttcagtctgggcctttgatggaatgatcgtttcgtctgcaccacgactgctttgctttgctttgctttatttacgttgcactcggggacatctcactgtcgccaccagctttgctttgctcccttgcctccatttgtcaccgtgtggtgatggaaaatcacagattagataatgcaacagctcgctttttcgcacacgtcgtagtccatcccgccccagccgtgtagccagatcggtgcgaaaagacgcggccgatagctgctggtacgcacgaatcacccgcgccccgcgagaccgcgagacggcaacgcgcgccgaggcgatctggacgagacgacggcgaggcgagacgggcgacgtggtggcgtcgcggtcgcgtgcgcctcggcacggctcgatcggtgaggtgagcacgagaccgcgagatcccgcggcttggggcgcgcacgcacgtcggcgtccgatgcggacgtgccaccggcagcggtgcgccaccaccgctttgtcgctgcagctagcgtcgcgtgggccttgccgcatcggctgcgttccgtttcgggttcacgtgcgtgccggtgtttcggctcatgggcctttattttttccggagtttggcaacgctgcggaactggagttttgtccttttggtgttgcgttgcattgtgtggaccgcgggagaattggtggtattaccatgtggggtttgttttgatagtagtatttggggtatgtatgcatggatatctttgttggaatgcagcatgggaactactgaaactgcccctgaactgacagaacatacccaggttccatcgaagatttgttactcatcagtggcaggtgatcatccctggagccaatcaaacgcagcctctttggttagatggcccttgtggccttgtaggcctaggactaacaacttgagaaacaaaaaagaatctataatcagatgagcataaaggtaggcagccaccacacagaccagacagcctcctctgtgtttactgtttctgaacatttgtgatatctggattgcagtgttctagactcgttatccccttatccttaccataacaacagttttgagtttaggactccccagccaacgggtacccacgaggcggccgttcagacgtcctatcaggtggccagggtgcttacgtgtggagcaccgctgctttgcttgacactgtcccattagcaaatctttcgtcctttagccgactgatctgtacgcatccaaccgcagcctcccacctatcatgattcctgacctgtatgtatccataatccattggacatacgtgcgtgattgcacttgcatagtttgcatcttgcagtgcctcgtgttttcagtgtttgattagcacacgatttttattaggagagcctacgtaaaacttgaaaaaaaaaagcccattttgatttcagttattttttgacggttagaagaacatttagattcgtgtgtaaacattaaaccatctccctctttcttcttctccaccgtaacttgctcgagcagaccaagttcgccagcacaccatccttcccgcaccacccccacgcgccgcttctcaacctcgctaatgccggcgagacccactaaccgttagagatgcaagtggatagtcccactacccgcatacaaacctgtttgttagtttatttttcatatgatagtataaaatttagaagaaaaaataaactagaagtgaaataaacatgctaaaaaaacccgctcgcccgtcccacttgcattcctactgaccgtccctctgctctcttctccctcctcacctaagacacgcccttcattactcacagtcatcattttaagctcaggaaaaacccttcatttttcccagcccaacccctcctttaccatgactgtaaccttgaaccctaattagttgggcccgtcctagccgcactagagctggaggagagggatgccgtcacaaatctcaaagtgattttgacggtccaaaatttgatgaaaatcttacttaaatttatatcgaatgaaggttaacaattctgatttgtattataatataccttgcattgaaacaagcccatacattataaagcaatacctttttaatcaactactgtctttttagttttactctagcgtattttctctctcttttttttttcagagcattgtggttttttttcaatgtgcaaccactaattttggtttcctgtgattttctcctttttctctcactactttacttcgacatacgatgcacgcgaggggagcggtggaaaggaggatgacttctcttttaaggtactccctcggtccttccatcccaaattgatcatccctagattatttttgaggttttcctaaattgatcattatctaagtgttatctattcgtttattcgcgtaaaagtatttgtgcaaagttaatgtcatcgttgcatgtttgttcttttatctgtgcaggagtaaatggcactaggactttaggcgcgcttcgcagcgccctaatgttcgttaagagctatgtagcttaggagcatttacaaaaacattgaatagtactcaaatcagagcaaataataggactatgcgagaactgctgagaccagtattatggacaacgaaaatcacattacaacgggcaagtaggctttgcaaagttctactgggattatttaaagcatgtcatcatatctgtaattgtatataacttcactgtcattcaaatattgaaaaaaattatatcaaatcatcatttttttttaatatcccatttagacttagatcaagtacacagatagccataagcacaatcgatagattctataatcactttaaattacatattgtcggtaagaaatgttacaactttaacaatggatttatcttagtaaacatgttcttaatgtattcattctaacagaaaccgctatacaactcgaaccctgccatcacgtgaggatcaaaaatagagcttgaattctgcaagataaaatcacctaataagttagtccaaaatccatgttaacttatcctacttaaaagagcaagcaacaaaatatatatatatatatatatatatatatatatatatatatataagtctatatacaaatggacctaatcattcggttttgtaaaaaagagctaattaagtaccattatgtggcaatgatatattatatgttgcagaccatgcacctaaaagcatagatatcaagaaacatctgcttatgttaatgaagcagaaattcatttgtaggacagctcccccctaaaatagtctctgattaactaaatgttttttatgaggcaacagaaaagctagttggttagataagacactctttagaaaagtcatatgcccaagtaatacattactgaaatcatttctgatgaacaataatgttttggataactaatcacattactccaatacacatgggagttctacaaagtatgtggcatgggttctcagtctttatagttaataccaaaatctgaaacgtcacttccaaaatgcacattatagataaggctacagtagtagatgactaataagactgcaactctacaatgcttgaagaacataagtccagaaaaaaaatcgtacaccatttaccaaaatggacatgtacaaagcgaagaacaagcaacacataaaaaatctgacagtcctgttatatggtaagttgctaacaatgccctataaaaaaaagcacgcaacccaattatatgtatagaacatgtttacctccaaagcaaataatagtttcagatttgttgttacttgccgataccaatattacatttatgaagcaaacttgatttgtcaacaaattaaggagtgctcatgtatgtaaagaaacaaagaatttgggaatggaaggttatagtagaaatgagcattcagacatgtgggatctgatatggaaccttcggtgggtacaaattaactgacaaagcgaacttcatcacacaatcatgtgcaaaatcaaaacaatatagtgacatttgtcaaacttacctgagtttctagctttgtcagattcttggagatttttcatttcaaagaagcatcatgtaaactcacaaaataactgtgtaataagtaaaagagtaaacaacaattaattcactttccactgattcatcccactactgcactgaaacgcagaatccttcagcaaagcagtacttgtgtatgaaatcccttgtaattgcaatatggatgcaaaactgcatctttagatgctagcaatctgacatggtggcaaacaattagtaccaggtgctgaccagagcaagtcgctgagaagaatgaagaggctgtactctcatggaaaaagcagcactgcaggcgcagacagagaatgggaggaagatcatgagtggatcgagcataaaggaggtgattatttggccattgcaacaacacatcttcttccccagtagcaaaattgtgccatatcgacctcaagccctcaaggtgcctgggattaccatcaacgctggaggtagaacatcgaacgcaattcaaattgcagagccgcacgccaccaacttgaaccaaagtcgaggtcaggctccatcccaccggatcgagtggttgcgctgtctctggtctccactcagtccctcaccttctcctgatgcatcatcacccagagaagaagatagatgagtcaacggtagcgtgagaatgcaaggggaggaagggagcccaagagtcgtacgtaagggagagctaggagggagagaggcggcggcggcggctatgccgacctcgagcgcaacgcactggattgagaacttcatgttgagcttgagtgcacctacccaaaatcaggcgatgggccaacagatcgatccccacacagccacaccatcgatctctatcacagtgcccccaaagctagctccgcatggtccactccccctgctagaagagaagggcctgggtcagcagattgatccccatgccatcgctgggaacagatgagaaggggaaggcggggccgacgatggcgtgaggatgcaagcgaagggagggagggagcgccaggagatgggcaggataggggagagctcgaggggcaagtcgtcgtcgccggcgaggagaagcgggggagggaagaaaaagcggcggcggcgcaaggacaagggaaaggaagagaagggattggggaacagtagtggctagggtttcgggggattgggtgttctttttttttttcagaaaactcccttattttctctttttcagagcgctgtcctatacttgaaatgttgtctctttcacgtaagatatatcttgagggcctttacataataatacataagacaacgaacttacattgaggaacttaagaaagattatcaaggtaagggagggtttttttttgcaaacttaccagctccagcgctctctggtcgcgagatgctgatcggacggcgctgcggacgagtaaggagagcgcccgagggcctttacataagaatacataagacaacgaacttacattgagggacttaagaaagattattaaggtaagggagggtttttttttttttgcaaacttaccagctccagcgctctctggtcgcgagatgctgatcggacgacgctgcggacgagtaaggagagcgcccgaaaaacaccagccttccaacgcgcgggggacgtggatagacgcgcgtgcgtccacgccgtccaaaattctctggtgcgagcagatcgccccaatctttaactaccccgattgctgcatgcctcgtatgtattcaattgcatatttgcatgcccatttgcatgtataatacaacaccttaaatcgataaggtgtattttcagaagtaatgatgttttctagtcttgatgttgatgttgttcgtaaatatatgatcaaattgagatggagggagtagtagagacggggttcataattccgacgaaaactggttgaattccacgaaatttcgaggtttcaacgaggctcgaaaatagaacccgtatgatatttcgacgagtttcatccaaattcaaatttgaattgataaaaaaggaaaataaataaataaaatattataaatagtatgatactcatagaatctattgggatataaattttcaaaaaaaataatgtatttcgtgtatttactaaaatttacagtaggaaagaaaagaataacaaattaaaaaaaggaaaacactttcagtttacctcttttcaagttaccgattgacatttcgatgatttcgctcggaattttgttaaggccgaccagtttttcacgaacttattggtaaactcagggaatttatattcaaattttagtttataaccccacaaaaaaaattagtttataaaatttgttcggaatctatcggctttccacttgattttatgaaaaccgttattccgatagagcctgaaacggaaggccatctcggaatcgtaaaccctgagtagagatagttgagacgagcgtgtgattctctaggcctaatttgaggaagcccacgaggatttcagacctctccgggaagcccaagaagaaaaactcaaatggaacgatgggctgggagcctgggaccatgttgaactggtgtttcttcgtgtttttttgcacgcggagaaaagaaagatgagtctccagttaactgaacttccttctatggatcatcggcatctcaaattgttttttcttgaaacaagacttcctcaatttttggtacgtgagtaatcgggatgaacgaatgcacagaaatcttttcatttgcgttgcagctgggaaattccttgctgagaaagttcggctcgtctagggaataatgaattccagccggtaaccggatcacccaagccaagcggaaaagtacaccagaggtccatgaacttgtcaccgagatacgaaaacgtccttgaaccgtaataccagacacccgaggtcccctaactttacaaaaccggacaccggaggtccctcggcggttttcaacccggttttgtccgacgtggcggctgagtcagttgggacccacgtgggccccatatgtcagccggccacgtcagcctctctcttccccctttctctttctctgtttctctttccttcctctcgctctctgcttgcactcgtagggacgatgccgcggaagcggccgggagggagcagcggggcacgccgtcgatgcggcggcgaaggaggaggaggacactggcggtgaagggcggtggccagcccggagctcggcggggcgaggcaggagaggcggccctatccatgacagggagcatggcggcggcggcggccccatccctacccggaggcgccaccgacgacgaggccgagcgccgccactccctatccgcggcggcggcccgtgggaggaggacatggcggcgcggtgatgcgggaacaggaggcggcatctcccctgccagccgagcgccaccactccccatccgctttccccctgccggccgccgcgcgcctcctactctcccccggccgccgctgttcttctccccagcttgctcccgcctcgccgctgctcttctggtgatcgccgccttccaattcctccaccgccgccgccatctacgctcacttcctcgcgcgcctccccgctgtcgccgatcccgatgccttctccttctcgcgcgccttccacgagctcgccgccgccaccgccaacttctcctcctcctaccgcctcgccgccgccgccgcggcgagttcttccttgtcgttccgctgctccctccgcggccaccccgccgcggtcttccgccgcccgctccgccgcgaccaggcgcacaacaccgcccgcctcgacgtcctcggccattgccaccacgagctcatcctcgacgcgtcgccgccgcctttgatttgggtttccgccgatttgactcacggcggccttagcccagagcgaagagggcgggcgggggaggccgccgccttgcttcccgccgctgccgccttgctcccccgctaacagagacaagagtgagagagagaggaggaggaagagagagaagaggggggagagggatgaggctgacgtggccggatgacatgtggggcccacgtgggtcccacgctgactcagccgccacgtcggacaaaaccgagttgaaaaccgccgagggaccttaggtgtccggttttgtaaagttaggggacctcgggtgtgtagtgttacggttcaaggacgtttttttatctcggtgacaagttcagggacctccggtgtactttttccaagccaagcatccaagcttggacctgtgtgcagttggatgcaggacactagtatcaccgtgtttagttttaaagttttttttcaaatttccaacttttccatcgcatcaaaacttttctacacataaacttccaacttttccgtcatatcgttttaatttcaactaaacttttaattttagtgtgcactaaacgcttttatgtaggatgtgtctgtccgtgtaaatagaaaatcgcctcggagtgggtgtttctcccactctctcattgccatgtggtgcagttccattcgtggagtaaattttaattgtgccgtacgagcagtttcgttggaacacccaacggagcactgtacgaccataccgattgcagtcttgctaggtgtacaattggagtaacgatatatcgtgcgtggtgccgtggtgactggtgagcagtgagccgggtgattattcgtcgggatcgatggtaatttttctcatggttttctacagtagctcgtgcctcgtggtgtcgtgggtttgtggtctcgcacatgaaagcagcatgccgggctcagggctaacggggacatatatttatgccttttgcatattacaattttgctttgccaaaagggagaaaggcatattcgatgaaaaagaaaaggttttgaaagtatacatgtgtgtctctgttgctttatcatttacaaccctatcgattaatgaaacaatgtatacgtgcgtaccttgctaggcacgttcgaccatgaaacaatgtactggctctagctattcacatcattaagatattgctcaaattttccctgtacacgaagggcataggcaagaagaacaatagggagccatcgtttcgcttattcgtgaaataagcgaaatgacatatttataaatgaaaagtaatctgtgaataaaacttttatatatgtgttcttagcgatctaaaagtaaaggctgaaaaaataaactttgctgaaaaacctcaaaatcagctccaaatttaaggttgaaaattcaaattttggctgataaatataagcataagcgaaaaaagagaccgatatatcatgtaataccattcatctctacctcttttttctagtatatcttgtggtcgagacatctcttatttgtctctcttctcccttttcgtatatccacataagcaaaataatgggtattccctttgttgtaaaatataaggaccatatttctaaaaattattgtaaattttaactaataactaaagtaacaatactatatatgttgagtatcatgaatatgatatcattaattagggttcctttgaaacgcagtattctcaatatacttaaaaaaatacagaattgaagtattctagtaccttaagtcttgtggattgaaaaaaaaacagagaaaattctcacgaattattgtttagatggagcatagaaaaatgtacagtaactagaagatagatggacacaaatgatcttttccaataggttgaagttcacgttagaattccttcaaaatctctacgtctcgagccaatctaaaggaatttcataggatactttccttttatccaaatgaccacgtatgaaagttttttatagaattgattttttttttcttctaaaattcctcaaggaatattttgttccaaaggagccaatagtatttgaaattgcattcatatgatgttcaattttatactccacctgtttcgaaatataaggtgtatttcttgttttctgcaaagtcaaaatttatttttttgactaataattaaactaaaaatatgaatgttagtctcatgcatgtagtatcacttgatttatattttaaaatatattcatacaacgttagttttttagttgctgataacatattataaaaatagtattggtcacagtataatgttggagaccgtatagaaacataatacgcctcatattgtcagacacatggagtaactgttaatactattacgaaagaaattaaaagtgaaagttttatgttggagaccatgaaaacttgtatggtattttgaagaaaaggagtatatataaggctttgacttgtctagatgcatatgtcaaggtacaagctatcaacatcgaagggtgcactacaactccatatatgttttgtcgcataagtcaacaaaggaaaggatagtgaaatatctttcacacagcaaatattttcttcactttaaaatatagtattacactgatgacttctgatattatttccatcccagtttgatcactacctaagaaaaaggcactaaaaccaaggtcactaaaacatttatcatagtaaaattaatcctcatcgattaatgtggtatgtcggttcgtgcgaatcatgtccaacaaaaattaattcatactttaaatgttgcatagattaaaccaataaaaattagtcttggttagttgcacgtatacagttatatacatgcagggcactccacggtgcacatgtactatttgcacaaagaaacaaagagaagctttgttaaatgatgattattttgaaaaaaacttaaaaatcttggatgatgatcaaattgggatagagagattatatcgtttgactatgttttgattaaaagtttagtgtaaaatgtaaagttgtaagtcatgcttaaaatatatttagtgataaaaataagacacacatgcttacatagttttagttttctctaagtaagactaacgatacaaatatcatatctaaaagttaatatagtccatatattttaaaggggaagatgatagtttatgtttgttagaatttaaaaaaaaagtattccaaacatataccaaataagctaacaatatggaggtgtagaattgtgggtcatgtattggagtcaaaggctaacttgaagtactactaaaataaggatagatctatgacaacaatttttaatggggttgtttggcgggacttgttgcagcatctttgctacgctgcgtaacctcgtcgcttggctacagcctacaacagtggacagacttgagggcttgaggccgctacatgtaggatgtagcggctgctcgttgttggtataactagttgtagctgttgtagttattgttggctggctgctgcaacaagctcttccgaacaaccccaataataaaacattcaacttatttactcctacgatagttaggctctgtttagtttgcgaaaaaaaaaatttttggtgttagatcggacgtttgactggatgtcggaaggggttttcgggcatgaataaaaaaactaatttcataactcgcatggaaaccacgagacgaatcttttgagcctaattaatccattattagtacatatgggttattgtagcactaatgactaatcatagactaattaggttcagaagattcatctcgagatttcctccctaactgtgcaattaatttttatttttatctatatttaatgctttacgcatgtgtctaaagattcgatatgatgtttttaagaaaaacttttggtgaactaaacggggcctttattaaaactttaggaaattgattattctttagcgtaaatcgaatagcactggatttcatcatctgcctcatagctcaaactcacgtgtgtcagggttatggataccacatacctacctaatacctaatagtagttgattaaatctcggcaggacccaccatatactatgtcttatactgacactgacctcggatatggatgaagttccggataaggaaagacaaccagagttctatatggaaacgacaagaactactcggattgtattcatattggtttccctagttttacttggacaaagggacacttatgggtataaatacaagaccctctaagaggagaggggacacggaacaatagatcaagacataagatcaatatacaagccaacatacgccaagacaagacgctaggtatcgacttcagagataggcatgactagtcccctacgatgcctatggctaccgtcaggagagatatagagttgtctctgatctatgcggattcgaggaggaaggttaccatgttgtcgactacgagtcaatactacagaccgccaggtcgacaacagttagataggctaccccaaatattatactggtatgattatggtgaataagagcaataccggcttcggccaacaggatgtagggttattacctgacaattcaggggcccgaacctgtataaaaatcctcgtcgttatctcttttacctaagtctcgtatacatcttagtaccaacgatccccatactatgtaaataccggaaccgcgacatcaaacgtcgaccgacaacgtggtacagtataaaaaagtttttaaatatttttaggtctgatcaaaccatcgaatccaatcaatacagggcctactctaccaaagttctggcctttgggaagcatttccccatttttttagcacttaccacgagtggaaaaggacggacttctgcgcgaggaagaagaaccggatgacgttgtacggctttcctctctcggtttcccgacgcgaccgcctccgccgccatcgccgcctctcctcacctcgccgcgccgcgccgccccgcctcggccgcgcgcgtcccctcttccccgcctaagccccgcatcccgctcacccaccccacgcaccaacccccgcctcgcctcgccgtcgtcgtcgccgtcgccccctcgcctcgccgcctctgcgtggtggtgaggtagtaatcgctgttgcttcggtttccctttggttgggaggtgggaggaggaagacgaagagagggagagagagagggagatattatcttgggctgccttgccgtgcagtgtggctcgctgtcccactcaggtgcggcgctattccaatccgtgcttatccccggcagaatccaatccccctcgcggcttttctccaaaagcgctccgccttctcgcctatttcgctcgctgccgcggccatgattccccgctgatacctccgcgcgcccatttggttcctcctcgccgaatcccccttcgcagccggtggttctagttgaggaggaggaggaggggatttggttgggggcgagggggaggagggggttgtggagatgtcgtcgtcgcggtcgaacaaccgggcgacgtgctcgcggagcagctcggcgcggtccaagcacagcgcgcgggtggtggcgcanacgccgatggacgcgcagctgcacgcggagttcgaggggtcgcagcgccacttcgactactcgcgtcggtgggcgcggccaatcggtcgggcgccaccaccagcaacgtctccgcctacctccagaacatgcagcgcggccgcttcgtccagcccttcgggtgcctgctcgccgtccacccggagacgttcgcgctgctcgcctacagcgagaacgccgccgagatgctcgacctcacgccgcacgccgtgcccaccattgaccagcgcgaggcgctcgccgtcggcaccgacgtgcgcacgctcttccgctcgcacagcttcgtcgcgctgcagaaggccgccaccttcggggacgtcaacctgctcaaccccatcctcgtccacgccaggacctccgggaagcccttctacgccatcatgcaccgcatcgacgtcggcctcgtcatcgacctcgagccggtcaaccccgtcgacctgcccgtcaccgccacaggcgcgatcaagtcgtacaagctcgctgccagggccatcgccaggctgcagtccctgcccagtgggaacctctccctgctgtgcgacgtgctggtccgcgaggtgagcgagctcactggctatgacagggtgatggcgtacaagttccatgaggatgagcatggtgaggtgattgctgagtgcaagagatctgatttggagccgtatcttggcctgcactacccagccactgacattcctcaggcatccaggtttttgttcatgaagaacaaagtgcggatgatatgcgattgctccgcaacgcctgtgaagatcatccaagatgacagcctaacacaacctataagcatatgcggatctactctcagggcaccccatggttgccatgcacagtacatggcaagcatgggctccgttgcatcacttgtgatgtcggtcactataaatgaggatgaggatgatgatggagacactgggagtgaccagcagccgaaagggaggaagctgtgggggttgatggtctgccatcacacaagcccgaggtttgtccctttcccgcttaggtatgcttgcgagtttctcttgcaagtatttgggatacagatcaacaaggaggtggaactggctgctcaggcaaaggagaggcacatcctccgcacgcagactcttctctgtgatatgctccttcgagatgctcctgttgggatatttacccaatcacctaacgtaatggatctagtgaaatgtgatggtgcagcattgtattaccaaaaccagctttgggtgctaggatcaacgccctctgaagcagagataaaaaacattgttgcttggttgcaggagtaccatgacggttctactggattgagtaccgacagcttagttgaagcaggttatcctggcgctgctgcacttggtgatgttgtgtgtggcatggcagctataaagatctcttcaaaagatttcatcttctggttccgatcccacacggcaaaggagattaaatggggaggagctaagcatgaaccaattgatgcagatgacaatggtaggaagatgcatccacgatcttcattcaaagccttcttggaggtagttaaatggaggagtgttccttgggaggatgttgaaatggatgctatccattctctgcagctaatattacgtggctccttgcaagatgaagatgccaacaagaacaacaatgcaaagtccattgttacagctccatctgatgatatgaagaagattcaggggctccttgaactgagaaccgttacaaacgagatggtgcgcctaattgagacagcaactgcgcctatcttggctgttgacatcactgggagcataaacggatggaataataaggctgcagaactcactggattacctgtcatggaagccatagggaagcctctggtcgatctcgtcatcgatgattctgttgaagtggttaagcaaattttaaattcagctttacaaggttggctctatgttgaacttggcctttttgtaccatccaacttaatcataatgtgtccattattttttgggtgactaacttaggtcttctttcttgtatttcaggaatagaagagcaaaatctgcaaattaagcttaaaacatttaatcaccaggaaaataatggacctgtaattttgatggttaacgcctgctgcagtcgtgacctttcagagaaagttgtgggggtttgctttgtagcacaagatatgacagggcagaacattatcatggataagtacactcggatacaaggggactatgttgctatagtaaagaacccttcggagctcatcccccctatatttatgatcaatgatcttggttcctgcttagagtggaatgaagctatgcaaaaaattactggtataaagagggaagatgcagtagataaattgctaatcggggaagttttcacccaccatgagtatggctgtagggtgaaagaccatggtactctgaccaaacttagcatattaatgaacacagtgatatctggtcaagatcctgagaagcttctttttggtttcttcaacaccgatggcaagtacatagagtcactgatgacagcaaccaagaggacagatgctgagggtaagatcactggcgccctttgctttcttcatgtggccagcccagagcttcaacatgctctgcaggtgcagaagatgtctgaacaagctgctatgaacagctttaaggaactgacatacatacgtcaagaattaaggaacccactcaatggcatgcaatttactcgaaatttgttggaaccttctgacttgactgaggagcagaggaaacttctagcatcaaatgtcctctgtcaagaacagctgaaaaagattttacatgacactgatctagaaagcattgaacagtggtgagtgccgtttgttccactgtagtctgacatatagatatttgccaacttttattctgagcccttccattgttcttgaaatcacgctttaatgatttttaaccatagcaaatttagatggtcttgcagattcagaactgaaatcaccactgtttcatgccttttctccaattatatagtctatatgtagaacaacatgatatgtaaaaaaggaaactttctatttagtggttggaattaacctatacacggaaaattccattggtaccataacagttccagcactacaaaataagttcatataaagctgtataatatgcctattccatttgcttttttcacgcacaagatctgatagaatacgtattggttactaactctgtgctcccacagctacacggagatgagcaccgtagatttcaacctggaggaagccctgaatacagtcctaatgcaagccatgccccagagcaaggagaaacaaatttccattgaccgtgattggcctgcagaagtatcatgtatgcacctctgcggggacaatttaaggcttcaacaagtcctagcagacttcctggcatgcatgcttcaatttacacagccagctgaagggcctattgtgctccaagtcatccccaggatggaaaatattggatctggaatgcagattgctcatctagagttcaggtaagccacccatttgccttgtggaacttatagtgatgtttcttgaactgcaagtacagctttactggtaatagaaccaacttaaactttgcatgcaatgacctaatttccattactccaactcaacttctctggggagaaatctgtttgttaacatgcgttcagtaagtactagaggcgcactattgagttccagacacctttattcctgcagcttgtgtttactgtccatcttatcaatagaggcaggacactcagtagtcacataaaaactgacggttcaaaataggccttccatattatctcaacataaacatagcataaacataaaatgcaatatcgtaacatctgagtaatgactatataaccaattcaatgatgcaacccttacaactatttaagataacggataacccggccgacaacccttaaaactgtgagtaaaaggagattgattagatgatgcgaagctttagattgttcgacgagcttgctggggcacaaccccacttaacagaagcgtaatctaacatctgcccaacggttggctccatgcaggcttgtccatccagctccgggcgttccagaggctctgatacaagagatgttccgccacagcccaggtgcatctcgagagggccttggcctttacataagccagaagctcgtgaagacgatgagcggcacggttcagtacctccgggaatcagagagctcgtcgttcatcgtcctggtagagttcccggtcgcccagctcagcaccaagaggtgcaaggcttccacgagtaaattctgaacttagggctatggccaaaattcttgtgggtgctgtattgttgttgttgctgctgctgctattagcagatcaggcagtctgaggagtacgttagctgaagatgtatcagatgtgtgtagcttgtgaaagtgaaggtagtggttggatagatgtatttgtcacgttgatgtctggagagctagtgagcgagctactaggtgttagtgtaatttaaccggcaaatgtatgaacgaattatgaataaaatcttcacttgtgttgtcatgaataaaatcttcacttgtgctgtcattatttccgaaattattcatcaaattcgaaaaaaaaagaagtgaactatttatatattttatcggacaaatacacaaaaatcttagaattatatcgagttgtgtgtgaattagattgcgaataggcccttggtaaaaatgaaaaaaaatatgggggttttcagtttttacaagcccatttggtcaatactgggctagccgttgttggcccgaccgccggaggctcactcgcagcggtcgatcatggcggggagggagaagaggcggcgggtggcggcgctcgacggcgaagagcggcggcggcggcaggaggaagcggcgaccctcctccacaggatcagaggtgcactccccctccctctcgtgatcaatcgcttaaaaaacttctgaatccttcatcaaccgaagtaaacactcgt

SEQ ID NO: 10094 - DNA, 830 bp, Oryza sativa
tatatatctatatacatatgcatactgcatcacatatatatgtatagatacatatatatatatgtatgcatatatatgtattgaaacatatatatgcatggtttatatatatatatatatatatatatatatatatatatatatatatatataaaccatgcagcaacaggggcatgaaaaaaaaaaaggtcagctctatctttagtcccggttggtgttaccaaccgggactaaagatagagctgacctttttttttttcatgcccctgttgctgcatggtttatatatatatatatatatatatatatatatatatatatatatatatataaaccatgcatatatatgtttcaatacatatatatgcatacatatatatatatgtatttatacatatatatgttatgcaaatgcatatgtatatagatatatatatgaacaaaatatatttacattatagaaaatgtgtacacatgcatatagaaacatatgtagtcatgtattaattacaatccattatatgtcctagctagctacgatttcgacgtagtagtactcgctgttagctcagaagctaaggaccggtgaattgtgtttccgtcgtagtagaattcacccttgggatcaaggatttcttcgttgatgaatcccatgagttgttcttgaaccgctgcgataaattccttgtgtgtggtcaggttatccctcatgcgaataaactatatgaatgtatgaaattgattagtaattaaacaagaaatcgctacgtaatgaaattttgaatttatttgtacgtacatcgagctctcttgtggtgatgatttggtct

SEQ ID NO: 10095 - DNA, 5057 bp, Oryza sativa
catatatatatatgtatgcatatatatgtattgaaacatatatatgcatggtttatatatatatatatatatatatatatatatatatatatatatatatatatataaaccatgcagcaacaggggcatgaaaaaaaaaaaggtcagctctatctttagtcccggttggtgttaccaaccgggactaaagatagagctgacctttttttttttcatgcccctgttgctgcatggtttatatatatatatatatatatatatatatatatatatatatatatatatatataaaccatgcatatatatgtttcaatacatatatatgcatacatatatatatatgtatttatacatatatatgttatgcaaatgcatatgtatatagatatatatatgaacaaaatatatttacattatagaaaatgtgtacacatgcatatagaaacatatgtagtcatgtattaattacaatccattatatgtcctagctagctacgatttcgacgtagtagtactcgctgttagctcagaagctaaggaccggtgaattgtgtttccgtcgtagtagaattcacccttgggatcaaggatttcttcgttgatgaatcccatgagttgttcttgaaccgctgcgataaattccttgtgtgtggtcaggttatccctcatgcgaataaactatatgaatgtatgaaattgattagtaattaaacaagaaatcgctacgtaatgaaattttgaatttatttgtacgtacatcgagctctcttgtggtgatgatttggtctgcaaggcagtggcaatactcgcacacgtaatagccgcacaagttagttccctgcttttgctttgcgcactacaaataaatgacaaacaacgagagatctaattaatatacacttgtatgtatttgaatcggagaaatataaatgtagagcatgtgtactcacaggaaatttgaacttccgcctaagtctttctctccatttgccgcggaccaaatgacggaaccgataccaagccctacatggagtttaaagctatgattcgtagtagcaattaacataacaagattttcttaattaacaaaggaacttatgacggtacctgtctataagttcgaaaaccttgtcaaacgtagactcttttttatccattgagtcatatacgttgacggtgcaggcctccaggtcgatgagtaaaagcacccagtggaatctgcaatgtgcgtgggatgcattacatatgaaacacttagcaagttcgtacgggaatgaaatttggtatgtaggaagacagtaaaattaaactaactctgtgttgtatggcaacagtatgaacgtcttgtaatgctgcgccttcaggagatggacgagattgtcctctgtttcttgtggatattggtcgagcattgcgacgtttactttccgagggtcgatgaatccagtatcgaaaaccctccgccgtcgggccctttgaatctccattctacaacgataaaagggagtatattattttctatggtctacttatatacaaggacctaattaattaaaggagacgtatagtaagaaatctaactgaacgatatacttacaaaatccagcaactcataatagagacgtcgagggcgtccagctggtatagttcgtagattcccctgaaattgatccagagaatgtcatctccttgcaagaagtccgtgtccctgatcctcgctccgatcatctctctaccggtggcgctcatctccatgtacagctgatggaacttgtacatttgtgtgggtagggactgcagcagctcaggcttgacaagcggtttaccgagttcgtacatgtatttcacttccgccttttcgattggtgcgactcctagcaattgatccgtagttagaccggtgtcagtaataaattgttctatcgtcatttctttaccggtcaccaacggctcgatctcctggtttggttgctctccaagctgagggactggtttggactttccagaagatgctttcttcagcgttcgctcatagtccgatagcttgatggcctccttgacagatgcagacatacccctgaagaagttcctgacactggggtctataggaatcttcttttctggacttcgaggcttgaattgtctcttgacttctgatgcaacgtaagcgtcaagctcctcttgcgtgcaatcgtaccccgggtccttgttcttggcggcgtcaactttcgccttctttgttgcccttgtgtgggcaagcggtggagctgggggggcccttgactttgaaggtgccggaagaggagcttgcgggggagtaggtgtaggagcacgaggaggagtcggtgcaggatcctgaggagtcgatgctggagcctgaggtggagacggtgctggcggagcatgaggaggagacggtgcaggatcctgaggaggagatggcggagccggaggagatggtgcacgagacgccacttgtcgcccagggaggatgatgtaccgcctgcgccatagaataatggcatggcatgtgtctcgtagatgcgtctcaccgtctcctctagggtaatccagctcgaggtcctcgtacgcgccttcgaccaactcaacttcgaccttggagtatcctgctggaatcggcctgcagtggtaagtacctgaagggtccgttgggatggccatgcccgacgccaccttcatgttgtgagagattatttattagtaatcaacatatataagcagcaactagcggaatggctaaatcttacctttattgataagttcttgaaaggaatatgcagctcacatggtgtccgctgagtgatgtcatcaacgggacaggtcgattcgtcctgtgtttgcatggcgtccatgctctgtgatcctacctgccccgttgaggcgcagctgctacggtttcctgacgggctcaccattgcaggaggaatggtcggctggggatcatgggaccgatgtgcggccatgcgttcatcaaccttccttgcaacctcctcttcatgttgagttcgtagctcgatacccggaactctaggtctgcaatcttcgcctcggtatctctcttgctcctcatccgactcctgtacgtgtggatgtcctccttgaaaccaatcttccaaggaatcacccctttccctcgagttcgtcctggatgctctggagtctgcagggcgagtgtcagctcgtccctatctctgtctggtcggaacgtgccctgagaggaggcctccactgcatctgttagtcgtcgcgcagcctcttgtatctgatagccgaagaccagtgagccatcagctgggttgagcgttccaccgtgagcatagtaccagaacttcgatcgttccggccaattggctgttgccggttcgatacccctctcaatcaagctagcctccatctgctcccacttcggcatcgcgacgctatagcctcctgaccccaagtggtgatggtacttcttcttggcggcattttctttgtttctttccatcatcgccttcccttgttcacctgtcttatatgcaacgaactcgtcccagtgatcccttagctttgggaatgtgtcgaagttcggtgtctgccccttcagtatatacttctggtacagatctcccttgaagctctgaaactgttctgccattttcttcagagtccaccttttcactttgtcctctgtacccgcaggaaggatgaatgtctcgagcattgtggtccacagcatctctttctccgaatctgggacaaagctctcatgatctccgcgtgcccttgttcttcgccagtacaccgtactgacaggcacgttatcccgcacaacccaaccgctgtgacgtacatagttcttggcggcttcggccggggcactaggacgtccatcttcttccacttccgttatgatgtgccgaccctcaagcttcttcgctgcacctcgttgcccgcgtgccctcttctgtccaacggagggttgactaccactagcctcctcctcctggttcccctccacatccctttccacgtgcccctgctggttcccctccgcatccctctccacgttcccttcctcgttcaagtactggtttggatcctcgttcccctcttcttcattccagtactggctgcttccctccgcgattgtatcgtacaatatctgttcctcatcgcggtcagccatctgttgatacaagaaacatctgctaagtcacgagacatttatgttttaacaatctaattcatgtatgctaagtgtaaatgtcgtacattagaaccctacacaaccttacgtgctaagtctaattacaaatcgtgatataagctaagtctaggtgacgtatattatacaaccctagctagtaaataattatatactaagtctaattacaaataaaataatcttatattaaaactcaaataatattacatgctaatactaaaatagtcatgtatatgctaagtgtttcgtgcgtatatgctaagtctaattaagactacaatagtcaattgctacttgtcgcaccaattccgtagtcaataattacataccaagtctaattacaaataaagtaatattatattaaaactcaaataatattacatgctaagactaaaatagtaatgtatgctaagtgtttcgtgcgtatatgctaagtctaattaagactacaatagtcaattcctaggagtcgcaccaattccgtagtcaataatgtcatactaagtctaatttgcaataaaataatcttatattaaaactcaaataatattagaacactacacaatcttatatgataagtctaattacaggtctaataatcttaattacattgcattacaaatataacaatcatttatattattacgtcacttgcctgctccaattccttctagggctagctcttccactcaggcttgacggacgactccgacaacacgtcttttctgcaagataaaaaaaatgtattaggataaatgcgaagtaacatatatatacatgtatatatatatatatattgcatttcacgttaacgttcgtcctcgttcgt

SEQ ID NO: 10096 - DNA, 19199 bp, Oryza sativa
ccgggactaaagatgccggttaaaataaccgggagttaaaatgaatccttaccaactgggactaaagatgtagccaggcggcaggtttcttttttcctttttttattgtttttaacatcgaataatgatttcactccatccacaaatcaaccccaaatcaatcaacacagatcacagcacaaaagatatcaccaaatcctcaaatcaatcatcaccaaatacatcacaaagtgtaaaaaaattacataacaagttctacaaaaaatcatcacaaatacatcacatattcacatcacacaaatacatctcggatccaatcacaaattcttaaaaaacagaaaaaaaatcaaatacatcctcgatccgcgccggccggctcccctccgacagaggcgcaaccgccgcctgccgcgccggccgcctccgcgccagcgcctccgggccggccgccgcccctccgcgaggcctctccgccggccgctcctcgatctgctgccggagagagaagtagaagttgtagagaagggaaggataaggataacacatagagggaggtgaggagaaggagaggataaggataaggataaggataagagatagaagaagatgaggagttgggaggataagtcatagggattatatcctgcatacggaattttagtcccggttggtaataccatacaggactaaagatcgaaataatctttactcccggttggtattaccaaccggtactaaagtggtgatctttagtcctagtttgtgccaccaaccgggactaaaaatcctcggtcccctgacaagcccttggcagagaatgaaccgggactaaaaatcttctttagttccagttggtgttaattaccaaccgcacaccaaccaggactaaagatcaagatttttttaaccgggactaaaaatgattttttgtcccgatttttatagaaccaggactattgtagtttttggtcgaccctgcaaagatcagttttatagtaaaattaaagatcaattttacagttgatttatttaatttttttatctttcagtctttgcttccaaaccgtatgaacataagtacaaattagaagtctccccctttactacggagaactaaacagttggtaagtactccatcctcttcatattataataagtcgtttgactttttacctagtcaaacttcttcaaatttgaccaaatttatataaaaatatactaacattttcaatacacaagagcaaaattaccatttcacctatcgactagatgtatgttagcgaaggactaatgagaagagcaaaacaaatgataaaattcgataatgaatggtataagagggagggccgatttcacgtggaaaaatgaatgtatcaattaatggataaataaatatttttctcttatttttgaggctagaaaagaggtcatcaccagttaacacactactctgtcaatttgaatgggctttctcacctttacgactaacaagtggaggtggttgcatgatactctcatagctcgtttttctgatataaacaatgaaaatggtcagaagcaatataacattctttccatgggaataatcctcgggcggtcggtaactttttatattttaactgtccagtggtgatattgtaacataacacaaaaagatagttgaaaattaaagtttatgtatgactatagaactttatagtagtatcttctagatcagtaaaagggtccctatgctatagattggtgtagaatctcttctcctggtttcatccctttcttccatcgacgtgattggctttcgatgtgtttggcttggacgacagacttggaggtgccccgcctctgtttggatgtcgagaagaaaagtccctggtgacgacttgactcgtgaaggttgtcagggttggccgcggatcgcgccgatgctggaatagtcgctgcagatcgagttgaagcgacatcaccgagcgcacggtgcgacaacagcgacgacgcgacgcgatccgaagacatcactgcccgcggtaactgcctcccagaactggcctttcgcggcccactcgcaattcacaaagcggccctgtgggctatgcatataggaaaaggtccaatttgactccatcaaaatatagctcaaatctaatttatatctctcaattgtaaaactgaatatatcgactcctccaacactcaataccgtcgaaaacaacctcctcaactgttttgattgtggtttttgctaacgtgacaaccatgtggaggcctagtcatcatgatattaacagtagagtgaggcccacgtgtgattcctttccaatctccttccttctcttcccctctcccccttcctttgttttcaggcttcacgacagctagtggctacagggcggaggaggacctcgagggagctgggtggcagcgagttactccccaccttgcaacgagctcgagctccacatccatctccatcgaggaggataaggagtgaggagccaaggaggaggtgcttggggcgaccgtgcgtgagtgggagaagagctccgtcatcggggagaaaggcgctcaaggaggtgttgacacgccgtccctaagctggcccccatcacccctatctcctcttggcgccaactaggccgaggccatcatagatcccgcctgcgactgtcgcctagactacatgttcaccctgcacgtggactcggtggacgacctcccctgccgcgcttgataactccctgatctctgtccacttccaccgtcaaagaagacccggtcggatgggcaccatcccaattggaggggagtgctcgccgccaccgccgcttctcctcgccatttcgcctcctccgtcgctatggagaggagggactagtctctttcctccagggagggtcaactggccagggggaagaggaggagagagatacgaggaagaagggagggagagaaagggaggagaagaaagagaagagtcacgacaggtggacctcacatgctaattaaccaagttagattatgtcaacgtgcctcatcaacgaaaacatttaaaggagtcaactaaatcggttttaatagtatagcgtttcatactctagtattacggcagagggtatgaatcaaattgaagacgcattttagggacttaaagtggacttattccatatatacacagtctacaagcaatgaccgacgtatctgatgggctggtgaaaaagatgctccccgtggcccaaagcagtgaatgctgccgtcttcccgttgtcaaaagactctccgatacttcttctttttctttttttttcgaacttcaactctaacacagttaggcccatttggaatggaatgacagaattttctccgatacctatcaataaggcggtcacacacatcctatgacttggtatttcacaagtttctaaagaagaagtatgcttcccgcgttctatcagtcaacccaccctgtaccacctcatttacccgtcctataagtacatgtcaatcaattaagagttctctttgttcactactagtaaaaaacaattttcctgcaaaaggagctctttagatcgtagaaagagcgtttccgcgtgtgtctgtaaaaatcggcatcccattttcacgtgtagacctttaagaggcctgcacgtgaaaatcgattttcgcagacgtgcctcttaacggttcgcacgcaaaaataagcctattttcgcatgaggacccttaagaggctctcttaaaggcccgcctactagtctatcattcccttcttttcgctcctcaacactttaaaatttttcatccttatcctctcactcctctcactctctcacctctccctcactctcttaatctgtctcctctcttattctcctctcgcggtctagtgtgtgcggcgagtgcggccagcggagggcacagacggcggtgggcgcggacggcggcatcgagcggcttggcggtgggcgcggctggtggcaccgatcggctcggtgacgggcggatccgcctcggcaagcctcctgacggtggcgggcggcgtggtcgacggcgaaggcggtggctccctcgcgaagctccggcggcgatgacaatgaggaggcggccggtagcggcgctgatggccccacgcatacgtgcgctggctggatccacgctgccctcgccgccgacgacgaggaggcgatggcagccgggagcggtgccgccggcttcgcgcgcacgcgcgccgccgccaacggattctccggtttccattttttgaatttttattttattttttggaattttatttttctatgcaggcgacattacccgaccgcacgcgaaaatccgattatcccttgcgattgggccgtccacatgcgaaatatatattttcacagacatgggacctccacatggaaaaaaccctttttgaccgcacggaaaaatccttttttattagtggttggagctaattcttaaacatgatattatggttaagcatgatcacctaattttttatacggaattaatggaagagtaatggccggtgcctgatgaatccataggaccgcttaaactcgtgtgtggcgttgtagatggtgcagtagtggtataccatacatggtgttggtaattttttgacaagttgacaagcacgatcgtagcatcttaagtcttgtggtgatcctagagtcgccaaccacctcgatctagcaaaaagctaaacctagatgggttttgataactaaaccggctagcggagccgatttctagataactacccgtctcgtgggcaaacggaaggttttcaggacaaacctacaaagagatgtcgcactctcgcagcagcggcggacggtttacagcgcaaaccgacaaagatggacaaactaagagaaaactaaaagcaatatgaaaagaacgattcgattgattgatagtagattgattttacaatgaaccggccttgtcccttatacaggggttggtcttgccctctacaggccctcctccacgtccaactcggggtagaaaccaaaggaaacccaaaacatgccttcccgagcaaggaaacctcgagacccgacgaaacagggtcggactcggaccagccggtgtgcggccggtcacaccgccggtctgaccggccctcaaccggcggtctgaccgcccaacacaaggcctaccccagaggaaaccggtagacttccaaattttggcaatatttcctattttaatcctaggtgccaaatttaggtgtaaacatatgatactccctccgtttcacaatgtaagtcattctagtatttcctgcattcgtattaatgttaatgaatctagacatatatatctatctagattcatttgcatcaatattaatgtggaaaatgttagaatgacttccattgtgaaacggaggaattagtactacacatggtgtagtagtaaactcccagacttctcgagtagttatagccaaacgaggttctcagaaatctgaatgctattgtgttcttacacaatattgtcactccatttcgcagtggacataaagaaaaaaccctgaaaactagtgatcgaaggccaaaagaaaccaaaatctgcacactgttttgtccctttggacacaatttacaaacgcaaccattacaggcatctcaacaagaactgcatctctgaccatcaaggccccaactatctgcatatgattgaaatcaaacaaacaaaaccagcactccatgggggaaaaaatcaatcaacctatccctctctctatacaggaaacaacaaatcaatcatcatccagttaaaaacccaattccaccatcttgtacaagcaaacacaatattgatcaggtcatggctctttcagaacctcaataaccaaatccctagccctgtggaagcacttggcagagaatctctcgtacaccatctcgtacatctgcaggttcaaatacgcaaacctcatgtatctgtcaatgcattcctcatacttctggtacaatgcagggatggtcagaacagcaacaatacctgtcagcatgaggcaaagaaacagggcgtgcttacgatcaatcattccaatgccaaaccattgtacaagtggaactaaatgttggaaaattataccggtaataaaatgatgggagctgcttacttgtgtaacataaagtggtgaaatcagtcaggctgccaatgatagaaatgatccacaggctaaggaagacttgataaaatagcaccgagtctttcccgagtgcgatgtcatggaagacagagaagaccgtgttcatgccagaatgcagcagggctgccacttcattcacaacctgctgcgaaatgcgcatctctggaataggtggctctggcctgcaacctcatttgtttgcacaacacaaccagcatcgtttaaaatatttgccaaatgtccacagcgatgagcaattcactcatctgattgaagtaaaaaacagtaagctgtttgcaagacaaagcttatcattgtctacccttagcatttcagttaaaatagtttacagcacgtacctaatctgacatcagtatcacctggctggttgttagattgtcaattagcataaatttggtcaaagttcaaagcatccacctaatcctctaactgaagtaataatgattaaattgatggaggaatgtcaaaacaacagtgaaagctgtgatgatgataagaattaagtgcctggattgttccttccattggttaactatcaactgaaatctgtatcccaaaatggaaagtagagtccaacagaaattccattcctgtgcgaaatcgaaggctaagagtactatgttgatgtaatgagatggctaggattgaggagctgagatcccaatctcacctgttgaggaggcgggcggccttggcccagaggaagaggacggtgaggaggaggaggaggacgttggaggcgagggagaggaaggtgtagccgccggagccgaagagcagccagccggagacggtcgccgccagcaggcaggcgctcacgtcgccccgccgccacatcaccacgtccccaactgcaaccatcgaatcgatttaatcctcgatcaaacaaagctggaagcatacctacccatcatcggatcgagatgcctaccaaattctccgatcagagatgagacgccgccgccgccgccggggcagcaagaatcgtcacgacgatccatggacgacgaatcgaatcaatccgaacaagcagcgaatcagcaaccagctggctagaccgcggatcgaaggaggaaggggcaagtcaatgccttttcctacaaggagaagaatcggggatttcggaaactttccccaaatgagatttctcggtgcgctagctggactccactcaaccaccgatcaacagctcaactccctcccaggctcccagctcgatgtcgcagctcaccctgacaggtgggcccttggccgttgtacagcgtggaaagttgccacgtcggacgctcgtggccacgtcagcctcgcgtgcatggcgcaacggtaaggccattcacagtgcgtatacctgtactagttgagcactttctacgagttctcacgttaattatataccccatctgcccacgtcgccagcggacaaaggcgcatacattaattatataccccatctgcacacacgttaattatatatcccactttctacgagttttcacgttaattatataccccatctgcccacgtcgccaacggacaaaggcgcacacattaattatataccccatctgcacacacgttaattatatatcccactttctacgagttctcacgttaattatataccccatctgcccacgtcgccagcggacaaaggcgcacacattaattatataccccatctgcacacacgttaattatatatcccactttctacgagttttcacgttaattatataccccatctgcccacgtcgccagcggacaaaggcgcacacattaattatataccccatctgcacacacgttaattatatatcccactttctacgagttctcacgttaattatataccccatctgcccacgtcgccagcggacaaaggcgcacacattaattatataccccatctgcacacacgttaattatatatcccatctgtccacgtcgccagcggacaaaggcacacagccatggcaacccgtcgtcgtatgtggcggtccagcgtgcgcctcgacacatcatcatcctcttcagccgcttgttaaagtgcgcagcccggcccactaaccgtggctacccaggtcacattggggctgctccaccacaggctcaaccggagccacaactttaggttctgggcctacacaaccaaaagactagtctgatgggtgaggaccgcccccaccttttaagtcgtgctcctccatcatcaattaccgatgtgcgactaaacccaacaccgcacgtgctccagtaatctcggacccccggaatagagcttgtggatggttaacgtatatactttctctgttttacaatgtaagtcattctaacattcttacattgttaaacggagcggagggagtacctgctaacttatatacttgcatgcgttcttgcagttcgagtcctgcttgcagaggtacgtgtgggaggtcgacagagctatcgagccccaggtgaacaactcacgaacttgctgtcgacggatatctgcttagcttaatatgtcgtgtcctgcatgcatgcatatgactacattacatacaagaactacaaacccaaatatttcaatccactattaaaataatatttctacaataatctacacgataagaagaaagtttattagtatagttcactgttagctttaagcccatattaaaattgttttcaccttttcttttctctatctttctcccacttacgcatttaatttatttatttatgttgaagcatgtgtgtagttctaggttattcatgagagtgaataccctttatattttttctttttccaatccacgtgagttttacgtttatagctggcttatagcccactactatctttgctctaatccttctcatgcattcatgattgaattcatgaatgaaaatctatagcaaaggtaaggccccagttaaataaccaagattggtttctgatttggttgttcttttgttcacccagaaatcttttgcatgcttgcacctaataaaaagacagatccatataaaatagttgcatctgcagcccatttatacatgtgttctgtactttaacattttcttgatctatgattttgattaaataataaatcattttttttacttttccttatataatatgagtcgtttcacggataagttgaacagcaaaaaaacaccgtaatttactcaatgaaaattgagaattaatcataattttgaagcagtgaataattttgaaacagtgaacatatatatcgacccataattttttctgcatataaactagcaactaatgattaattttcccatgccctatctctgaataattaagtccataggcaatgtatgtactctacagcctacgtattactggccgttcgattttgatcctaatgttaatattttcatcacatgtaatacctatattaataataaatctgtcccgtacttcgtccaaatacatttcattgaatgacgatatatatataacttatcagccttatcagcctaatccatagttctttttaattttcaaagttggagtataacacaatcgcatgtctatggctaaaattattcaaattaagaaggaaacatggaaaggcaaggtcagagaaattagactaggggatgtggtaatccgaacaacaacctatggtcctatcactagtacagaatatgtcataggtgccggtttgcaagtgtctataggtgctggattttcacccggcaccaattagttggcaccagtagcaaaacccggcacctatacaaaaatagaaccagcacctataagttcacacgagccaaaaaaaaaaaaaggggaagagccggctcgaatcgagccgagctcaccaactgcgtcctcacgccctgccccacatggccacatcgattgctcccgacaaattcatccacaaattcacaaaaaaatcatccacaaccatacaaccatactccacaaattcacaaaaattcatccacaaccatacaaccatactccatgttcatcaccgccctactcgatccccttcatcaccgcctctctgatccgagatcaactccaacagcaaactactatattcatcaagaactagcaaatactacaaagatgaatgaactcatgcgggaactcaagaacactcaagaaccttcgtccttctcccttgggtcgcctccggcctccttccttgagatccgctgctgtggcacggccgctgccgccgctgtggtgtgccgcagctgcctcctccaggcagccgccggccacaggagctcgccgcctccccctccgccggatctagtggaggggagggcgcagcagccgccgccgccgcctcaggcagccaccggccgcgggagctcgccgcctcccttcccgctggatctggcggaggggagggcgcagccgccgccgccactgcctcaggcagtcgcccgccgcgggagctcgcccgctgcctcaggtgccggttttaactgaaccggcacagataaatgtgattctaggtctttttcagagattaaagataaacgaaaatgactctgatgatcctcttttagtaatgtgtagttggagaggagatggttgttggatttaagattgggtgaaaattaaataagaagtggtctgatggaggaagcagtactctaaaatctcttatatttatggataaattttgaacccaaatccattatatatgtttgtgcaaagaaggaatacttattagcctcgacatgatacttattcatttcacgcacggatattattaatatttattttgtttgttgcatgtcaccatgatatatggtacgcagtaaagactttttttgtccattaaggtggtcaagtgtacatgataacagacttgaaagtttcatctgtagcattttattgccaacttccaatgataattcagtcaacttcttaaacatttacattttcaagcattgagagtgtttccaaagaaagtatatttatgtggtaaggtgttggtttggagtttggaccattatttattggcaacaaaattgattgctatcatagtaaaagtttcttataaactttatattgacctcatccttttccttatgcagatatcgttgtcttaacatctcacttagctaggactgattgaagaaacacagtaaagtggtggaatgagaaatatccatgaaattatactctaaactgcgtaagtttaattaatatcatttaatccttataagtattgggagcagtttatttgaattttaagcatatgcatatatagttgaaacaattcgaatcacactatatatatggagtgacaagaaggggataaagttgggttttttttttaatcacgagcaagagtactgtttcatctattttactggaagaaataaatttctattcgtaccttgatttgtttatatatatctagatttaattttgcaatgcattgagtgatacacgatgacataatttatattctcaacatttttcaaaatcttcatggttatttagaaggcatgcaaataatcaataatctttgccccataatgcttcacgaccattttatgataatttgaagctaaactgcattacaaataatgaattgagtggaggaacatgccatgaaacttgcccataaataaattagggaatataagaaaattgccacatttgtcaaaatagcatgacattattttgacagtttatatatatcttaggtagatcgtactatcatcacaattaaatattaaatcatatccataattcatattaaataaaacaagaaaattcaaatatcatggattatgaatttgatatctgttaatttaacccaaaatcaataattgtacaatttagctaacatgttcccctataaaacgtgttagcttacattgacttttgtttatcctgagttatgtaatttgcaaattaacaagcatgtttagtctatgattaagattttactatttataaaagaatttgctatataacaaaatcctgtgcaatgcacgggttagcgactagttcttctaacaaatcaaggccgagcggcgtgggggagaacaacgcagatgcgttgtggaggtcgtggcctcgccggttcgtggctccacgcgagtgttcccctccccatcccccgagccggcgatggaggaagaggaagagatggcggtgaaggaggaataggaggcggcaaatctggtgcctaccttgatgacatccctcgagtcatgttgtcgcccatcgtcgtgcctcgcttcaagccgccggacccgtcgtcgtcctccgatttgcgccaccgctcgtcgtcatcacctgctccaagccacagtagcctcctcgacccctctgtagcctcgacggcggcctccatgacctgtccggtttgatgtgccaccgaggaggcagaagccgcgctgctgctcgtcctcgttgcccccaaccgcgggcgccaacgaggagagagaagggatttggtgccggcgatgagagaggagaagggatttggcatcggcccaagctactcaggtacgataacatggtctatcataggtgtgttgaactagtgggttgattgttcagaagctaacacgggactttgtgataaaacaagttccgtggtatggcttgcttgggaactatgacatgctatgtgctaaggacataccttgctggatcaagtgagtcatgccttctcgaaactagccgtgcgtccttctctgagaaggtcaacgacccatagtccatctggcttgccaggggaacccctcgaccgcccgagaagggctatcattgtgtgtccgccgacctaaggacgatggtgtcgcctgtgggtttcacgtcccagttgatgcagtgcatcagctgccgagcccatccatcgcattaatcatagattctcttcggcagtcacgttactatatttccaaagtcaggatttcacactgcctcttcataagttataggatgctgcaggtgggcttggcgtgacatcccacggtggtttttttcaacggcagatacacaggcgctggccttgaaggacataatgcaagctcatgattgtaaaacaatgttttatgtctctcagcagagtatgcatgacagaggtgatagggtataaaatcatggcggcaagtgcataggagagattatgagattcgcccaaagttatgtaccagacaacacatgacttgggctattatccagtaggaggcctgaacccgtatacttgttgtgcgtgtgtttgttctgtgcttctgagcagctcagagtacggcaagacgcctcagagcccctctagatcctaaaccgttgttccccacaactgccaagctcatctctctggtagcgggtgatggctagatgtagcccccaagtctagatttgcactagtaatgtcagcattgctcctggtcgcacatggtggtacgtggggagaagaaggctaccatggatgtattgtgctatgggatgctcccgtgcgatggccagtctgaattagggagggtggatcttttctctctcaccatcttcctccgcaacccttctcgcaatgctgggaagttgttaatgtttcaactgcttagaggcctttgtgggcggttcggtaatagccctttgcatgtttggcagcattagcgacagtcggttcagtgcgagttttgagcgtcgacatgtgggatgtgtgtttgtttctttttccttgtcgcaattatagtttacagtaatatataattttgtaaattttttctgctatatcaatatgaaacatcgaaatgtacaattcgtttggagaaaaaaatttttgttggaattaggaagcttggcattgttgaactaatttgtccaaaaacatattgttccaacatttaattagaaagttatttaagcagacgttttcaacactggagtagaaagtttcttcctactaagttttagagcaaaaagttataaatacaacattctaaaatcagggtccagtcttgcacccggcctcccgggttcaacggtaggcatgcgtcctatatgtgatccttcagcgtatccactggttgatcagttaaactattgatgactggtttgcccgtgacgcacggtatttctagtgtgcttccctataaaatagttgttcacttcttctagagttaaccgtaatcaattgtcttagtggtgaaagctagcgtgtacctatgtaccgcacatgcaatctgtccgtgcctttatcatgatttgtttccataatataatcaagtgtttagaggggacttcaatagtccatggcccttctcagggggtagaattaatattttggccagcggacatgttgtatcgttgtgcttttcgtgcatacacggttgttgcttcgaaaaatcctactagcctagtttcagcgtgtaaagttttagcgtggcatatcggatatacggatacacatttaaagtattaaacagaatctaataataaaataaattacagattcaacctgtaaactgtttggtgaatttattaagcctaattaatctgttattagcaaatctttaatatagcaccacattgtcaaatcatggcataattaggattaaaagattcgtctcgcaatttacacgtaatttgtctaattatttttttctatattaatactctgtacacgtgtcaaatatttgatctgacagggtaaaaagttccatgggaagtaaacaggacctaacttagtttgtttggacgagttgatgtcgttctcaaactactagttgactgactaggaattgactagagaaggtggcaccatttacgtgagaactacggtttatcttacctcgtgcattccaaagtcaaaggactaatccacacgtaaacctaccactggatttattaattagagtaaattgtattagtaacacacgaacttattacactggtggagaaaccctttgtagtcccggttcgtaacccccctttagtcccggtttccaaaccgggagtaccaatccgggactaaagatcgctatctttagtcccgggtgaaataaccgggagtaaagatcgatctaccaaccgggactaaagatagagctgacctttttttttttcatgcccctgttgctgcatggtttatatatatatatatatatatatatatatatatatatatatatatatataaaccatgcatatatatgtttcaatacatatatatgcatacatatatatatatgtatttatacatatatatgttatgcaaatgcatatgtatatagatatatatatgaacaaaatatatttacattatagaaaatgtgtacacatgcatatagaaacatatgtagtcatgtattaattacaatccattatatgtcctagctagctacgatttcgacgtagtagtactcgctgttagctcagaagctaaggaccggtgaattgtgtttccgtcgtagtagaattcacccttgggatcaaggatttcttcgttgatgaatcccatgagttgttcttgaaccgctgcgataaattccttgtgtgtggtcaggttatccctcatgcgaataaactatatgaatgtatgaaattgattagtaattaaacaagaaatcgctacgtaatgaaattttgaatttatttgtacgtacatcgagctctcttgtggtgatgatttggtctgcaaggcagtggcaatactcgcacacgtaatagccgcacaagttagttccctgcttttgctttgcgcactacaaataaatgacaaacaacgagagatctaattaatatacacttgtatgtatttgaatcggagaaatataaatgtagagcatgtgtactcacaggaaatttgaacttccgcctaagtctttctctccatttgccgcggaccaaatgacggaaccgataccaagccctacatggagtttaaagctatgattcgtagtagcaattaacataacaagattttcttaattaacaaaggaacttatgacggtacctgtctataagttcgaaaaccttgtcaaacgtagactcttttttatccattgagtcatatacgttgacggtgcaggcctccaggtcgatgagtaaaagcacccagtggaatctgcaatgtgcgtgggatgcattacatatgaaacacttagcaagttcgtacgggaatgaaatttggtatgtaggaagacagtaaaattaaactaactctgtgttgtatggcaacagtatgaacgtcttgtaatgctgcgccttcaggagatggacgagattgtcctctgtttcttgtggatattggtcgagcattgcgacgtttactttccgagggtcgatgaatccagtatcgaaaaccctccgccgtcgggccctttgaatctccattctacaacgataaaagggagtatattattttctatggtctacttatatacaaggacctaattaattaaaggagacgtatagtaagaaatctaactgaacgatatacttacaaaatccagcaactcataatagagacgtcgagggcgtccagctggtatagttcgtagattcccctgaaattgatccagagaatgtcatctccttgcaagaagtccgtgtccctgatcctcgctccgatcatctctctaccggtggcgctcatctccatgtacagctgatggaacttgtacatttgtgtgggtagggactgcagcagctcaggcttgacaagcggtttaccgagttcgtacatgtatttcacttccgccttttcgattggtgcgactcctagcaattgatccgtagttagaccggtgtcagtaataaattgttctatcgtcatttctttaccggtcaccaacggctcgatctcctggtttggttgctctccaagctgagggactggtttggactttccagaagatgctttcttcagcgttcgctcatagtccgatagcttgatggcctccttgacagatgcagacatacccctgaagaagttcctgacactggggtctataggaatcttcttttctggacttcgaggcttgaattgtctcttgacttctgatgcaacgtaagcgtcaagctcctcttgcgtgcaatcgtaccccgggtccttgttcttggcggcgtcaactttcgccttctttgttgcccttgtgtgggcaagcggtggagctgggggggcccttgactttgaaggtgccggaagaggagcttgcgggggagtaggtgtaggagcacgaggaggagtcggtgcaggatcctgaggagtcgatgctggagcctgaggtggagacggtgctggcggagcatgaggaggagacggtgcaggatcctgaggaggagatggcggagccggaggagatggtgcacgagacgccacttgtcgcccagggaggatgatgtaccgcctgcgccatagaataatggcatggcatgtgtctcgtagatgcgtctcaccgtctcctctagggtaatccagctcgaggtcctcgtacgcgccttcgaccaactcaacttcgaccttggagtatcctgctggaatcggcctgcagtggtaagtacctgaagggtccgttgggatggccatgcccgacgccaccttcatgttgtgagagattatttattagtaatcaacatatataagcagcaactagcggaatgggtaaatcttacctttattgataagttcttgaaaggaatatgcagctcacatggtgtccgctgagtgatgtcatcaacgggacaggtcgattcgtcctgtgtttgcatggcgtccatgctctgtgatcctacctgccccgttgaggcgcagctgctacggtttcctgacgggctcaccattgcaggaggaatggtcggctggggatcatgggaccgatgtgcggccatgcgttcatcaaccttccttgcaacctcctcttcatgttgagttcgtagctcgatacccggaactctaggtctgcaatcttcgcctcggtatctctcttgctcctcatccgactcctgtacgtgtggatgtcctccttgaaaccaatcttccaaggaatcacccctttccctcgagttcgtcctggatgctctggagtctgcagggcgagtgtcagctcgtccctatctctgtctggtcggaacgtgccctgagaggaggcctccactgcatctgttagtcgtcgcgcagcctcttgtatctgatagccgaagaccagtgagccatcagctgggttgagcgttccaccgtgagcatagtaccagaacttcgatcgttccggccaattggctgttgccggttcgatacccctctcaatcaagctagcctccatctgctcccacttcggcatcgcgacgctatagcctcctgaccccaagtggtgatggtacttcttcttggcggcattttctttgtttctttccatcatcgccttcccttgttcacctgtcttatatgcaacgaactcgtcccagtgatcccttagctttgggaatgtgtcgaagttcggtgtctgccccttcagtatatacttctggtacagatctcccttgaagctctgaaactgttctgccattttcttcagagtccaccttttcactttgtcctctgtacccgcaggaagggtgaatgtctcaagcattgtggtccacagcatctctttctccgaatctgggacaaagctctcatgatctccgcgtgcccttgttcttcgccagtacaccgtactgacaggcacgttatcccgcacaacccaaccgctgtgacgtacatagttcttggcggcttcggccggggcactaggacgtccatcttcttccacttctgttatgatgtgccgaccctcaagcttcttcgctgcacctcgttgccgcgtgccctcttctgtccaacggagggttgactaccactagcctcctcctcctggttcccctccacatccctttccacgtgcccctgctggttcccctccgcatccctctccacgttcccttcctcgttcaagtactggtttggatcctcgttcccctcttcttcattccagtactggctgcttccct

SEQ ID NO: 10097 - DNA, 12178 bp, Oryza sativa
gcaaattgttgatattttcactaaatctttggattctaatcgctttgcttttcttcgtggtgaattgggcataattcatccttttggcatggtttgagggggagtttgtacctcatggttttatcaagcaataatatgacaatgagaaaaattgagaaaagagagctttatttatgcatatggtattttcttgtgcatgctagcaatactttgaaggtttatttgtctctagcatagcttgtatgtattctagtcttttcatgagatctagattttgcttttaagtgagatgatgcatgacacttaaattctatacttgaattaagaaaatatgcaatgtcgatgctagcatatggtttgatctataaatgctctatatatatgctttattgacttgttattcctcaaatagctttaattgctcattgtgaaaaagagaataaaaaatatgaaaaaaatgaatatcgaatccttggaaacagtcttgacgacaaggacgtattcaatatgagcaaaataattggtgccgaatccctggaaacagtcttgacgacagggacgtacccggaataaaagagaaaaatatgagcaaaaaggctcaagaaaagaaaaagttaaaaaattctcttggttattatgtgctaaagtttatttgagaaagagtgataaatgcaataggtatatgtgtttagtgtttattcttcaacctatgtgcttgttaagatgttccattataaatcgtatgaaatcatgaattttgattgttgattcaggcttaattgtaaaatctttggttcatggttatactttaatgcatgcttgttatattatagataggtttatcttctttttattgcaacacatgacttgatatgctatatgtatgctaagctcttgaacattaatgaacataattcctatgcttgatgaaatcattgtcaaaatggggagaagtaatgtgaaattttttggacttttgggagaagcaagatgaatttttggagttgatgagaagagcatgttgtttttgggttcaattgggaatttctttcttttaaaaagggggagaagttttcttttggatttttgagcacgatgtgtatgtttgtacgaagtatgctttttaccacttttgtttttatttttccaaacaccaaaatatttttatgagtttgccaatgtgttcatcaacggggagattgtaaaatcaaaggtgtttttgattattattctgtgatgaacaattgggtattggagattattggttttgttatttggaatttattcacgaagtggttttggagatgattggaatttacaggtgaatttataggataatgctgttatttcatgtgaccggtcagaccgggcagtgtgtgccggttagaccggcggtgatcgcgtggtcggaccggccagctcgcggtcttaccggccgacgctgtgtcggttttggtttcgggttgtttgtttggatatccgtgattatttcatgattatgacttctagatggatactatacgtatgtaatactgttgtttgctactaatgagtcaagttggagatagtttggtctcggaatatggtttctttgtttatttcatgtgtaggtgactcgatgtctcgggagagtatttgcggtgatggaccaggagtcggcttggggataagacgacgtccgtggtggtcagagatcatgcgggatactaaggctagagttgatgcacgtggttgatggagattccatatggcatacgatggaggtattttgtacgtatgggatgcggagtcgaatttggaaggagtccaaatttggtacgattggttatgtaaagtttctttcttgtatcctgaggtgtttaggactcttagtatgagtttcgttcatggctttaggctacctatctcgggtataaatagaggtggagcgtgaggcttcccggtatcgcttttgagagaaattgagttgagttttgagtttcgagtttagtcaaaatttttgtaaggagtgctgttggtgcactttgtaaacacagagagaatcaataaagtcgttatccactttaagagttcttcgatttgtgtttcaccgggttttggcggtctaaccagcgatataccggcggtcagactggcggcaagcggcaatcagaccggcggcatacgggcggtctgactggcggcggcgacaggcgcggcaggcatctcggtggttcgaccgatcgatctacatcagtcagaccggcgaaatccacttggtcagaccggcagattaatctcggtcagaccgcgatccgtcgaattcgagggtaacttttatttccgctaaaagttttcggtttttgggtataccaaccattcaccccttctctggttggcttagttattgtgattcgatcctacaccaagaagatgtaaatccagtacgaacccaacaatagatacaaaggaaaaatctgtacagcaaaacttctgactttttggaagatacaaaggaaaatataaactcagtacaacctcaataattgatcatatgttagctcttgaaaagtacaagtacaaggaaaatcagaggaataaaaaccctcttggaattcagaagttatactcatatatcctgtaaaatcaaagtgttttttgattcttattctgtaataaacaattggcatctatgattattggttttgatatttggagattattggtgaagtggttttggagatgattggttttgcaggtgaataggaactgctgctggagttttgattcggtcagaccgggcaagggttgccggtcagaccgtgttaacgaccaaatttggtaatccaaggattggagatgaagaagaaattgagatggagttcaagatggagatcgtcccggaaacagagtaaagatcggctggaatccgaatcggctgcgaccgggatcggcagagttcgagttggacagggttagccgatcgagccgaatctgacaatatgacaaggcatatgttgtcgggttaggttgatgtacttcatgatgattgccacgcatggatagagtcctgagaaggcaattgtatctattaattaggatattttatgtaatttccatagagatatgtttgggcaaaagtctgccgcaaagacttatggtatcttagagtttgttagagataagagtcgtgtccgatatggacataatttataatctcgggtataaatagactccgagccccatgtaatcaaactaacacatgctcaatacaatcttggcgcatcgccacctttttactttcattttgtttcgacgagttcttgctttcgggttgagctgcatcggtttcgatcttcaacaagaggtaaaacttgttatggctgcttgcgttctcgggattagtgcttccatctttatgatactctaatcttgtttatgtaattcgtcgagttatcatatatcttatataatctttggcaatatcgctatctaacctttaatcggctaacatctgttgctagaaggcagccgattaggttatatatcgacgttgatttagattatataggatatccaccactctatgaaacatccaacggcttgattgtctagatattgtccttttcatatttatagctgcatcagttgagtttgatcttatgagtcgtgattagaatctcaatctctagcctgtctttggttgccgattagggtagtatcggggtttcagccgatattacctgatttaactacatttatcttatatgcttgattgacatgttaaatcttccctttatgttaagatcttgtcgcatttaagtatattgggcttttgtttggtatattctacttgctttaatatcttaatatagagtagtatcggagtattaacgatacatgctagatctatctgatcggctatgctatgaacatatatagtcttgttgttactatatatttcgatctaagtgatttatattgtctcggcatggtgaccgatctatcccaattacttgatttaagtatatatcgacataaggattacatattgttaatatctacagccaaccgaatagatttagttctttcttacttattcatgattgccgatcgatccacatatgacataggctcaaagataaatgatatgtcatcagcaactagctgatcggctatggtttatggatttaaccacggtttctttgtctttgtttcttgttgattgcaggatcaaatcaactggcacgctcgtacagccagaggcaagttttggacctgcactggagttaagcagatctcacaggcctcgtgtttttacatcaatagaccggcgctatgcgagcagtcagaccggccagccgtggtctgaccggccgattttgtgtcggtttcggtttcgggttgtttgattggatatccgtgattaatatgtgtttatggcttctagatggatactatatgtatgtaatactgttgtttgctaacaatgagtcaagttggagatagcttggtcttggaatatggtttctttatttgattcatgtgtagatgtcttgacgactcacgagagtattgctagtgatggatcgggagtcgacttggagataaggcaatgttcggaggtcagatatcatgcgggatacttaggctaatcttctccgtacgtgtggaatttttaatcttcttccttcttgagcattggcctgtagcatttggtagttgaaaacacaatctgaaaacaagtgaccatgattttccttttttgttgagtgacttgagcattggcctgtcgcatttggtttgagtgattttcgctgatgtggtttctgatctcatagatgggattgcattttgggggaggaggaacaggggcaatgaggaatccgacgacgtctcctccaacaatgaggatcatgaatccaaagctacggtgaggaacacctgcaaactaatgggatctttcagtttatgagtcatttagttgcaagcaatgactttggtggttaggaatgaggacatatggcaacgtgtttgcttcagagtaaataacttttgcttcctcaccggcaaacaactctggtatttgttcacgttatctccgtttccattgttttgtattgctctgtgggctcttgggggctggggcatggcctctggagtggttgcacggactatggtaattagaaaggcatttatagatataagatcgtttatttctacgcaacattccaacttaagaagtaagtactatggttgtgtcagtttgacttggccagctggaaggaaatagtcatattttgtaagagtgatacaaatgttattgtggcaattttttttggctccgaatgttttctcattatagattgtagaaactttgtttataacaaaatatgcctgctttctgttcgatgaaataactaactgtgcttggcaagcttataacctatgtttgtgtatgggtttaatttgtcctagagcagagctgctggatcgtgcagttcaccctggtaaatatgaaactttatttgcagatgtatttactctatgaacattgttaaagatttatctcaattatatataacaagctgctttcaattttatcatgagttacaaggttaacgtgctgggatattttttttcaaactacaggtcagcatgtctcagcagatgcaaagacaatggaatatatttatttggtcagtgttaagttcccttcacattcattatgcataagttaaaggttttgatagagtttttgtttgtttgtcaaatcctgttcactgagcaagaagaatagtagcgtttattcagtgccatgcaccaaaatgtagatttagctctattagttatttggctgttcttttgacctttcatcacgctttagttctcccatggctttgtagcatagttattaaaactggaccggaccggcgttcggaccggaaaaaaccggaacctctgccgggggaccgacggtcggaccagaaaaaaccggaacctccaccggtttggttcagttaaaagaccggatatgcaatcaagcccgtataaaccggttagaccggccggttttcatgaaaaaccgctatagaaccggagaaaaaaccatggttgaaccggcctctgcctgctatgtgcgcgggagtaggtgagcagtggggggaaaatgatggaaaaataggctttgggggtattcgaacacaggacctcgcgggagaaaggaagtgcagctaccatgtgttagaatgaaatgggtaatatatttaataactattgaaccgggttagaccactggttcaaccgattgaaccactgaaccatcgaaccaatagcctcactggttcaattactggtccggtctcaataactatgttttgtagcattaacattttgaaactacctatattttagtccaattcactatatcatggggcagcgttgaggaaaacaacagcaggtacattgatttctgcccatgctccccgactgcttcataaaatgattcaatttactgctacttactcattggtacttgtaatactgcaatgaaagaccaagaatcctgatcgtttttattttctgatacagtttaaatgatttctactaaattccatgtgttccttttgatactggattgacactatttcttttaactcagatccatggaaaggcagctagaaggtctatgacccttgtgtggcctatgagcacctttccgtggcttttttttaatattagaattgtacaaaccaaaatgaatgttctttttatctatactaattcgagtgtaccatttagtcaaaatgttatcactatagtactctctggttgccgttgtattcatcatattgtagtatcgaaattcttagtggtctcgaggggcataatatttgtggaatgtgaactcttcacaagacaatggaaacagtatttgttcatcccagttcgcactctggtaggtgttcacactaactcgatcaaacgaatgtattagtactacaacaaattagcttttcaatctctggatgttgctagggctgtagcctagacaggttcaaatataactagggctgtattttaaattatgtataaaaagatcagattgtatgaagatagccaccgtgctattattaaagatgtcaattcaaatataatttctctggaatttttactatgctgaatgaattatttggaattagatccagagtcttggagcaagaagcacaaggttttcttctccagcagtgcactccatcttatattggcactctaggaatacactgtgctgttttttttatagacctatacaaattgtcatcctaccatggtctatgaaactctatttttatctgtataatttgtatggagtgcactgcatagaaaatatctcatttattgttctattttcatatatatatatatatgtatatatattgcgaaaacgtgccttgcacgtgcacgataactagtatcctgtaaaataaaagtgttttttgattcttattctgtgatgaacaattgacatctatgattattggttttgatatttggagattattggtgaagtggttttggagttgattgattttgcaggtgaataggaactgatgctggagttttggtccggtcagaccgggtaagggttgccggtcaaaccggcgctatgcgagcggtcagaccggccagcccgcggtctaaccggccgattctgtgtcggtttcggtttcgggttgtttgattggatatctgtgattaatatgtgtttatggcttctagatggatactatacgtatgtaatattgttgtttgctaacaatgagtcaagttggagatagcttggtctcgaaatatggtttctttgtttgattcatgtgtaggtgtcttgatgcctcgcgatagtattgccggtgatggatcgggagtcgacttggaggaaatttgatgtccggacgatcagatatcatgcgggatacttaggctaatctactccgtacgtgtggaaattttaatcttcttccttcttgagcattggcctgtagcatttggtagttgaaaacacgatctgaaaataaatgaccatgattttccttttttgttgagtgacttgagcattggcctgtagcatttggtttgagtgattttgacttatgtggtttctgatctcatagatgggattgcattttgggggaggaggaacagcggcaatgaggaatccgacgacgtctcctccaacaatgaggaccattcaccctcccctctggttggcttagttcttgctatttgattctacaagtggtatcagagccttgttttcttctttggattttaaccgatatagagctttagccatagctaacaagtttactactacgccccatgttttcgatggttcggattttgcttattgatgtgataagatgcaatcatacattatggctgaggattatgatgtttggaaaaaagttgcacagccatatgtgattcctgaacagattgacactattgctttgaaaacttattttaataacaattgcaaagctcgcaatattcttttgagtgaaattttttgtacggatttttatcgtgtttcgcatcttaaaactgccaatgaaatttggagtgctttgaaaaactttcgtcaaggaactaccaacattaaagaacttcgtcgagatcttttcaaaaaggagtacataaaatgtgagatgaaacctggagaagctttggatgattatcttggtagatttaataagattttgagtgatctttgatatgttgattttgcttaggatattaactatacacaatctgaggattttcgccactttttgaatggtcttgatatgtctatttgggagataaaagtcacatctattcaagagtctgttgatatgtctactttgactttggattcgctttacacaaactcaaaacacatgagatgaatattctttctcataaagttgattctaagtctagcgctttggtttcttcatcgacttctttggatgtaggtgcttcttcatcaaattctattgtccttgctttgattcatgccatgtccgatgagcaactcgaacagttcgaggacgaggacttggctttggctgctaataagatttctcaagctatgaacaatgttaggtacaggaaaaaatatggtccagctcattgctttgaatgtggtggtcttgatcacattcattcgcattgtcctaagcttgggagaggcaagaaggaagacaatggtgaagagaagaccaaggacaacaaacccaagagcatgtttgttggtatttcttacgaccacagataaatccgcaagcgcacggaatactgctgtagcgcttaaccttcgggtgaccccaaaaggacatcgaactcaaggaacgtgtgtaatctacctaaggttaagactatccaaggacaacaactgatggtaggcaggctaggctagagaggactttctatgtgttttaattatctaagctaagttaacggtaatttcctctctgttgcttcaggcaccgacccctgctggtctgctagcgtggttccggctataggtctatgatatatccgaacgtggaggattactaggacgggattcagggctgtcaccacctgccgtctacctctgacaaatccgtgggatacacaacaaacaaaggtaatctctaacctagacaccacatctaagttattaattactactctaatacttgtacaggaacttccttctctatccggagtcctagtactagagcacttagtatgaatactaaacaatgaacccgcaaagatagaaatatatcttactcagactaagtaattaaataacataagaaaggagcagagtgtaccgacagctctgctactcctccagaattcctgctaggaagctacactcatcgaggtagaagtcggatgagcgccaaactttcgggcactcctccagagcttcctctcactctctaccttattctaatgtacacaagatacaatagagcctcttgtaattcagctcaaagttgtgtgttggaaatgagagtgagctcgtccttttataggcaggtatgacggttacagcctttgtgaaataaccaaaccacctcggaaccgccatcaggaagtaatcagggccgtccacgtcgaatctcgcgatcaatgacctcaaaagtggttcggctgaacccgggagggctccattcggcccgtttttcctcgtggacactaattttgaggccctcagcccattggcatgatggttgggcccatttggagttgtctaattgacttatggggcctccaatccatgtaaatgtatcctgaatgcgtggaggtgcagtttgtcgcttgacggatgtgttttcttctcaaaatacatgcatacatgtatttcaccaacactagtggaaatgattagtaataatccgtaccactaagttggatactatgttttagttcataatatgcaggtattgacggtcaaatattatgattttaggaccatcgacagtgttcaaagggaagaagactaaggagaatctcaagaagatgtttgatcaagtctatgccgcttttgagccattaagtgatgtagatggtgagagtgaagatgaagagaagggaaagaacatctccggtgtttgctttatggcacgtggtgaatcggattcagagtgtgaagacaatgaggtgcgttcttttgatgaagttattcttatttgaagtgcaaaaaataagaagtgtgagaagatgtatagaaaacaggaatttattattgaatctcttaattctgaaatttctagactaaaatatcttattcctaatgatgatgagtgcaaaaattatgagcttttaatgcatgaaatttcaaaaattagagatgtcattgttacacatgatttcaaaaatagatctgctcttgctcttggatttgtcttgcatacacgcactttgaatgagttgtttttgattaaaaagttgttgaaaaaatatcaaattgcttttcatgctagtttgatgtttaacatgatttgtgccaaaaaagttaaaataagaacatggtgttttggattgctcaacatgcacactaaacaagatgaagctaaaagatgcattaggtcatgttaagtacatggaggatattgtgaagacccatgaagtgctttcttgccccaaatgtcgtaaaagcaaaggtgtcatgggtgattgtgaaaattatgttattttgcaaaggtttcttatttgaaaagttctttgaaaagattttttttgatggtaagaaacaacttaacatgattttggatcaatctaaagtgactagctacaataggggtgttggttttgatgttcatgattgtttcaccaaaaatcaaccaaatgttttgagtgtgactgaacatggtgaaattttgacaaaatcaagtgctaagaaaacaatttttaagtctgctggaatgatgccctctctttctacaacactaaaagaaacaaaaacaaatctttcaaaaccatctacttctagagaaaagtatacttgttctttttgtggtaaagatggacatcttgttggtttttgtttcagattagctcgtaaacagaaaaaggagagagaaattgcttttgcaaattcaaagtggcaaaaatctagttttctctcaaggaatccggtcaaatcgtagttggtcccgcggtcaaaccggtggctgtgcttcggtcagaccgggcatcggtcagaccggcccccggtcaaaccggctactgtactttggacagaccgaccttggagagatttttctaaaaattctcaaactattctcaaactaccggtcgtgtgtctcaatactggattcctaaatttttgttatctaaccccagtactgaggcttcgacatcttcttgtgtgtatgctttggtggcgacgaaggagaacgtgtggatcgtggattccggttgttcgcggaacatggccggtgaatcgattatctttggtgatgcttttactagtgctgttcttgctacaggtttggttaaggtaaatgataagtttgaattgaaaaatgtagctttggttgaggacttaaagtataatttgctttcagtttcataaattgttgatgaaaattttgaggttcactttaagaaaactggaagtaaagtatttgattcttgtggagactctgtgttgaat

SEQ ID NO: 10098 - DNA, 19824 bp, Oryza sativa
ggaatcggccggcgaagtggggcgccgacgtggggtggtggaggggttaaccggcgccgattttcgcggggagagtgggggaaatggtggagggcgtggaggggatcgtgcccacgtcgttggatgcgagctcgggtgcgggagggcgccggattttgcggcgacgtggacggctatggcggttggggtcggccggcgagaggtaggaggaggagctgacgggtgggaccgccggtcccacctgtcggcgaagggagagaaggagggacgcaaaacagacttttgcgagcgggccaagtgagaggggagccgacccgagagagggagaaggcgcgcgggccgcgggagaggaaagaagacttgggccgaaaatggcccaaagagaggaagggggaaattttatttgttttctttttattttaattgatgcaatgatctttgtgttattaaaattatttcttgagctccgaaaattcacggaaaattccggagagtattttagggcacaaagaatattgcaaaatattcccggccaatgatttttaagggaaaattttaattctcccattatttcacttgattaaattgatttaacttttatttaatttctagaaaatgcattatttaatgatttttaaacccgaacgaaaatcggggcgttacaaatctaccccccttacaggaatctcgtcccgagattctgggatggctagaaagaaagccggtgctggtgggctgtctgtctgatctgcaccttgaactgccacattctgcttcgaactgattgattgactggttgatcaaacctgcacgattgaactggctggaatcaacctttctgctcctttgctttgccaaaactggaccgactcgttctgcttgaactgacctaggccagaactgcggatactcctgaaacttacttatcttggactgaactgttgaggttggcaattttggtaacctgagaattcaccacgctggctataagaggatgaaaatggaatctggcatttgtaaatcatttaccctatgtccgcttcgactggtcccaattcaaatgacaagtaattccaggaaaacctgcttgacctgtctttcgtctgaactgcaaccgtccctgatgctgcttctcaaagctgagctattgacctggcctcaccggtgtacctcagaattcaatcagataacttgagatcggtgtaactctgctgacaccctgtaactggctacttcaagtactacccggattgttgcactgggttgaaccttcaactaaaacagtgatgaggtgagccaaaactcgtctccgagacctatcccccttacagggagtagtcttactttcgcctgactgggaacaattggactattgtccttgaaaaaaaaaataaccaacacttctctgacttacaaagaccctcactttgaaaactgaaacttcgtcgattcatcaaaatagagcaatgacgactcactttcatcccagcaagatttggaacttaaccctcagttgctgataggaaattccacataaagaaattctcatttagctcctgatcttactaactcttaactgactttcccatcagtactaactgctggcatgactgtccttcttctgacctgacttcggtgtcgtccacctaaatgggttgtgtagttgatatctcaaaactaaactgaccgactcgcattggaattgacacaacttgaggaactggggtgctgcgagtagagctgttgtcttgatgacgctaacgccttgccgttgaacaaccttgcaagaactgaccttgtaaaccataaccactatagatagcacttgttgcctcagggattggtggtgaccttgctatgctggtctactgaagacttggtggcgtactgtcggaggttgcaggtgcttgctcttggaaaacaaactgactttcgctctgatcctgattccggcttgcatctgagcttgtacttgttgttggagacattgtcgttgcatctgctgctttggactctacggttgcggtatcaacatctgacacatccatcattagatcttggctagccaggatctgaccagagcgaggtgctcctactcagctggtagcttgttgtcttgaactgatccactgactctgactgcaacacactactgctagagttgcttccgctacattcgaccttgcatcgagctttgcatctcctgcatcaatacacccatctactgatcctggataccaaatgttgatcacgagcaggggttcttctggcatcgggagtacctggtagctttcgactgatccattgttctgtgactttcatacaccgttgttgttgctcttctctttgatactgaccatctgctgccagaacggaagagaggtggaagagaggggttgctaaagataaggtactaaaccacttgcctattgatctgttgtgagtggattttatgattcaagttgtttaagcaaacaacctagtatggtcgcatccccaccaatgacgcaaaccatacccctacacacaagcaaacaacacacgatctagaagctaacgaaactactcttcgggacagattgggtttaggtcaacttcgggaaaactcttcatgatcttcgcggaacgacgactctgaactgatcttctcgctccttgcacgaagcttgaggctcgacttggcttgacttccgaacagacatgaagctgacggctggtcatctaggtgtgacaactaaaagaattggagagactgggaggagaattttgaaaaaccgtttcgcaaagaaaagccgaagggcgaggggagacattttgcaaatagggttttcagaaagcttgtccttagggtttgcccatttggctcaacctacagtcgagttggctctgataccactttgtcacgcccagaaatttagcccaaatttccagactattttgtgtattaaatccctgtccaggaccagccagggtacacaaaacgacaagtaatatacagttccaaacgtaaataaagcgtaaaatacttacagaagaggcacttagtcctcacaccgaaacaaaagcagcagcagcggaaaaggcgatcctagcgggcttcagctccactccacaggcaaaactcaactgaggtctgagccttggtcttccaacttcgtcttcagctcagaagcactacacttctgaaaagggggaataatagcaaggctgagtacaaccaccgtactcagcaagccacaccaatgatgcagacgtgcaaagggatacaaggacggtttgtggctatttgcataaaggcggttgtaaaacattttattgagcaaaacagtaaaactgttgagtaattaaagtaacattaaatctccactgatcaacgctacaccacgttgaacaggcccaaccaacccacctgtactacagtgtattgggtcgatttattaagtgtgagactaatcacggtgaatctggtcgatcgcccataaccgcgggcacggctattcgaatagttttactctggccagaggtgcacaactgtacccacaagacacaacccaccgacatgtcaccgcgtcatcatgtgcccatgatgcacacgtcaccatgtcgagtgattgtgacgagatccttcgcataaccctcccctaaccatccacaccacgctaaggtttcacccccacccctcaaaaggcagtgggcagtcccctcttgcgccgcggtgaatccggcagctggacaaccggacaccccggccgacccaactccatcacgcccaccctcgccaccggtgcctaggaaagggtcgagctatacttcagatcaagcagttacccattcccgcttgtgacaagcgctgtaagtcttccagggtttcccgtgaaccggtccttaattgccatgggtgcgactcacaaaaccatgcacccacagcccaccattcagtcgcattttagttggataattacgaccataaaacatggccagatgtctcgagcacgcggctcaacaagatactagaatgtctaatactgcaattatcccatcgactgagctagtggtaattaagcatggctaagcatatagttctagctaggtcacataagtaacatgagctagtcgatttatcacccaaggttgacaaaggatagatatcaagtaaacatggcacaagcgagcagataggtaaaccctgatcccatgtaattagcaaaacatgcatatttatttgcaaacggtaaaacatttataaattaggatcaacatgctcaagggggaatgtgcgacttgccttgcttcttcactttgatcttccgaactcttttccttgcgaccgcggacctccgaaacgacggaaactacacgctggcacgcaaaacgaggaaaaactctaataaaaaccaaggaaacagtacataaaaactaaacaaacatgtagagctcaattttagatgaattttgcaagttgaatggctcaattcggagttcgaatgaattagatatgaattttagaagttttgagccatttaaatgaatttctataattattcacgaattattgcgcaattattatttattttctcaaaggaaatgacaagtgctgacgtcaacaaaggggaggggcggcgccggcaagcgggccccaccggtcagcggcacaagggcgccggtccaccgtggaccgggaccaccgaggcggtccaccgccggtccacgggaaccgacggcccggatcggcccaaagccgattggacggccacgaggcagcgtggctggggcacgggcacggcatgaagccggctcggccgagacatgacgcggcggcggcaagggggaggcggcaagggggaggcggcaaccggctgcagcagccggcgacgtggaacggcggcgggcggccggaggacagcggcgcgcacggggacggcgacgcaccccaagaggcggcggtcggcaagaaaggggacgggaaaaaaggaagggaggagagatcctcaccggaagcggcggccgacgtggaggaagaggacggcgacgacgattgcccaatggcggcttgcgaggacggagggcggacggggtcgcccttgaccttcaggaggagaagagggagttagggaggggaggaccgatgcggggtgactggaaacgaagaccgatggcgatgacaagaggtagagctcaccggcgaccgaggaaggaggagctccggcggatttccggcgaagaggggcggcggccgaggtcctcctcgtccttgcggagctgagggaggcaacggcgcgagtcgacgtcgaccgaagcggcggcgcgacgcggctggaggcggtgaaaggggcggcggcctcgggtgtgcggtgggagtggtgctcgaggggtggagagggggaaataagaggcggccggacttccccttgcggtggcgaagctggcggtggcggtggctcggcgcggcgacggctgtggcggcgggaaacggcgaccggagctcgccggagtgtggcagcgcgtgggtgcggcgtggggagagcgagggagagtatgccgggctcgggaaaaatggggaaacggacgaggggagcacggggatgctttttatgggctcgggaaggcgggatcgaggccggacgtggcggaatcggccggcgaagtggggcgccgacgtggggtggtggaggggttaaccggcgccgattttcgcggggagagtgggggaaatggtggagggcgtggaggggatcgtgcccacgtcgttggatgcgagctcgggtgcgggagggcgccggattttgcggcgacgtggacggctatggcggttggggtcggccggcgagaggtaggaggaggagctgctgtcggcgaagggagagaaggagggacgcaaaacagacttttgcgagcgggccaagtgagaggggagccggcccgagagagggagaaggcgcgcgggccgcgggagaggaaagaagacttgggccgaaaatggcccaaagagaggaagggggaaattttatttgttttctttttattttaattgatgcaatgatctttgtgttattaaaattatttcttgagctccgaaaattcacggaaaattccggagagtattttagggcacaaagaatattgcaaaatattcccggccaatgatttttaagggaaaattttaattctcccattatttcacttgattaaattaatttaacttttatttaatttctagaaaatgcattatttaatgatttttaaacccgaacgaaaatcggggcgttacacaaactagcagatctacgttgttaccgatatctacaatacgcacttctaaattagtacaactaaaaccataaaaatataatgcatttattcaaacaaattttttaaaaatacacactatttaactcaatagtcacatataggatctgcgaatattacctgaaatcggcgtctgaatccggcagggcttcgccccttcttctcttctcctaccctctcttcttttttttcactggagttgagaggtgagaaatgagggctggggctgggcggcaggccttttataggtagcgaggcctgccgcccggccagtgggcggcaaggggccgcctgcaaaatggctggccccctgcggctcttttgcattcggaccccttgccgccccaccaaagggcggcaagggttttcatgcaaaatacccaccctccgtcacagcccgttcctcccccgtttgccacgtcagcttgctgcccaccattggggcggcagggtctatttttgcaaattttctcgccaatagattatttatgtaaatattaaaaaaaaatctaaaaacgaaaaaaattcccctacttacctcccaaacggctgcctaggtgaatatgtttcctctagattctagtcccatcccatcgttttagcgtggttctaattcgtgatatttcctacagtttcatatatgcacttaccgtataggctagttctttcttctctcataaagccgtacatattgaatttgattattatcacaaggtttatatagaacgcgatgatattgttgagtccgtggtatagtttgaacactgagatcaacacgaaaatccttgatattttggaacgaattttgtttatattttaggacagatgggttatttgggaagtgctatacccagaaaccatcatgcagtggcggagccaacgtgggggtgggaggggggggggctcgagcccccactaccccgctggactcctagaagttgtgagagaggagaagggggaaaagagggagaggaagaagaaggggggggagggggctggaggaggaagaagaaggctgagcccccctctcctccaaacctagctcggccactgccatcatgcaagtagcgctttttcacatgattgtaattaaatatgttcctgcaaagtactaatacatcgtcaaaaagttgtaaatacttgccaggattacaaagacgtcattactagtaaatacatctccataatgttgtaaatgcatcctcgtgtaactttaatcggcgaggaagcgatagcacccaagagcttactatatatctacctatcattctgtattgtttatttaatatatatttgtgtcttcttttcttcggagttcaattcatatgccaaaaaaaatgctaaattgctaacttttttcattataaatttcttctattcatgcaataatttccctatatgtaattatttgtgtagatattgatgaatgcaaagaaccgaagaaatacccttgttatggaaactgcaaaaatataccagggcatttcgactgtacatgccctaagggtacccgaggaaatgcctttgttgaaggagcatgccaaaaaatcatcttaacatccggagtacgaatagcaattggtacgcacctataccaactctatctcatcacgtacatatactttcaatatagttgaggcttccaacgtcttgaattccattgcaatataactagtttttgtttgacttctgatgtgtttcgtgtggaaatgtaaacaaaactcttgatctacttgatttggttatggcttacataaacgtaaaacaatactgatgttaacatacttgcttagaccataaattgattacaacttccaatttgttcgttcaggagttgttgcgggtgcattggttggcctctttggtttccttggatggggggtgatcaagtacaaacagagaataaaaaaacaagctctattaagacaggctgatgagttttttcaacaacacggaggtcagctccttctagaaatgatgaaggtagagggcaatgcggggttcaccctctatgagagagagcggatcaagattgcaacaaataacttcaacaaggcacacattattggggaaggaggacagggaactgtttacagagcagtgatagatggcactaccatggcaataaagaggtgcaaggagattaatgagagcaaaaaaatggactttgtgcaggaattggtcatcctttgtcgcgtcaaccataccaacatcgtcaggctgttgggttgttgccttcagtttgaggcacctatgcttgtctatgagtttgtgcaaaacaaaacactacaagagctgttggatctccagaggagcaagaggtttcatgtcacactaggaacacgtctaaggatcgctgcagaatccgcagatgcatttgcacatctctactcgctgccacgtccaatactccacggcgatgtgaagccagccaacattcttctcgcagagggattggttgcgaaggtgtccgactttggttgttcaacaatcgatgagaaaacccaagttgtgccaaaaggtacaccaggctatattgatccggactatctactcgagtaccagctcacagccagcaacgatgtatatagctttggagtcattcttctcgagcttctcactagtaggaggccattttcaaaagaaaggaagagcttaacatcaatgtttcaggaagctatggcaaatggcacacttgtcgagctccttgatagcgacatagttgatgaagctagcatgcgagtgatccaacaagccgcggttctagctaatcaatgcttggttgttccaggtacaaccaggtccacaatgatgctagtggccacagagctctgacggctagcattagcagatgaagtgcagcagtacccacaaccgccattggtgcttgaggacctaagctttacggggatagggagaacatcgatgtctacatggtacggtgggagcaaaacaaatggggtttatggcctctcgaagaaagctgtgccgagcatagagtttgcgagatgattgatagacatcatttcttatgttgtcgtttgtaggtgtgtgagagattgagttttcatccagagtggaggagctggtcagttgtgtatgaccatgcctatgcattgtgaggaataagagtacaagaacgtacatgtaaacccgtgaagcataattgtattgtgagactgattagcgaatcctaagaaaataactagttgtgggagttgtataggtgaaacaattatatatcagttggaaccatactacttcaataatctacttaattatttttaaagaaaactctcaatttgctctcgaaagtgattgattccctcatttgctcacgtaaaattggttctccctgatctaatgctcctcattcccagcttttatcctttatttgacatttcggttagttttatatatcaacctagtaaaatgatagttttctaaacctagtggcatgatagttttgcccttaacttttcctgtgcgtggttagcaattttcgtaaacctacatgttattttagcaaagaagtgttatggaaaattatttaaatttagtatattgcatgaaattaattgccatggttgcttgttaatttgtaagctgtaccatacttttaattttagaacttccactaccggggaaaggctcttccggtttgtaactctttttactcctgagtttcaaaccaggatgcccaatccgggactaaagatgccggttaaaataaccgggagttaaaatgaatccttaccaactgggactaaagatgtagccaggcggcaggtttcttttttcctttttttattgtttttaacatcgaataatgatttcactccatccacaaatcaaccccaaatcaatcaacacagatcacagcacaaaagatatcaccaaatcctcaaatcaatcatcaccaaatacatcacaaagtgtaaaaaaattacataacaagttctacaaaaaatcatcacaaatacatcacatattcacatcacacaaatacatctcggatccaatcacaaattcttaaaaaacagaaaaaaaatcaaatacatcctcgatccgcgccggccggctcccctccgacagaggcgcaaccgccgcctgccgcgccggccgcctccgcgccagcgcctccgggccggccgccgcccctccgcgaggcctctccgccggccgctcctcgatctgctgccggagagagaagtagaagttgtagagaagggaaggataaggataacacatagagggaggtgaggagaaggagaggataaggataaggataaggataagagatagaagaagatgaggagttgggaggataagtcatagggattatatcctgcatacggaattttagtcccggttggtaataccatacaggactaaagatcgaaataatctttactcccggttggtattaccaaccggtactaaagtggtgatctttagtcctagtttgtgccaccaaccgggactaaaaatcctcggtcccctgacaagcccttggcagagaatgaaccgggactaaaaatcttctttagttccagttggtgttaattaccaaccgcacaccaaccaggactaaagatcaagatttttttaaccgggactaaaaatgattttttgtcccgatttttatagaaccaggactattgtagtttttggtcgaccctgcaaagatcagttttatagtaaaattaaagatcaattttacagttgatttatttaatttttttatctttcagtctttgcttccaaaccgtatgaacataagtacaaattagaagtctccccctttactacggagaactaaacagttggtaagtactccatcctcttcatattataataagtcgtttgactttttacctagtcaaacttcttcaaatttgaccaaatttatataaaaatatactaacattttcaatacacaagagcaaaattaccatttcacctatcgactagatgtatgttagcgaaggactaatgagaagagcaaaacaaatgataaaattcgataatgaatggtataagagggagggccgatttcacgtggaaaaatgaatgtatcaattaatggataaataaatatttttctcttatttttgaggctagaaaagaggtcatcaccagttaacacactactctgtcaatttgaatgggctttctcacctttacgactaacaagtggaggtggttgcatgatactctcatagctcgtttttctgatataaacaatgaaaatggtcagaagcaatataacattctttccatgggaataatcctcgggcggtcggtaactttttatattttaactgtccagtggtgatattgtaacataacacaaaaagatagttgaaaattaaagtttatgtatgactatagaactttatagtagtatcttctagatcagtaaaagggtccctatgctatagattggtgtagaatctcttctcctggtttcatccctttcttccatcgacgtgattggctttcgatgtgtttggcttggacgacagacttggaggtgccccgcctctgtttggatgtcgagaagaaaagtccctggtgacgacttgactcgtgaaggttgtcagggttggccgcggatcgcgccgatgctggaatagtcgctgcagatcgagttgaagcgacatcaccgagcgcacggtgcgacaacagcgacgacgcgacgcgatccgaagacatcactgcccgcggtaactgcctcccagaactggcctttcgcggcccactcgcaattcacaaagcggccctgtgggctatgcatataggaaaaggtccaatttgactccatcaaaatatagctcaaatctaatttatatctctcaattgtaaaactgaatatatcgactcctccaacactcaataccgtcgaaaacaacctcctcaactgttttgattgtggtttttgctaacgtgacaaccatgtggaggcctagtcatcatgatattaacagtagagtgaggcccacgtgtgattcctttccaatctccttccttctcttcccctctcccccttcctttgttttcaggcttcacgacagctagtggctacagggcggaggaggacctcgagggagctgggtggcagcgagttactccccaccttgcaacgagctcgagctccacatccatctccatcgaggaggataaggagtgaggagccaaggaggaggtgcttggggcgaccgtgcgtgagtgggagaagagctccgtcatcggggagaaaggcgctcaaggaggtgttgacacgccgtccctaagctggcccccatcacccctatctcctcttggcgccaactaggccgaggccatcatagatcccgcctgcgactgtcgcctagactacatgttcaccctgcacgtggactcggtggacgacctcccctgccgcgcttgataactccctgatctctgtccacttccaccgtcaaagaagacccggtcggatgggcaccatcccaattggaggggagtgctcgccgccaccgccgcttctcctcgccatttcgcctcctccgtcgctatggagaggagggactagtctctttcctccagggagggtcaactggccagggggaagaggaggagagagatacgaggaagaagggagggagagaaagggaggagaagaaagagaagagtcacgacaggtggacctcacatgctaattaaccaagttagattatgtcaacgtgcctcatcaacgaaaacatttaaaggagtcaactaaatcggttttaatagtatagcgtttcatactctagtattacggcagagggtatgaatcaaattgaagacgcattttagggacttaaagtggacttattccatatatacacagtctacaagcaatgaccgacgtatctgatgggctggtgaaaaagatgctccccgtggcccaaagcagtgaatgctgccgtcttcccgttgtcaaaagactctccgatacttcttctttttctttttttttcgaacttcaactctaacacagttaggcccatttggaatggaatgacagaattttctccgatacctatcaataaggcggtcacacacatcctatgacttggtatttcacaagtttctaaagaagaagtatgcttcccgcgttctatcagtcaacccaccctgtaccacctcatttacccgtcctataagtacatgtcaatcaattaagagttctctttgttcactactagtaaaaaacaattttcctgcaaaaggagctctttagatcgtagaaagagcgtttccgcgtgtgtctgtaaaaatcggcatcccattttcacgtgtagacctttaagaggcctgcacgtgaaaatcgattttcgcagacgtgcctcttaacggttcgcacgcaaaaataagcctattttcgcatgaggacccttaagaggctctcttaaaggcccgcctactagtctatcattcccttcttttcgctcctcaacactttaaaatttttcatccttatcctctcactcctctcactctctcacctctccctcactctcttaatctgtctcctctcttattctcctctcgcggtctagtgtgtgcggcgagtgcggccagcggagggcacagacggcggtgggcgcggacggcggcatcgagcggcttggcggtgggcgcggctggtggcaccgatcggctcggtgacgggcggatccgcctcggcaagcctcctgacggtggcgggcggcgtggtcgacggcgaaggcggtggctccctcgcgaagctccggcggcgatgacaatgaggaggcggccggtagcggcgctgatggccccacgcatacgtgcgctggctggatccacgctgccctcgccgccgacgacgaggaggcgatggcagccgggagcggtgccgccggcttcgcgcgcacgcgcgccgccgccaacggattctccggtttccattttttgaatttttattttattttttggaattttatttttctatgcaggcgacattacccgaccgcacgcgaaaatccgattatcccttgcgattgggccgtccacatgcgaaatatatattttcacagacatgggacctccacatggaaaaaaccctttttgaccgcacggaaaaatccttttttattagtggttggagctaattcttaaacatgatattatggttaagcatgatcacctaattttttatacggaattaatggaagagtaatggccggtgcctgatgaatccataggaccgcttaaactcgtgtgtggcgttgtagatggtgcagtagtggtataccatacatggtgttggtaattttttgacaagttgacaagcacgatcgtagcatcttaagtcttgtggtgatcctagagtcgccaaccacctcgatctagcaaaaagctaaacctagatgggttttgataactaaaccggctagcggagccgatttctagataactacccgtctcgtgggcaaacggaaggttttcaggacaaacctacaaagagatgtcgcactctcgcagcagcggcggacggtttacagcgcaaaccgacaaagatggacaaactaagagaaaactaaaagcaatatgaaaagaacgattcgattgattgatagtagattgattttacaatgaaccggccttgtcccttatacaggggttggtcttgccctctacaggccctcctccacgtccaactcggggtagaaaccaaaggaaacccaaaacatgccttcccgagcaaggaaacctcgagacccgacgaaacagggtcggactcggaccagccggtgtgcggccggtcacaccgccggtctgaccggccctcaaccggcggtctgaccgcccaacacaaggcctaccccagaggaaaccggtagacttccaaattttggcaatatttcctattttaatctaggtgccaaatttaggtgtaaacatatgatactccctccgtttcacaatgtaagtcattctagtatttcctgcattcgtattaatgttaatgaatctagacatatatatctatctagattcatttgcatcaatattaatgtggaaaatgttagaatgacttccattgtgaaacggaggaattagtactacacatggtgtagtagtaaactcccagacttctcgagtagttatagccaaacgaggttctcagaaatctgaatgctattgtgttcttacacaatattgtcactccatttcgcagtggacataaagaaaaaaccctgaaaactagtgatcgaaggccaaaagaaaccaaaatctgcacactgttttgtccctttggacacaatttacaaacgcaaccattacaggcatctcaacaagaactgcatctctgaccatcaaggccccaactatctgcatatgattgaaatcaaacaaacaaaaccagcactccatgggggaaaaaatcaatcaacctatccctctctctatacaggaaacaacaaatcaatcatcatccagttaaaaacccaattccaccatcttgtacaagcaaacacaatattgatcaggtcatggctctttcagaacctcaataaccaaatccctagccctgtggaagcacttggcagagaatctctcgtacaccatctcgtacatctgcaggttcaaatacgcaaacctcatgtatctgtcaatgcattcctcatacttctggtacaatgcagggatggtcagaacagcaacaatacctgtcagcatgaggcaaagaaacagggcgtgcttacgatcaatcattccaatgccaaaccattgtacaagtggaactaaatgttggaaaattataccggtaataaaatgatgggagctgcttacttgtgtaacataaagtggtgaaatcagtcaggctgccaatgatagaaatgatccacaggctaaggaagacttgataaaatagcaccgagtctttcccgagtgcgatgtcatggaagacagagaagaccgtgttcatgccagaatgcagcagggctgccacttcattcacaacctgctgcgaaatgcgcatctctggaataggtggctctggcctgcaacctcatttgtttgcacaacacaaccagcatcgtttaaaatatttgccaaatgtccacagcgatgagcaattcactcatctgattgaagtaaaaaacagtaagctgtttgcaagacaaagcttatcattgtctacccttagcatttcagttaaaatagtttacagcacgtacctaatctgacatcagtatcacctggctggttgttagattgtcaattagcataaatttggtcaaagttcaaagcatccacctaatcctctaactgaagtaataatgattaaattgatggaggaatgtcaaaacaacagtgaaagctgtgatgatgataagaattaagtgcctggattgttccttccattggttaactatcaactgaaatctgtatcccaaaatggatagtagagttcaacacaaattccgttcctgtgcgaaatcgatggctaagagtactatgttgatgtaatgagatggctaggattgaggagctgagatcccaatctcacctgttgaggaggcgggcggccttggcccagaggaagaggacggtgaggaggaggaggaggacgttggaggcgagggagaggaaggtgtagccgccggagccgaagagcagccagccggagacggtcgccgccagcaggcaggcgctcacgtcgccccgccgccacatcaccacgtccccaactgcaaccatcgaatcgatttaatcctcgatcaaacaaagctggaagcatacctacccatcatcggatcgagatgcctaccaaattctccgatcagagatgagacgccgccgccgccgccggggcagcaagaatcgtcacgacgatccatggacgacgaatcgaatcaatccgaacaagcagcgaatcagcaaccagctggctagaccgcggatcgaaggaggaaggggcaagtcaatgccttttcctacaaggagaagaatcggggatttcggaaactttccccaaatgagatttctcggtgcgctagctggactccactcaaccaccgatcaacagctcaactccctcccaggctcccagctcgatgtcgcagctcaccctgacaggtgggcccttggccgttgtacagcgtggaaagttgccacgtcggacgctcgtggccacgtcagcctcgcgtgcatggcgcaacggtaaggccattcacagtgcgtatacctgtactagttgagcactttctacgagttctcacgttaattatataccccatctgcccacgtcgccagcggacaaaggcgcacacattaattatataccccatctgcacacacgttaattatatatcccactttctacgagttttcacgttaattatataccccatctgcccacgtcgccagcggacaaaggcgcacacattaattatataccccatctgcacacacgttaattatatatcccactttctacgagttctcacgttaattatataccccatctgcccacgtcgccagcggacaaaggcgcacacattaattatataccccatctgcacacacgttaattatatatcccatctgtccacgtcgccagcggacaaaggcacacagccatggcaacccgtcgtcgtatgtggcggtccagcgtgcgcctcgacacatcatcatcctctccagccgcttgttagagtgcgcagcccggcccactaaccgtgggctacccaggtcacattggggctgctccaccacaggctcaaccggagccacaactttaggttctgggcctacacaaccaaaagactagtctgatgggtgaggaccgcccccaccttttaagtcgtgctcctccatcatcaattaccgatgtgcgactaaacccaacaccgcacgtgctccagtaatctcggacccccggaatagagcttgtggatggttaacgtatatactttctctgttttacaatgtaagtcattctaacattcttacattgttaaacggagcggagggagtacctgctaacttatatacttgcatgcgttcttgcagttcgagtcctgcttgcagaggtacgtgtgggaggtcgacagagctatcgagccccaggtgaacaactcacgaacttgctgtcgacggatatctgcttagcttaatatgtcgtgtcctgcatgcatgcatatgactacattacatacaagaactacaaacccaaatatttcaatccactattaaaataatatttctacaataatctacacgataagaagaaagtttattagtatagttcactgttagctttaagcccatattaaaattgttttcaccttttcttttctctatctttctcccacttacgcatttaatttatttatttatgttgaagcatgtgtgtagttctaggttattcatgagagtgaataccctttatattttttctttttccaatccacgtgagttttacgtttatagctggcttatagcccactactatctttgctctaatccttctcatgcattcatgattgaattcatgaatgaaaatctatagcaaaggtaaggccccagttaaataaccaagattggtttctgatttggttgttcttttgttcacccagaaatcttttgcatgcttgcacctaataaaaagacagatccatataaaatagttgcatctgcagcccatttatacatgtgttctgtactttaacattttcttgatctatgattttgattaaataataaatcattttttttacttttccttatataatatgagtcgtttcacggataagttgaacagcaaaaaaacaccgtaatttactcaatgaaaattgagaattaatcatatttttgaagcagtgaataattttgaaacagtgaacatatatatcgacccataattttttctgcatataaactagcaactaatgattaattttcccatgccctatctctgaataattaagtccataggcaatgtatgtactctacagcctacgtattactggccgttcgattttgatcctaatgttaatattttcatcacatgtaatacctatattaataataaatctgtcccgtacttcgtccaaatacatttcattgaatgacgatatatatataacttatcagccttatcagcctaatccatagttctttttaattttcaaagttggagtataacacaatcgcatgtctatggctaaaattattcaaattaagaaggaaacatggaaaggcaaggtcagagaaattagactaggggatgtggtaatccgaacaacaacctatggtcctatcactagtagagatatgtcataggtgccggtttgcaagtgtctataggtgctggattttcacccggcaccaattagttggcaccagtagcaaaacccggcacctatacaaaaatagaaccagcacctataagttcacacgagccaaaaaaaaaaaaaggggaagagccggctcgaatcgagccgagctcaccaa
